United States Patent Application Publication US 2014/0057251 A1 - sequence listing, part 3

SEQ ID NO: 2275 - DNA, 1491 bp, Cannabis sativa
ttctttcagctcctgatgaatatggtcttgtttggcttggctggacttctgcttttatcttctcaggaactaaacttggcttctgtcaaaagagccatttagagctaaaaaattgaaactcagaagtgcttttagagttttagaagccccaaaacggcttttaaaagcccacccaactaaggagtatgctttattatttacatgtagttacgcttctatgttaatgccatattgcagattgatcgccgtttgggaaacgctcatctcttcaagcgcagccttattctaatcaaagcctggtgctattacgagagtaggatccttggtagccaacatggtttgctttcaacatatgctttggaaacattggttatccacatatttaatctattccctacatccttgaaagaccctttatctgtatgttgttctatttcaatttaaaactctattacttgtacaaaatcatattattggttcagcaatatgtaattgtgtttcctttgtgtgtaggttttgtatagatttttggattacttcagcaagtttgattgggaaaaccattgtctgagtttaaaaggaccaatatgcaaacacactcactctttagttgagtttccagtaaatgataacagtggtctactactaagcaaagaatttctcatcaattgtaggaaattgtataaaattccatttgatgggcttgagacagacttggttttctttcgtatgaaacaccttgatataattgatcccttaaaagaaaataacaaccttggccgaagtgtcagtagaggttcggtgcaggctctctttgttggttttcctttttagattcatgtgttttcctactgaagaattattgtgactgtttatttttcaggcaatttgtataggatatgcagtgctttgaagttcggggctcgcaagctcagctggattctttcactctctggggatagaatgactgaagagctgcaaaattatttttgtaacactttgaataggcttgaaggaaaatatttgccctcaacaagctatcggtcaaggtaataagtattaagataattcacttctcaattggtgcaatgcaacttcattgatgtgttattatattccttttttcttttctgttttgtttcagtgttagagggcagacatatcatctgaaagatgaagatgattttccgccactctcctgtgcttgatatctcatctatatatctattatatctattacattttctaaggagctagccactgatatgggctataactggtgcaatgcaaccccaagaggtgtcttgtttgctggtgcagcagttagcacacatattatcacttgctttgtacactattctattccacattttattttagtaacgagctcaatcatgtaagtaggcaggctattattactaagctctgaaaataaaacaaatgcagaagaaattaacttgttaaatgaccatttgatggtgaaaactcttt

SEQ ID NO: 2276 - DNA, 1983 bp, Cannabis sativa
tgtttggggaaattgagaaattgctggagaaggttcgcgcaactcctgcggaaattggtggagagctgatgaagaatgacaatgctgaagtttcacttcaaggtcttatcaacttcctccaaagcaaggaagaacagagtcccggagaggagagtttagaatcagtgtaatgatatacagattgctggtttgattgtttgtttatttgtgtgttttagatatttttatatgaattgttcacatcagattgagcttttgttaaggtatatagcaaacaaagatgatatgattgcccaagacaaaactagaaactagtagtactcctttcatggaaagaaaaactatatgaatgctcttttttaccatttttcaacagccctataagtgaggtgagaagttcaaaatcagcttccatgaatgcatctatgactatcttcctcttgaattgaattgatcttcaaagtctacgtggggtaggcagatgaatataggttagacaagtcaacaaaacaataaaaaatcctgctttttatatatgttctaatgttatctgttactcccagcgaacggttttggaaatttatgaagcttctcctacagagaggtctgttatgagttctattcacatgggcatcttcactattgtggatgacatgaaatcatcgagaatgggtcctattttcaggaaaaatagaagaagtttaatttactaatgtccatagtccatagtccatagataaaactactgaagataaatttattatctagagaaattacatacccaatgcaatgctcaaagtggtctttacatgcatttcgttaattatctctgccaaatctttgatctgtaaattcataatatgaaaataaatgaatgatcactaaaattgcgttcaacctttatgtttgtgcaacagttaatcatagctctaatagtatttggataagtatatcccacagaattccaattgtatatgaaaaaaatatatagatcatgaaagatgatgaagggggagttattaagtttaaaaacatttgtgaaaactgaattccgtttgtaaagttccattaggttcttttgtcaattgtcatctttctgggaaacaattgaggtgatttcttgaactagcttgagttaggaaggatcatgtttggcaagaaactaaaattctttacttcaaacttgggccctaataatagaacttttcacacgaacctgcctaagtagcaaaactaaatcgaatattgtaatacccagatttaaatataaaagatttacctcattccttgaccatccccattgacaaaaactttcttagtgaactgagaacaaggaggttgagctaatgtttttaaagctgatgaaaaagaaaatgctttcaaatacgaaaacttttccggtataatcgaattatcaacacttcaagaacgagtcgaaaccacattaagctctttgaaaaaattgaggtccaatgtccatatcacgacactagtggcctgctatgtcctctgccagtctccaccatcttcttgatccgaaaaacttgagcatacacggtatttcagagcccctttgactttgagcgcaccaaacaatggtgaagatgcacatacagaatcgaaaatagggagggctattttcaacaatcgttgtagatcaaacctaaacccaacaataggaacgattagaagggaagttgaattgaatttcttaagaacaaaagccaacccatttcggagaagaaggagaatcagtaatcactgtaatcaatttagaaggatgaaaaggacaaacggtatatggttcaatttggctaaggggtgttatgaagtacctcacctcatattgaggttttacacacctcgcatgagacaaaaaaactaacattgtacaattttttttagtttttctagacttaccgcttgcagcaagttcacgtaccggctgacacaaaaaatagaggtcaataaattaatttttta

SEQ ID NO: 2277 - DNA, 781 bp, Cannabis sativa
tgattctttcttactacttcacttgctataaaaatactaatttagtccccaaaatataaaaaagaaaccccacataagtagtacatgtaatcaaatggaacagtaacactacatttggtatggagagatgggtgaaagggaaagagtagaaaagaggtgaaatctattgtttggtaagaaggaaaaaggagatgagagttggaggaagaccttctccatccaaatcccaaaaatctaatcccttcacatttggaaggatttaagaagacagagtagatataccaaatatcaaaactatccattaaaaaaataataaatatttatattaaaaaggatactatgctaactttaacaactaatttccaacacaatggagagttactttccactctatccttcctaaactcttcatccatcctactttccctcattcctcccaaacatatcctaagagtaacttttgatttattaccaacggccaaatcaactgtaaatttaaaaaattgtacacatatttctcttgaaataatcatgtttgagaaaaaggtgctttgatacttcaaaaatggtaaagattttctcattgaaaaaggaaaaggaaagaaagatcctaaatgataatatccccataattaaaaagactccaaattttttaaatgttcttatgtacacattcatacgtggactggagagtaagagagtatattcacagctaagaacagctgcaatattttatcttttatttttgtgtgaaattttaacttgcacacatcaaagagaa

SEQ ID NO: 2278 - DNA, 1060 bp, Cannabis sativa
agccattgacaaagacccttttcgagccgtttggagtttggttctaagatcctccatattagctctcgagtgagctccgtagagatcctcaagtgcagtccataagttggctgcagatttacatcctatgacctcggatgcaatgccttcagtcatggatccaaagagccagcccatcaaaagctggtcatgagtcatccaagattcgaaatctggatttataatggggattccttcctcagcaccattttctgaggtaagaaactctgttgggcatggtttagaaccatttagaaaaccttccagacgatgcccacgtataatggttagaaccattgttttccataaaggaaagttgtttcgatctaacttcacggtgaacggttggctgagagtattgttgaagggagcagccatcgttgagttagtcgagcttgaaccaatcgtttgggttgcagaagcacctccgattgaagaaacttgcccaggtgttttcggagtctgagatgaattgtctgtagccatggcgttggcctataatgctctgataccaagataaaaaacaggggaaaccagaaaatgtaatactcagctcaatgagcatgaggtaattgcattgatatttaaggattaccatttacaatccaacagctaagatattgacaggtgtagggagattacaaagagaatattacacaggaagatatgctaccaaatcctaacagaattgtacaattcgtacatagagaatattcagtgatattcttcccaaagtatgggacaggtcatagtgacacataagcacacacgtcaccaatcatttcttgacacattttacagatgaagtctcgattatactataacttatgtgctataattaagtgtagggcgaaaatatattggacagcccaatcacgaaagaagatacattttaatgaaatataatatgaagatatttttaattaataaatataaaaaaaaatatttcttacttatttcttttttctttttaatacgagcctatttttttttagcccggcacattttattgtgcttttca

SEQ ID NO: 2279 - DNA, 627 bp, Cannabis sativa
gggagggagggggagaggagggagagagagaccgtcccttgaatttcatataataggttggatgtaccttctgcatttcctcttttcggacttgttggatatgtatctctcaatttacccgatcgcttctcttattttttttgtagctttatcttttttatctattttttatttttgaataaatcttattttctttttcttttagtttgtttgcttacttttttttttttgaatctggatcatttattacaactatttattttatttataatttttttttttacaatttttaagatgttctggtgttaattatcatggttggattgatactaaatggttttgtagtatctttttgacatgagaggttaacctctgtgctgattggcaggtagactactctggatttatgacaataaatcctcaaagatttggtcagaagtacgtaggaaaggtatcatcattctgccgttcttcctggatcataaagctgactgcttaaatgtttctgacaaattgcatttgggacgtgcaatgcgttcaacatgttgtaggttgcaaatcctcaagacatccttatattttcaaaggcttcaaaaaagggtcaagctggtggtgagttcattcatt

SEQ ID NO: 2280 - DNA, 2103 bp, Cannabis sativa
atattccagcatgtgttttgaagagtatcggaaatgattgaggattgctagtttgattgattactgtttggggttttttctctgcagaaaaccaaccctgttgtggctgagattttctctcttatgtccagagatgaagcaagacatgctgggtatgtaatattgtatgcatatatattatatataaaaacacacaccattgcttcactatatgtttgtatataaatgtaaaactcttgttgttttgtactacttttaggtttctgaacaagggtttgtctgatttcaatttggctttggacttgggattcttgacaaaggcaagaaagtacacattctttaagccaaagttcatattctacgctacctatttgtctgagaagattggatattggagatacattaccatatacagacatcttaaggagaatcctgaataccaatgctatccaattttcaagtactttgagaactggtgccaagatgagaaccgtcatggcgatttcttttcagcactcatgaaagcgcagcctcagttcctcaacgactggaaggcaaagctgtggtctcgattcttttgcttatcggtaaattttgctttcctataacaaatgtgaacatagtgaaacaaattcatgttattaagtttggtaataactttgttgcaggtttatgtgacaatgtatctgaatgattgccaaagaacagctttctatgaaggcattggactcaacacgaaagaattcgatatgcatgtcatcattgaggtgagactcttttaagtgttcttattagttttgtaaactgtatagcattgattaactcaaacacttgttcatcactctacttgcagaccaaccgaacaacagcacgaattttcccagctgttctagatgttgagaacccggaattcaagaggaaattagatagaatggtggtgattaatgacaagcttcaagctgttggacagagtgatgatattcccttagtgaagaacttgaagaggatcccacttgttgctgcattagcctcagaaatcttggctgcttatctaatgcctcctatcgaatcaggatccgttgatttagcagatttcgaacccggtttagtgtactgattttttgtttgttcctttttcttctcatatccatggctgctactgtatgatatagagtggaacatgttgtgtagagggtctcttacattaatcttgtaataatacaacatattcatgggacttaatttgccttattttaagattaaattgcagtaacatatgtctcttcattcattatgatcaaaaatatgaaatagttgaactaaaatttgtgaagagttttaagttacatcagttaagactagaaaaggtttgaaggtcattgcgaaagcaataaactcaacaacatttagaatgaagaaaactaaatgatcacctgcaacaaaacacaccattcatattaatgtaatctttactgtatgattaatataaaatcataagaagttttctcttataatatgttgagatttagatcgttttaccggggagaaatgatccattttgatgattctgtgcccaagaaaatctgaccagaaagaacaaaatcaatacttcaacacttgaatcttttgacaactacaagtttaattactcaacttagaagaaaaacacaatgaaagcaaaacaatacagagtaaattaatgtgacattatagaatctggtcattgaggtcaaatatttcggatttgaacgagtttaagttgtttctcggagcaaatatttcaaccttcgagctgacatgacccggaggccaagtttattagtgttttttgtaatgaaacttacatgacacctccaccagctggaccgatcgctttgaatagagacattgcagccatggatatgccatttgccgctcctctttggctttgactctacaaacattcattgaaatgtaagaataaatacacaaaaaaattgcttccaaacatttaacaaagtaattaagacaagataattaccacagctcgattttgtagtagaaacaatcccgttgtaatgcacacctaatcgcgcattaaacaaatagcattgatcaaagttc

SEQ ID NO: 2281 - DNA, 1316 bp, Cannabis sativa
taagcaaatctaaaaataatcaaaactagaggtttgaacaaactcatgatcacaactcaatcatcttaaaaattgatctgcttacactgctgagggtgttagaggtcttgtccaagttttgatctgaaaaatcttgactttccatgacaacaagagtctttcactgaaattttttcaaagagtagagaaaataatcatgttatgtttttctttttcttagaatagaatgtgttaaaggaagtaatattaggaaataggaaatatcgatggtgattttggaaatagctcttaaagttggcttttctttgtgttagtcttcttttggagaatatctcattcggtcaatgaaaagtgatgacatcacctatttactcaccaaaatgaactaaagagaagaaaatggctcatcaaatcatgtgtgcatatataatcttaaataagaaaatttagccaattctaaaccagtgatttatacaaaaaaaaaaaatatctagttgtgaatacgagttggaaaatagctggttttgtttgtattagtagaaaaatggtttaccttatttattacaattggttgaactgtgttattcaaagttatggccgtccttatgatagcaatatcttgtcatgaaatagttgtaaattagtgactatatttgatatcatataatttggatttacaattctaccatgtaaagtctcataatagagtctttgatatgaatgaacatttttgctagtcattgaaattttcaattataagttaaaaccaccacaaaaagatgccaaaaggaaaaaaccacaactcccataaaaaaaaataataataatgaaattggaacaaatggtttaattcactctagaataataagaatatgtgtatatttaaaataaggcaagactttcacacacctctagcaaagaacaaccataaaaagacattaagtgactgtatacatacaaaagcacacactaagagaaacaaccataaaaagaactaaaagtcttgagaaagccatgatgacgatgatgatgatgattcagactcatgccgagatttttcatttcgaaaaatcagtcagacagttcaaaaagagaactcaaatccatgttgtgtttgttatcatttttgactggtttaccttttttttttctacaaacaaagtttggacactttaagctaagagattagaaataattaagagtaaaacttgtagcctttggagctgattatgatttgtctgagtcctccaattggtgctaaagtcatcaaaagtactccaaatacaatgcaagtctgcaatgaatgaatgaaacag

SEQ ID NO: 2282 - DNA, 1359 bp, Cannabis sativa
aaaaaaaaaaaaaaaacccttttagtctttgtaataacttttctttaaattattcagggcttccattattcaatttgatgaaatattggaggaatttttgtatagttttcctgtgtaagggcatgtaactttttttgtctatatataattaattgaagaaaattattaatgtttaatttaggtaaactaattgattaggcgtatatatgaaggttcagttacaatcttggaatatagtactttcataattaatatttaaatacaccaatcttcttagttgtctattacatgcaatataaattactttgggtttgaaagaaagatcaaattaattacttactgttgctagtctttagtctttagtctgcagtgaaagtgatgtaactaaaagtaattattagggggatggtctaggtcctttggataatggataaatataataaagcttttagttttgaataaacggcattaatggcaataaccaaaagattatctcatctcatttcagttagcatatataaacagttctatggaaattttgggcaaaaacaaagataaaaaaacacctcaatagatttcaattacaaatatcattaattcaattgattatggcctgtgagtggacctcatagatttatgaaaaagtagagtgaagtgatcgtgattttatatattatatattatgaaaaaaaaagagtaatggatattggcgaagaggtagaccagtagaaaagttcaacttcatgtgatgttgtctcaaataatggatggaatcaaacataaatatattgatacatattatggcaacttactattggagacaattgctcttatgtttccttcgataatatccttggactattcgtcatttctctcaagtctcaatcacacacacgtacgtattaacataaagttgaaaattctattcacgtggacataggccactactgccggagtgggacttggcttataattaataacgcagctatatagtcataatgaaatagcaatttagaaattacaaaagtagtaactaaactacgaaattcaggccatcataaatgattatgattccatctaaaccacttctaaaagttgagaagaggcatgtcctacaccaacagaggatcgaagaactagaagatttatgaattagttattggattgcattcaagcaattagattgaagcatgtggcagctgcttcagcgactatgagtagtcgatgctactatgtaactatatattcccattgttatccaccacagcatcaatcctaatcatcaataattatccatcccagtggaggatgaaaccatttttgagctcgattgtggcccaaccacatggtggagtagta

SEQ ID NO: 2283 - DNA, 2563 bp, Cannabis sativa
aaaatttaggtcaaatttaggtgaatctataatcttcaatcttgatttttttgaattatttttatatttttaattaattgatttaaaaattatataatataattattgaaaaaagaaaagatatatacttttggaattatttcactaatatataatttattgttgattttttattatttttttatatcgtgaattattttaattttgattatataaaaaaatggaataaaaaattattcttaaataaaattttattaatttagaattattttatagataataattaattcaaaaattataaaatataattaaatgaactgttctgaatttctatatggaatttttttttttaagagaaatgataaaagatattgatattatatgcttattagtaaaattaattatattgtatcatataatttaaggttataaatttaaaaaaatatcgctaacaatctttaaccataaatgaaaaaaaaaaattatatttttatggattttaattttgtttacaaaaaatatggagagttgattttttgttgttttcaaaataatgtaagaaatgtgaaaaatctgtaaaaaaaaaatggaatccatatgtaaaaaaagagtagtaaaaatgtaatgaaaattcaattttaagtacattttgtaaatttcctaattgtagagtataattttgagtaataaaaagaatatataatcatttgagtaataattttgagtaataaattgaagatgttacaaaattgtataaaataggattgaatgaatctcttcagtttttgttagggaatatattcaaatttaatcaatttgactaaactgttgttaattcaaagaactgttgttaactgttacaaaattatgtttaaattaaatgttacagtttttataattttggtttaataatgtggggattgaatctaaatgattttgtttttgaattttgataattttaattaccagtttatcagaggcatttgatctaattctccaaggtgcacaaaacctaataatcccaattcaaacttcaagaaaaaaacttcaccaaaaaccaacctcaaatcgtcccaacaacagggaatactgttggatcacccaagaagacctaatccgatacctactcaactcgataggcctctttagtcccactccggccaaccccatcaactccctaaacctaatcgataaccagaatatcctcgccctcaactacgacgatcctgcatcgtctgcattgcccctcataacacaaagcctcattagtcaaacctcggttgctgtgatcgacggggaagggagattagtaggcgaaatctcgccctctacactaaacttgtgtgatgaaaccgtggctgcagctatagcaacgctttcggctggtgatctaatggcctacattgactacggtggtccacaagaggatttagttcaactcgtgaaagataggctcgaggagaaggagaagtataaggcgttgatggagtttatcgaggaagatttgacaacaacaacgatgatgatgtcgtcggatgatgaatcgttcgggtgtggtggaaagagtgggaggttagcggtgaggagttcggaagctattgtttgttatccgtggagttctttagtggcggttatgattcaagcattggctcatagattgagctatgtttgggttgttgaacaagatggaactttggttgggattgttacatttgcttctatgttgaaagtttttagagaacgtttgaatacaatggcctaagagattcaaattcaagagaaaaattaagctaaaattacccaattaattaattaattaattaattgtttattattatgtattgtttttgagaattttgaactaaagagagaagtataaatttatggtggtatctttttggatattcttatgatgttccttttggacactttcaaaatgtggggaccttaaaaaacaaagcttgacttggaccattaaaaatgtatttttgatcatggaattattgtgttttgttggtatagattgattaggacatttagatatttatcaaaaaataattgagaaattaatattttattttagagtttgtattcatttggcacactataatataagtttagtactttatttaatcaatcaaattttattaatataaacaaacatttttcaatgagttccaaattcataattacatataattgacaatagtttagttaaattttattaaacatgtacaattttaaaatataaatataaagtactaaattaatattgttgaatatgagaatattctttagtacttacattttttttaaaggcttattatatgatatcaatggtacttaacactaccttatgataaaacttacaaaattttcaataataaattacaatataattagattttctttattcatgtttgttattattaaataaaataggatatacaatgatcatataaaatataagaagaggtagtttaagaatattaatatttttaaaacacaataagaatactaagtatttcgacaaaacacagagtagaaagaataataacattat

SEQ ID NO: 2284 - DNA, 1129 bp, Cannabis sativa
tatatatatatatatacataccaagtgttcttgctcagagttttattgactattagtaaattacactacaaaaaaatcttacttttagtcacaacaaaatttgtcactaaaagtaaaaaagttgtgactaattataaattgtcattcttacgttgtcactaaaaaatccgtagttaaaagtaatattagttacaaaaatcacaatttgttgtgattaaatcatgtggatttagtcacaatacttgttgtgactaaaattaagttagtgacaacttgtaactaaaaattatgtttagtcacaagtaacttttttgttgtgttttagttacatttagtcacaaaaatttgttgttgtgacaaaaaaattatcgctaaaaataattttttttttttgtattgtacagtgttaggccaactgggaaaattattccattcctataattaatataaggccttccaccccttgaactaagcaatgcacacgttagaaaaattactagctataattaataattttgaagtgactcatcaaaatcatgactatttgcaatgtgttatatattgtaatttccacaagttatttaatgtcatttctttattttctcacccaggcactcattgttcaaagcatagtatatatcacaacgtacgagtttattgatatattatatatatagtaattaatgtgaaacttttcttatattcattgcacttcatatgcttatccttgataccaactttgatcccaaatgaaattgtaatatacttgttgatagtcaaaccctaacttacacacgttggacccaaaaagcaaaaacttaagttttctactctcaaccctgaaatccctcctatgtgcctttgtctagattcttatgttctttgctgactactgtcactcaatgccatggtcctctgccttgacaccatggcctaacactatatatctctcacccttctttagtgtgcagccatatatcaaccaccctcatgccattccatcgatcgtgcttaaaccgccgccattgctcagtttacccacccttaatctctaccatacatctctttcttaactaacaacttgtttttcttcaaaaaaaaaaaaaaaaaaaaaaaaaaaaaaaaaaaa

SEQ ID NO: 2285 - DNA, 1663 bp, Cannabis sativa
ccttctcctgcagctccttctttcaccaatgaagccaatcctgtccctacaccagaaactcctacaccagatttttccacaacagaaattccctatcctatcccaccattacctcaaggacatccaatgcaaaccagatcaaatctacaaaccaaaagtttttctggtaactgcttcaaaacaacaactttatgaggaaccaaaaacagtaaaacaagctcttagcatgcctcattggaagaaagcaatggattgtgaaaatatggccttgattagaaagaaaaacctacattctagttcctcgaactgatgatatgcatgttctgtcaaacaaatggatttttagagctaaatataacaaagatgggtctcttgataagttcaaagcaaggctgattgtgaggggttttgagcaaactccaggagtggattatagcaacactttcagccccgtgatcaaagcatccactataagaatagttttctctcttgctgttacatatgattgggacatccaacaaatagatgtcaataatgctttttttaaatggcgaattgaaagaaaaagtttacatgcatcagccacaaggatatgaagatagcaccaaacctgactttgtatgtcaattaacaaagtccctctatggtctcaaacaagcaccaaggacttggtttgacacattaaaagataccttgatagcatggggatttaaaccatctgtgtcagactcttctctcttttacaaaaatcagcaaggttcattgttgcttgtccttgtctatgttgatgatctcttaattacaggtgctgattctcataatatctccaaattgatcacggatctgcacaacaaatttgccttaaaatcccttggatctgtaagctacttcctcgtctttgaagcatacagaaatgcctcgggaatctacctcactcagtccaaatatgctacagatttgctaaacagaacacaatttgaggatgccaaagaatgcaacacaccaatgatctcagcaaataaactatcacaagatgacagtcccaccctagccacaccagaaatctatcgaagcaccataggagccctttaatatctcaccttaacaagacccgatattgccttttcagtcaacaaattaagtcaatatctcaagtctcctactgaaaatcaatggaatgcatgtaaacagatactaagatacataaaagggactcctcatctcggattacacttcagaccatctactcttcttaatctagaagggtactatgatgcagattgggcatcaagtcttgatgatagaaaatcaataagtggtttctgcattttcttgggtggtaacttggtcaattggagttctcgaaaacagaaatttgtagctcgatcctcaacagaatctgaatatcgagcattgtcctctactgtaacagaattagtatggataatctctttactaaatgagcttggcatttctctacagaagacacccccagttctatggtgtgacaatcaaagtgctcaatctctagccttaaatcctgtttttcacacaagaacaaaacacatagaacttgatgtccattacatccgagatcaaatagctcagaacaagctacaagtgtgctacatacctactcaagatcaaactgcagacttattca

SEQ ID NO: 2286 - DNA, 595 bp, Cannabis sativa
tgcggcagcggctgccaagaacacaaagcttgaatcggaatcggagtcgtcgaaatcggaatcggaatcggaattcaatgtccagaaactggttgatatgttcaccaagctgaaccctttagccaaagagtttattccatcgtcttacgctaagcaacagagcttcaacaacctcaacgcaattaccaccgatgagtctctcttccccaacaataagcttttcccagatgataataactcaattaacagaagggtactcattattcttaattcattttttttttaataaccgaaaaaaaatgaagggatgggatctctcccttgtgttttcgaggaattttggttttgatatttcgtaatttggacctttttcgctgttgatttctgttgaaatgttgatcgaattgatgatcgatttgcgcttggctaatatttgactttttcgtttgttagttactgatatgattggttaattgattctgtatgagagctgttgtacaatattatgatttgaataaaaacgggctgagttatctataactgaatgtgtcgcgaaatgtgtcggttatgggttttccttggtttttatttattt

SEQ ID NO: 2287 - DNA, 2440 bp, Cannabis sativa
ttttttttttttttgattatttaccagccaaaagagcaagtatacaaagaatcataacaaaggttatcacagaagactaccaaaaatcaccacatgaacatttcccattgacaattttgtgaaggcttctgctatctcttatggttatttctctacctgtatgtactgaaacagtcttaataaaattatgacaatctctgcacattatgaagttcttgatcactcttatcggtgcggaactcggtgtgttcaataacccaaatgcaagtgctaacttctcactatgataagtggtagaagaggatgatgatgattcctctacttcttcctcatctgttacctccaaatctttcagtgattcatatcccaaactcttagcttggtcagtcaaattcaccaaaaatttgtggaaatcttcactatgatgatcagacttgtcatcagctttaaatgaataaactttgtccttaatacttatccagctccaatcctttactttttcaattctctcttctttcatcattttcttcaccttggaaacatctttccatcttttctcggcgcagtacatgttcaacaacaagccataagtctcggtgtgtttcggattaagcttcagtaactgttcagcagcataaaatcccagttccatatttccatgacttctgcaccctgcaaccaaagttgaccatataaactcactgggttcgaaatccatcttcttgatgaaatcaaaagcttcatctaatcttcccaatctcacaaacatgccaacaatgcaggcgtaatgatccatcactggcttaattttgtattgctttttcatcatctcaaagtaaccaagagcttcttcaaccattcctgcatgactacaagctgataaaacaccaacaaaagtgatctggttcggtctaactcccgcgagtatcatatcctcgaacagctgcaacgcttgctgagtcctaccgtgatgtgccaaacttgtaatcattgaagtccatgatatcaatgttcttatagacatctcaacaaaagctttacttgctttctcaatgcttccacatttattatacatgctaatgagtgcagttccaacaactacatccgaaagaaatccagatttaatggtctgagcatgaacttgttccccttgttctaaggccaccaaacttccacacacagttaagacactcgaaaaggtgaacagatcaggtttcatccccgagcggttcaattttgagaaaaggtttagtgcctggtttccactttcataagctgaaagcttacacccgtcatgttccatcatttgggcatggccagaaatcattaagttccaagtaaccagactgttgacattcattccatcgaaaagcctttcggcctcttgaatcctaccagtttttaagtataaatacatgatcgaattcttaactcgcgaattcgattcaaatccaagcttgatgctcaaagaatgaacctggcttcctataccaaaagacaacataacacaacaaaggctcaaaacagtagtaagagtaaactcattaggctgaatatcctcagaaagcatctgaatgaaatatcccaaaccacctgcagcatcaccattatcactaaaagcggatataatggcagtccatgaaatcacattcttttctctaatattctcaaacactttaacagcagaactcaaatgcccagattttgcatataaactacaaagtgagttaccaatactagtgtcaaaatcaatatggtacttgatcatataaccatggagttgctcacacatattgatccactgcaatgaagaacaagcatttataacaatcccaagagtataattagtgggataagagccctcttccaacatatctctaaaaactttaatagcaagctctggctctgaattgttaacataaccagtcataagtgttgtccaagccacaacatttcttacaggcaaattatcaaacagtttacgagcatttcccaagttcccacatttaacataaacattaactaaaaaagttgaaacaaacacatctttatgaattatccccctttttatgatctgggcatgaaccatttcagcatctgaagttgaattcttctcaatacattctctcaaaagatcaacatagtaagatgactcagtagaagcatcttctctaatggcagaaagtgcttcacgaaagtcactagaaatggaatctgatgacacccttttctgcccagaagataaaacaaaacaaaaatcaatcaagatcagttttttacattcatgaaagaactgattatgatgaattcaaagtttagtttagttaaagttgttacctttggattttgggtgggtggaaaaagtgatgaggagtgtgttctgaggtcagaggaatggagcttgggattattgggagtgttgccgccattgattggtgta

SEQ ID NO: 2288 - DNA, 1509 bp, Cannabis sativa
aaaaaaaataagtttaatattttcaataggaagatatggaaaccgtaattattgaatggaatttttcctaacccaacagtactaattttgtaagtttccattatttaacacatgatgaatacatattacaaatatgctaattatgcatatgggtcaaaataattaatttttgaaaaagacaagacaccaacattaattaattaattgcaatacattcactattactatttttatatattatctcttttatgcttgatggaccattttcaaacataataataataataataatcataataatatcttctcttgatcacaacatgtccttagcttcttccttggtctatttggactatcgtaacattttaggaatggagagatttcatgatcatcacgtatgctattacggtctttcaataacactgtagtaggacttgaagggcagccattataattataattataataataataatcaccatcattactactactccacagcttttccatcatattatggcaccttattatatcatcctacatcaaccaaaaaaaatgatcaatcagtttaaacaattaatccgattaacaaaacataaaaaattgcgtggttacaatattatatatatatgtatgtatataccttttgatgttggtgaaagaaacgagtgagaagagagtaatgatcgatatttaatgatgacgttgaaagaaatctatctaggcaaaaccatatggctgatgcagcaactacacttggtctaaactccaccagtttggtatctattaataagtagtagtcatgatgattactattataattttgtatttattgattaatcaaaagcaaaaacaattagatatagctacatctaggcattaataataaatatttatatatatatacccgaaatggctcgaagaagaaagtgattaattttgggtataataatgatgtgttgttgaaggtgaggttgatgaatgaatagttggagataagaatgagtagaggtacaagcaaggcgccaatctaatgtctccaatactttcaattccattctctgaatggcactggcctcaaatgaatgctccatatcttccatctaatcattatcattatatatgtatatatgatcattctatacatacaatataatatataggagaagtgatatttgcagcatcctatttcaatctcgatctttatcagtgttcacctatatttattttattaattttgcatagtttacaggatattcacaacatttatatatattgatattccgtaataatctttttaaaaaatattccaatttgttttcggcaataacaatatatagaatttattttttaaatttacagaaataatattatataaaaacaactaataatactgtaccgtgttaaaaaaaaatactccaacatatattttttttgctgaattccaagatatatttttgggagccaaaattaacaaagtgaataaaataagagattgtaaatattact

SEQ ID NO: 2289 - DNA, 1138 bp, Cannabis sativa
attcaatcagtcttctgtattatttaaaatcaggtataacgtgtcacttattttaaggctcagctagccatatgccattctatcttcttcaatacttaaaatgacttgtctattagtacgtacaacattttttgatacatatgatatactatacttcttttctatccttaagacaaaaaatccatctcatattcttctttggattctctttaaggcatgacattataaagtatattcagttttaagtaattttggatttaaaattggtcaaacctttaagagttaataaactaataatcaccatttacagcaattcgaaaaacacacacactcaccaaaagcaaattaataaacaaaacaagtcacaatataattcacactaccaactcattcaagtctctccctatctctttatttctcaagatcattctcggaacaagtatgtacaagaaacttaacattggaacatcttacttacactacccacttgctgtaattataataggcctaaattctaaaccctatgtgtactctaacgtaatctaatgccatatatggcttctaataacaattaagcctaacccaacatcaagtaaagcgcaatttttgtaatttgttgggtcagtagctcagtgactgatgaattcccttattttctccactgcacccctaagaagaaactactccaactctactacacgtagtttctcaaccaaaagggctctgcttttagattatatatagttatataccaagaagaagaaacaataaaaactagagaaaattttcaagaagacccctttgtggcttaattttaagaccaaaagtcccaccactgataaccactagaggattcatcaaaaagggtgtctgagttcaaattgccccagtcttcgggcgatgtaagggagctatcagcaggaggctccggcgccatgttcatgctcagaagctccgcttcctcgggttcaagtacttcttgatcaaaattataggctgccttcatgcaactatcatcgtctgatgagagaacccctaaaacgtgttctgttctttccaaagacgaaagactcggcttcatcacttccgattgatctgtctctgttttcacctttccattatccgagtccttatcaac

SEQ ID NO: 2290 - DNA, 1761 bp, Cannabis sativa
atattgggggaagaagaaccttagtgctttggtcagcactatcgggaagcctattatgatcgataaagtcacccaagatcgatcaatggtgaagtttgctcgaatcttggtagatatggtgatatcagaggatccactgaaatcgatttctttcatcaatgaaaggaagcaactaatggagcaactaatagaatatgaatggattccttccaagtgttcgacctgttggaatttgggacatatagtggcaaattgccacaaggaacaaccagtggtttggagaaagaagcaaactggtgatatcaaggctagtagagaggaaaagaaggagaagcatgaacaaagtgcaatgcatgaaatggcaaaaaaacaaccagggaacaatataagatctgaaggttatggagagggaccgattaggcatgaagctgagatacagaaggaaactgatttagaggtggtaggcacatcaaacacttggatcaccccaaagagaacagttcagaaatctaattcaagcccataagagattgctacaactacaattaacaacaacggttatgcgattttgcaaggagatgtagatgaggtaatggttcccaaccccaactcagattttaatggaagtttgtaacataattggttggaatgtaaggggaatgaataagaaagaaaagcagagagctattcttgagatttgtagagtgaataaagttggttttggtgctttgtttgaaactaaggtgaaacatgaaaaagttcaagagataaagataaataatttccctaactggagctatcattgcagcccggttctctctagtagaatcttactgatttggtaggaaaaatttgttaatcttgagattatagatgaagataagcagctggtgcactgcagagttaaagtttgtggccaacagggcactttcatggcaacaggggtctatggcagcaactctatggaagaaagaaaaagtctgtggcagaaactagaaagttatggtcagattcaggaaccttggataatttttggcgatttcaatgctatgttctcgtttcatgatagatgtgggggcaatccgattcttcccagggacatttgtgatgctcaatcctgactttccaatggtcaggtggaggaatttaaatgctcaggtgcttactacacttggaataacaaacatgaggtgggagaaagaattttttcgaagcttgacagagtcttctttaacaatgaatggctgagatgttttgctgaaattgatgcttgtttcaaatgggagacagtttcggatcatagcttatgcttcattcgaaaccataaggtgaacaaagtaggtatcaagcctttcaggtactgtaatcattgggccacttatccaacttttaagaagactgttcttgcttggtgggataagcatacaggaggcagctgtcttgacaggattgttaaaaagttgcttagagtcaaacatgcgttaaagaagttcagtagacatgaagttggagatatcagggaagagtatcaacaggccagagatgagtactgcagaattcaagaagaaacagttgcaaaccccggagatttaggtcttcaatcggtttctgatctaaagcagcaagagtttctaagagcccaaaatagatataaccagttcgtgggtcaacagagaaaaataaaatggccgaaatttaatgatgaaaattctagcttttttcatgcaactatgagaaagagaaggcttgaaaatagaatta

SEQ ID NO: 2291 - DNA, 1571 bp, Cannabis sativa
tgaggtgataggagtgtgaggcccccttggtgccgagatgatggaggcgtaaggccgctttaatgggctggggtgatgggagcatgaggccccctttggaccgagatgatgaagatgtgaggcccctctattgggtcgaggtgatggtagcgtgaggtcccctttaggctaagatgatggaggtgtgaggctcttctattgggttgaggtgatgagagagtgaggccccctttgggtcgagataatggaggcgagaggcccctctattaggccaagacatcgtgaggaggtgaagagacgccttggtctgagatcccatgaggagatgaggccctccattggtggtgagggtggatgaccccatcgggaggacctcattgaggaggaccccattgggaggaccccatttgtggtgagatattatggtctttccatatccaaagaaaaattaacactattaatttttttagcgataacaagattgaggtgagtattttaaatgagttgtggcttcttgatgatgttaatctgtttattgagtctactcacctgcgttggtttaaactaaggtaatactcttataatagcgaatggtgcagatagggatggggagatcctcgatgatgtactttcagatcgagatgcaagtttggttctgaaatttctgattagtaacacttcccatagctcgtgtttctgggcaaaagaaaggtcgagtatgttttttgttaaatccgcttataatgtgttacaaactctgcaaggaaattggtctagccatgatcaagatggacttagaaagaaactgtagaaaattaaagttcccccgaatgtgctaaactttctttggagagcttgttcaaataatctgccaactaagttccagctggttgttcattatgtgccggttgattctagttgccctgtgtgtaatggtgcactggagacgactctacacattctaatatggtgcacgtttgcctagaattactggcgcgggtctcgagttcctatcgtgggtgcaactaccatgatttttctaggttggtttgaagaaagattgaggtattggagtcaggtagagttgataaaggttgttatgttatgttggtccatttggcatcatcataaccaattagtgtggaaagagagattgttgtgtgtggaggatatttctttgtttgctttacttagctttgaggactacagtaatgctcaaaagatgtttgtgtttccaacccatgtttctcatgggggttttatcgagcatttgactaaactatactttcttaaaatcaaagtgaatattgatgaagcaattcctaacgacatggggcagtatggtttaatttttgttgtgtggctagagattcgactgtggatggtgttaagtgctaaatttggaagtaagttgggaagttttgagctgtatgttgttgaagcattggacatcaaggaggtgcaaaactggatcaaagctccagattggtcagatatgatgctttaatctaatagtctcaatgtgatctctaatccgattaaaaatgaaataatggtctcaacttatggct

SEQ ID NO: 2292 - DNA, 1918 bp, Cannabis sativa
ttattaatatttataacaattttactttttctaatcacttttttactcttaatatgtctaaatgaatcatatgtggagtcttaaaaattttaagacataaattatatttattttcttttctaattacatatatatggtatttttttttctttgatagaacatcaaatcatgtcattaccatcatatttcttcttataatactaaaaaaacgtgtgtcgtcatgatattatacattatattgcttaatattgtgtttatattagtatagtgtaagcataccactaaaaacaaatacaaaattactatattatttatatttttttattaatttacgtttacttttataagtaagataaatattattgcacaacaaactagataaaaaacagagcctacaaaaaagcaattacaaagctctatctgccaaaacttggcagaaccaaactctagacaacatcatttttttttttcttttctcaatctatctacaacagcctttttaacgctattaacaactttagagatcataaacacattatgattccataagactttattcctggcagcccaaatatgagacacaacaacttttaccactgctacatacacacgtcttctaaatctggtgtgcgtatctctttatccattaattaaaataccatcaagtctaagctgatgagatccaagaccaatccatgcaaatcaaacaagagtcattctaggtgactccaaatctgaaaatcctctccttcgtttgaagacgaccatcagcattaatttctcgttatttttttttctgagaaaaatgtattttgttttttttagatttaaaattttacaaaatatttttgtaattaaaatctttaagttgtaatattgtaaataaaatataaaaaaattatatttttgaaagttcgtcttaattttaatagcttgcattgatcataatctgtatttaattatttaattataagtgttaggtttttgttggtataagtcagaaaagacatacatataagttagaattcacgaacatattcatgataacagttaaccacgtaaatttaaagtaggattatatattaagcgaatctcttgaataagagctttttaaattctaggtctcctctacgtgtctatgtatatttctatgtggatatatttgattggtagtttaaaataatatataatacattattattaattaattattggacaagtataaagttgtttaggctgcaacaacatgatttaagtcagttatgacaagttcttataggtatccttgtaaactaattattgctattattaacacggttaaagaaagtatatttttattctttctaaaaaaaaaaaattaaaatacctgtgaactttttaggtgattaatatattttgttgaactattaagattgttcgattcaaaaatttctattaaattctatttaatttaagtttactaacgtaacgattgtctatgtactaaatcatgttctccaaactttaatatgtactaaatcatacatatgaactttgacaagtataattaaattatgtcctttaaacttcatcgacattaaatatatatctgctatcaagtaaaattgaacaaagttttttaatctaatattctcaatgaaggaaaatttttaactttataaaaaactctgaaaaaaagattaagtacatattaaagtttggaagaaatatatttttgtttttagggaggaaaaaatctcttaattagggaaaaatattaaaagcttctggcgtgcattacatgcaaagttactgtatataaaattttacaacccgcgtgatgaattaaatatatattctcttttattaggtaatatatgcttcttcttttgagtaaaaggtaactttgaaacataagtattaccaataattaaaaaaa

SEQ ID NO: 2293 - DNA, 1670 bp, Cannabis sativa
attcttaataagcatttgaaccattatcgataactgttttcttaataatgtatgagcaacatcgaaattcatttttttttaaaatgttggtaaaagtttgtaattaaaagtgaatactttgtttggtcaaccagtttctgcagtacccgatggactgaaagcatgggaggttttaaaggagagggctcgaaacatagatctcatactgactgaaatggagttgccatcaatatcaggattcacacttctttcgttagtcatggagcatgaagtttgcaaaaacatacctgtcataagtatgttttctgtagaaattgctgtttctttctctaacttgtggtcctcaaaattagatgtgaaactaatataatacatattctttcattgtagtgatgtcctctcaagattcagttagcatggttttcaagtgtatgttaaaaggagctgctgactatctaatcaagcctattaggaagaatgagctaaagaatctttggcagcatgtgtggagaaagcgcaccgtatgttccttttctcttcggcgtgtattggattatctttgttgattccatattcctataaccataaatgatatatttttcgttccatggggttttgttttttagttttctaagaacatgacagctgctcaacatggagcggagcttgcttctgaaattaatacagcaagcaatcagtcaagcgattgtgtggtttcaataaagaaaattaaggaatgcagtgagaaggagagtgattcccaagtaagtttatttaatcatccagtcaattctttgtcaattgagaaatgatagggtaatctatgttttcttttcccaaccataattgtatgctttcgattacatataatttatgtgcccattgttagagttaattgtatgcccatttctcatatttttgactgtcttctacctgtctatgatgtaagaagtgattagaattgttattaacaactaaaacaaataagaagagtttatcaagtttcttcattacattttatttttttgaaactatgatccccgtctaaccttataaggggaccagaaaactattgaaattgctatgtaggtatttagaacagcctcgaagctctgaccttgtgggagcaaaccacatgtctgaccatttgagttattccacttgggtatcaagtttcttcattattagagtatcaaatgttttccctcttgtttgctaattactgcacaactttgaatgtatcttcttgattgctagtggacctaaaagggacacaaattaatggttagaacatagatattgaaatccatgtcgaagttaatatgaaagcggggctacttagcttgagagaaattttcttattccactgaaggctgatttcatgaagtttttgctaagagactgcatgttttcccatgttgtgcagagctcttgtacaatgcctcacttggaagctaagagtgagcacgtccaaaatatgcaagatatttcacagataaggagtgggaattcttctaaagttgacaggaacaatgtaaagagtcacgaagattgtactccgttaaataaagaagcagtaatgcatgaaaacaagacagaaggaggtatgccataaccttttgtttcccactctgtgtctgtgctcatgtattttcttctttttttttttt

SEQ ID NO: 2294 - DNA, 2156 bp, Cannabis sativa
gcataggaaaacgctttacaaatctgtcatgcctgattatgaatttgatttaagaaaattgagacttacactttcttttatatgttgatatattgatagagcctccaaatgtttgccagcaatcccaaatgcattgatcaacacgtttagcattacaacattaggttcaatgccctctgcttccatgagctgaagcaccttaagtgtctgatcatataatccctgcaaatattgtgtgccatgattagatatttagttatgaataatgagaaatgggtgggattttcaagaccaaaatcgattttttttcactatcaacaacaatcctttatggaattgaaacaagattgtaagtcattcataccctaaaaacatttatggaaagaacagaaaaaaaaaaaaaatacataggatttttgccccctaaacaataacctttaaagaatcttgccccatgaacttttctctattgcaaaaattcctcccgaactatgcaaattgctacaaatatccccctcaagttacattctactcattttttaaaacaatttgcttatgtgaggagttatagatataattgcatgccaagggtctattcaacaagtttaaactacctgaaatccaatttattgacattaaacacacaaattgtagttctaaaaatccacatacatatttttataattcatcattagactattatgtatttattttttgtctagacttttctatgtgctagattatcaaattgtttaaagaattgagcagaatgcaatacgggaggatatttgtaacaatttttattgttcagggggaagtttcgcagctgagaaaagttcaaggaacaaaacactacaatggtcatagttcagttcatcaaaattgagaagcatctttagccataataagcatactttaaactcaggagttttaacaccctagctccctaacagtaattactaattagatacatatgttagcacaaaaagccaaaatattgcacaaaagtaaatgttaagctttcaaacaatttgataatccatggtgagagttaattgaaaggagcaaacctgctgagcataggcattggccaacacacaaaatatgttgggggaaggcggaagaccttctgacttaagagccgaaatacactcttcagcattctgaaatttcccatattgcccataaatatcaaccaaaacagcatagaccaccccacttttcttatagcctctaaaattcatagcctcaaacatctttctcattacatcccatttcccttgctctcctaaatagctaataatcgaaacaaaaatcttcggatcgggatacaatccttgttcctgcatctcattgaaaagcttaagcaccataccaatatctccagccttacaatgccacattattagagaattccatgttgttatattaggcttcacattttcctctttcatcttctcaaacacttgcatagcttcacctaattctccatatttaccgaatgtatcgatcatactattgtaaatttgtctgtctaatgacattcccatatccttaatctcttcaactatatccatagctttcttccacatcccattgtccctatacaaaccaataaccttcccatacagaaaagagcttagtctaagcccttttagcttcatctcattgattacagaccaagtatcatccaacctaccagctttgacatagtaatccaataaaatctcataagtatctctactcttctgaatacccttttcctccattactctcaaaactctaactgcagtccctaagagacctttcttcaaaaaccctctaagcaaaacattgtaaagctttacttttggctcaaaaccaacaaaactcatttcttgaaacaaacaatcagcttctaatgtcctaccaacactaccaagagcttcaattaaataagcataagatatgaaactaggatgaaaccccatggcatccaactgagacaaaagagtcatagccctatctacattcccttctttacaatattcacgaatcaaatggttgtaagactcacctgaaagttcttctccggttctaagacgatctgggcactcaagaattgagctttcagtattgaatttcacttcaagaccgagtcttttcacacctttgct

SEQ ID NO: 2295 - DNA, 2652 bp, Cannabis sativa
tttttattttgtttttttggcttgtttctgatttggtaacgggttcatgtgtttctgatatatattgtattaattttttattattgatttggcggttgggtgagtttgttttcatcacaattatacggtttctttagatctagaagattgatcgtaaaaataataatttgtttttctagtttgtctgggctttataatttttttttcaaacatatataattgtgtgttaatggattggatttcgatctgttggttgccgagataatttgtggaaaaaaaattaaatgacaatagtaagtaggtattaacttttgttttcagtataaaagagtataatcttttgttttttcaggaatataggtctgttagtgttaagattcatgtaagtgtgtccgcgtttcttttctagatctgaatacccatgtgggtctgtaattacctttgttcttttgtgctttattattctcttcgtcaaattttattgtatatacgatgttgattcagcgttttatgatacatgatttagaatttcattaaaattaatttttagaaatgatctttaggatattctagtgatgttttcttctactgtcgttttatttattgggcatgtatattttcttcagatctgaattacgaaatatttgtgtaattacttagtaacctataacttttttgtttttccatagtaatgtttgccttagagaaagttggccttttatatcttattttgacccctacttgtaaagatgtatgatatgatttggagtttaattgttatacgtcttttgattattttccagaatccagtaatacataaattatttaaagatgtcgccaactgaatcatcacgggaggagaatgtctacatggccaagttggccgaacaggctgagcgttatgaagagatggttgagtttatggagaaagtagccaaaaccgttgatgttgaggagctcactgttgaggaaagaaacttgctttccgtggcttacaagaatgtgattggagctagaagggcctcatggaggatcatctcctctattgaacagaaggaggaaagtagaggaaatgaggaccatgttaagatcattaaggagtacaggggaaagattgaatctgagttgagcaagatctgtgaaggaattttgaaccttttggagtctcatcttattccctcagcctcatctgccgagtctaaggtattttatcttaagatgaagggtgattaccacaggtacttggctgagtttaagactggatctgaaaggaaggaagctgctgagagcactttgttggcttacaagtcagctcaggtgtgtactatcatagtaaagtagttctttttgttggcattttcttattttggtaatggttttttacatcttatttttttttatatctctttgcaggacattgctcttgcagaattggctcctactcacccaattaggcttggacttgctcttaacttctctgtgttttattacgaaatcctcaactcacctgatcgtgcttgcaatcttgcaaaacaggtatgtacttttgtttgcatatattacatacagtcaataaagattcttactttcatatctaatctaatctaaattatgcaggcttttgatgaggctatttctgagctagatacattaggtgaggactcgtacaaggacagtacattgatcatgcaacttctccgagacaacctgacactctggacttctgacatcacggtaactttctctcccactttcaaatatctttatatgtttatacatattgatcatgtaaataattttttctttgttatggtgaaattttaggatgatgctggggaggagatcaaggaagcatcaaaacgtgaaaccggagaaagcactggacagcagtgatgaccgaagaaaagcttggatggatttaagaagaatgtgtactctgtattgtgatttttaagtagatccaatccaaccatggttgtagttgcacattttcttaatgaatgaactcagatgtccttgacgtttcagggttggaactattccgacgtattatatattttgctattttgcttttcatagttggtgagaagtgtctgtttttttttattttttttttcctttttcaaaattatttattttcaaactagcattggaagtattcaattttagttttgaatgaggtgcatgtatgtaataggtcagtgggttgtgtttatttttattatgtttttgtcgtcgttttgtgcacgttaaagttaaacattcttgattcatgaggtcatttgtctcatcggaatcgccagcttctcactttgatttgaacgtgtagatcaaatatattctcttaaaaaagacaactcatttttttttggtaatttagcaagtgttatttcttaactaaattattggggacagtgtctaccgaaaattatggtaaaggcaaactttttgcttttaatattcttttaaacttgattagttgtattttaatgaggaaaatgggaccgaaaaggattgtaaaacaaacacttgtgtacctcaagtagtgtggggcatagcagcaaggattacttggattttcgcttctatctgaattagtcagcaatgactaagattacattaggtgggtcacaattacaactcacactgata

SEQ ID NO: 2296 - DNA, 1939 bp, Cannabis sativa
ttttttttttttttatatttaacactttataacatcttcttaataacttgtttaatatatttcactgtatacaaaggcagacctacatagaacccagcagtgacggagccaaaaattcaattcagtgagagataaaaagggcaagaatcaatattaggagaagatatgattagtattgattttccaacttgagtattacagaggtgtacagctgccttttatatacaaaataaagagtaacaaagagcaattctattggctaatgaataacagaataatattcccttaatatgggaccatgacagatgtcagaggaatatacacaatggtacaatcaatataaacggtaacaaaatctgctgattttattcttcagaatattctttattctttaatccagatgcttctagacctttcatttcaacatgccccctcaagctgagctgtggagagggcgagacagtcagcttgttcttcaagtattgaaaggttgaatacggcagtgacttagttaaaatatcagcagtttgctcttcggttgggacatatctcacttctatgtctttgtttaaaactttatctctgatgaagtgcacatctatttctatgtgctttgtccttggatgaaaaacagggttggaagctaattgtctagcacctgaattgtcgcaccatatgattgctggtttggtgtggtttatgccgatttcagtgagcaatgactgaagccaaattatctcaatgtaggtttgagctaaggctctatattcgactacagtactagatcgagcgactgatttttgttttcttgaactccaactaattagatttgagccgaagtagacacagtatcctgaagtggattttcggtcatcaagtgagctggcccaatctgaatcacagtaactttcaatggcagaactggttgattttacaaattggatgccttcaccaattgtccctgctatatacctcaatattcttttgcaagctaaccaatgtttcttggtgggagcttgaaggaattgactgagtttgttgaccgaataggcaatgtcgggtctgctgagtgtaagatattgcagtgcaccaataacgctcctatattgagtaatatcttcaaacggttcactgtcaagaagatgaagtttgttactttgaatcatgggaattgggtaaggtttggccccaagcatgtgagtctttttgagaagatcaagagagtatttggtttgtgacaagtgtagaccatcttgccccctagttgtctcaaaactaaggaagtaatttaccgaaccaagggacttgagagcaaattgagagttcaattgccggatgatgtgcttgacttgagaagaattgttgccggtaagaagtatgtcatcaacatagacgagaacatagaggcgagcatccccatgacagtaataaaagagagagttatcggagaccgagttcttgaatccaagagtaatgagggagatgcggagagtgtcaaaccaggctcgcggagcttgtttaaggccgtagatagctcgatgaagcttgcagacgtggtgaggaaatttgggatcaatgtagccttcgggctgtgacatgtaaacctcttcattcaaggtgccattgagaaaggcattattgatgtcgatttgttgaatgtcccaatcaaaagagacagcaagagatagaatgactcggatggtggatggcttcactacgggactaaatgtttcgaaaaaatcaacaccaggaagctgttggaaaccttttgctacgagacgcgctttgcgtcgttcaaccgagccatcggagtggaatttaatttgaaaaatccatttgttgtcaacaatgtgcatgtgaggcaggcgggggacaagagtgtatgttttgtttttgattaatgcaaggtgctcaatgtccatagcatttttccaaactg

SEQ ID NO: 2297 - DNA, 1437 bp, Cannabis sativa
taaagtataatattatgatacattacgataagtgtatctatatataaacatatatttataataatgtacttgcattttaaggtaagtagactattcccacaagcttttatctcttaataatcacatcttcacattcaattatagaatgatctataacaagcaagtaaaatatctctacaatattcttcttctagaacgcatatatattacacatatatatatatagtatcttcttattgaagcagtccaatcaatgatataaatggaatttaattaaaagaaatagtaaactcattttgagggagtccacgatacctttaaatattcaaactaatattatatttaaattctacaatatatatatttatatatatatattttcaagcaaactcaacaaaaaatgaatatacaattacttatatatatataattataatatatatagctagggaattagaaagctacgactaagctattaaataaaatttgacttaacaaatttatctagaacagagcgtttccagctcatgatatattcaccaattaccaaaatcttctggaatgaaaattatatagaaagaaaaaactttcatagaggcaaagtaacaataatatcatgattaattttgtttttttaaaaaaacaatttatatagacaaaataaaactataaataatgcccctgccctcccactgtattttatccatgtcaatgttagattttaataagataataattagttataaacatgtgactttaatggcaacttatatcttgatatttgacatttgttatgctaaagaaagtaatatgatcacaagaacaaaaagcaaacaaattgaaggaggaatctcatccattcatgcaaatctcattttttggttaaattattatccgctttattaaaattaggactagactaacataaagtaaatctacctctaattaaaaacaacgcataatacgcaacttattagcaaatttttttattaaatgttaagaaagaattctctcagtgacctgactaagagggtcgatcctgagttaagacagaggcagccgttttaggtctcccaccacttaagttttcattaaaaaaaaaaaattaaaatataattaataataaaataaataataatactattaatactaaatatgtattgtaccccaatggtaatttaattagtttaacaattaagaggttcaaagtttaaatttcaacaacttcattttttcactgtgccctaatttttatttttgtctaaaacccaaattaacataagatctgctaattaacataaatccagatgtataaattaaactagaagtgttagaattctaatccaaaagtaaatataggtaaaaaaaactaaaataattaagttactcatgtgtacaataatttgtgcaaaatggagagccaatagtagaactcta

SEQ ID NO: 2298 - DNA, 1916 bp, Cannabis sativa
ttgtttgtggaatgggattaagaagggttggaactggttcaactatctgtgattagttggtgtagagggattgggacctggttcatttgatcttggtgtgacaggggttgaaggtattataggtgactgtagatgttgctattttttaggattgggtaggactcagtttgatggttagaagagtgagatactatgtaaggtgtggtggaaaaaagtgtgtgataagaaaagttaatttcattgaaagtgacaaaacgagcactgtatattcttccacttgggtgtaggcatctatagcctttgtaggcagggctgtaaccaatgaatatgcattcagaggttcagaaagagactttgtgttaatgatatggtcttagtaaggggaaacatgagtaaccaaacaccttgagaaatgtatagtctggttttgttggaaacacatttcaaaaggacttttgtgtccaagcagtggtgtgggtaatctgttaataagttatgttcttgaaacataatcatcccaccagaattttaaaggtagatcagcttgggcaagtaaggtaagtcccatgtcaacaacatggtgatgttttcttttagcacgcccttgttaaggatgtgtgtgggggcagagatgcctaaacttaatgctaagtgacatcatgaggggtttaagagatttatattcccctccccaattcgtttgcaagctctttatttttatgtcgaattgtctttcaacataagaattgaactgtttaaagatggaaagtaacttcagattttttaacttgcattagaagatccaagtgtattttgtaaaatcattaattaaacttagtaccaaaaatcatcttcaaggaggcataaaatctgggaccccatacattaaagtgaactaattgaaaatgcttagtggttttgggggtgagaccacgaaaggagatactacgtaattttcctaattgacaagaactacaaaaggtaaataattacacttggcaggggaaggaaattacttaattacatgtggtaaaattggcttggagggatgactaagtctgtaatgccataagtgtgcaactgtgttggatgtagttttacatgtgagagtggtgtgagtgtgatgagtcctgctggaatgtgtagttggaggcttgttggtcttcaaaatgacttgatggagacttcttttaactgagccctgagaatgtgcttggcctgaagtcttgtccttgacaacaaaagaactggaatcaaattgaagcattatatattatcatcatttgtgagtttagagattcttatcaaacttttgattatagcaggagcatgtaaaatatcataaagttttaattgtttttgaggcactatagtttgaattaaattggaacctattttagagattgggataaaagtgccattacctacagtgactttggctttgcctttatagtctgcagattgattcatctggtttgagtcattggtgacatggtgagtagcaccactgtcaatgtaccaatcagctcttgcattgagattggttgaatatgcaaggagtgcttgaggaggttcttcttgagaacctttattattgctttgggaattaaccacttcagagttatcttaatcatatcgatggtatcatttgtatgcaacatgaccaatcttgtcacaaatttggtagacacaggatgatttctacgacctcgtccagctgatggcctgcgacctccattcttgagttttcctttgctattgtgtgtggatttggagtttctgcctgagtaacctcctcgatgattcctttgagtgagatttgcttgagtttgatccatgttagaagtcgattgttgctcgagtctcatttcttggctttgtaatatgaattgaagttcctgtatagtaagagcatg

SEQ ID NO: 2299 - DNA, 829 bp, Cannabis sativa
ataattcaaaattgaacaattcaagatgttttgaaaaataaagaacggaatctacaaattttatgtttggctctaagttaaaagataccgaaagctttcactatgtcaagcctcatagcttgagctacccttcattgcatgtttccaccaatatgtgtcaaagacactccaaatgacttaaatcatgtgcctagtctctaataaaaatctttgtcaagttaataactacttcactcatcataaattcaatattatacctgtgaaatttcgagataaacaattgtagaattacattgtaaagtacaatctagagttttattatgtttgctatatttttttttttgtcttcatgggcttttgaaatagaatgggcttttggtgtttgagggcttgggaggtggttgtctattaaagtctaatttttaattttactattgttttatgttaatttctgatttttattagttacaaaataatggtgcttatcacctacagttttctgttgttatcgttaggattagcagctgtgttttcaggtatggttggtttggacaatattcaaattgctattatcatttgtttattgatcccttgttttgtgattttctttacaatttattgttagggatctaattaatttgtgtttcttgtttctattgagaataatgagtttgttatttctaaattttattggaagatgattaaccgataattatccatgggttgagcctactttttgttgcatttgtgaataaacacttgataatttgtgtcttattggacttatagtagaagttgtaacttatgtcaattttttataatgctacaa

SEQ ID NO: 2300 - DNA, 1049 bp, Cannabis sativa
gcttgatatgttattaattgttatatgtatacatataattagttatgtatttagtaaatattattattacctggaagccattagcaagaatatcacgaaagcagtctcactaatagcaaatcctttgatcttcttctctgcaagaagacccacttgaagatcaagctcctccacatcatcaccatacacttcttgaagcattttgatggcttcttcatcgtgtgtcaaatctttccattttgaaataggtatcaacatcagccctctcctaaaattgttgtaccttggtacactcctttccctatccctatagactgcatttatatatgtaataaatcaattatttatttggatttctagtaaattattaattaagcaattaatatatataaaataaaacaaaatatacacatactttcaaggcttggtaaatccacgtgatcagccctatctctgccatttatatcttgaggtatgacatttctaaaccacaagggatagttccaaagctccaaggatccacaagcttggtgtcccatcgaaacaagttgtcttgtgaagcctatttgtgtcaatgtcttttctccttctctaccaattaatttttccataggaattctgccaacaaacaacacatttttttattacatatatatatgtaataatcaaactgaagctacgattgaagttttccataaatatatatactctttaatcaagggtggagatttattggggcctggtgtagcattgatatctctcaagtaaagattatcagggagaagtgcgtgcatcctataaacactggcaaaatcttctgtcaatgaataagggacaccatggttgttgggctttttgttgcccacatacccactcaagactggacctccaacgtgcccaaatatgtctttgaatttctttcccagcattccatacctgataataaaaaagtactcatttcaattacataattaattacataaaatattatttagtttcataatatatatatctaccagtttatacgcattcctgcaagtagtgtttgg

SEQ ID NO: 2301 - DNA, 1615 bp, Cannabis sativa
gccggcgacagctttggatcagctgtggtttggttcgtcggaagctcgagccggcaaactgggcaagagtttcggagagaaagccatggaaggatacagtcagagtggtatatatgcttacagggcatttctcgggcctccgtacccagctcgaaagcttctttacacactgcacagtgcgattctgaacctacatgactatcgacgatctcaatcgtcggcatcgactcaatcgcagctttagaggccggtggattttcggatcttccaaaaccggtaacttcaatctgagcaagctgttccaacaacctatccataccggaacccattaaaaactcggacatactcgtcggaagaggccggagacccgaaccggcaccgtcgtcgtagaacaactgaaagctattcctctcgccctcaaccaaaccaccaccacctccttcctcgacggtgccacgtaagacgattacagggttcaaagcggatcggcgagaagatccacggcgaaccctacgtgaactcgggatttgagcagattcttcaccaaacatgtaagtagctacaaaaggatggcggtgagtagtctccgcaaccggctccggcgctggcgaaggtgttgactcgatctcttctaaaaagccagtttggcagtgggggcaagcgaccgattcgtttacgcaaatccgcacgaaccggttgcacctataacacaaatacgacgtcgttgtggtagctgacgaagccatctcaagaaatatcggtagtaaaattgagaaggcgtttagagaaaaaaaagaacaaaaacaataatttaggcgcatgacgttaaatttatagtattacgcgtggtgcgtgagagacgttgacttcaacgcgtagttttaaggacgccgagtttgaaattcaaatagtcgccggatttcgtatggagccaatggaacaaaatgaaaagaaaaagattctcaacgaggctggcgcgtatgacatcactcgtcctatttattccttcatacaacatttaaagcactccaaacagctcatctacttcattttttttcaattttatcacacacatctacgttacaccttaatttctttcttcatatattatattttttatttcatttaaataatatatttataaaaaaaaaattagtaagcactaagacaaataatttttttagaagattgttattaaatattactattaactattttaaagtaactaaaaccataatgatatatgacattgttgtaataggtgatagttactgatattattcattcaattaaattaaattcgacgtgatattaaaataaactaataataatatctcacttcatactagtggatacttttaaaatgtcccttactatttttcaatttcttaactacatttagctaaacagagataaatttttaaattgattttagcttatttattgaatatattttttttcacttttttcttttttcttactcttagctataattttacatttgtagctattttacattagctattgttagagcatttacaccatcttctttaaaatatagaaacttggaaatttttaagaattgtactaaaaatacactacaacatatgtttat

SEQ ID NO: 2302 - DNA, 741 bp, Cannabis sativa
catatttacttcaatgctgcaaattggccataacacactattttccactgcacaagaacatgataatgaaattgcctcttctttagttcattaatatatctgttttgtgagaaaataatatatcttatatcaacttattggataaaagcaatattttcatccatacatgagatatagattttaatactccaaattaaactaaatatgttcaacaacttctatgtagacatttttcgtttgaaaggaaaaaaagaaaaatactattatgtagactttctcacctaatcaaccaaatttattaaaatttaattttatgttgggtcatcgataataactttctttctagctaggtttgttagaggttaattaattaatagtttcaagggttaattcttccatgttttattattttttttgggattaattcttccattctatggtgtaaaatatcaacacaagtagattaaggagaataagaagttgtaaacatttcattcattgttgatattatttttttcttgttggatcatatatatttaatgaaaacacaatatttttaatttaagggaagaaaaaagagagagaaagaaattgatattaataattgtgcatgattcgtttgatagttgagaaataatatttaataaactatgttaaagtcaatataaataaatataaaaaattacataaattgttatttttggtaaaaatttatacttttgcgttcaaagtttttttttt

SEQ ID NO: 2303 - DNA, 3293 bp, Cannabis sativa
ggagcactagcacgtttattgactgtaggacttgaactgaggcggtgatatttagcaaactgacatgattcacaatctaacgaagacaacttactatattgtgaacaaaacattttaagctgaggaagagaatgacccaaactacaatgtgcctcgaagggagattgtacaccagaacaagcaactgatttaggtatcggtgtatcaagaatgtagagacctctagattcatgtcctttaccaataatttgtttcgtcataagatccggaaataagtaataatcatgtgcaaaagagatacaacaactaagatcacaagaaagttggctgacagaaatcaaattaaaagaaaaattaggtaaatgtaagacggacaacaaaggaagcattggtgtaggagtaattgtaccagacccaagaacacaagatggtgacccatcgactaaggtaacagtagaagtggaagcatgaggttaaaaatcagaaaagaagatagaattacttgtcatatagtctgtagcactagaatcaataacccatttggaagacaaggaaagaagacacgaatttggtttacctgaatcagcaatggtagtgatagaagaggatgaatacttaagagactcttgatactgtaagaatttggcatattcatctgcagaaataagaattggtcttccagaagccattacaaatattatgttcgtcccaccaaactaactgaaacaacaaaccaaccaacaaatttgataaaggagcaaacaaattgagacaacaagtagagaacaaaatgagataatgagccaacaatcaaaatccaataggagaacaaaaagatgaagaggcaaacaaaaggatcagaagcccaaaactaggagaactaaaacttgcccaaaatacacgagcaccgaacgacccaaaaccagaagtgaaagaccagctcaaaactgaccaccagagacaaattgccatcgaaatcgccactacacggtgcctccacgtgtcgacacgtgggattgtcgcaaaaacttcaggcggcgcatgtggctcacgcgcacaaaatccaccaccaaactctggggttctacagatagtccgatggtgccgacagtgagagttcacgtgctctctaaatatgttttttgagaaatgagccttaaggaagatgaagaacaaaccctaattgcaaatctcaattttgtgaaaaaccataatttcgagttttgaattttgctctgataacatgtagaaaatggttaatgaattgtctatattattcatataattagcatgtgtttatacaacctaagagaaactaaaataggaaagtaccagagaaaataggaaaagaaaataattacaatggaccttattttctagctaatttacagctaatattctaacatttcctaacttttgtatttaatctgacatccactactgactattggactgcttttgaagttctatgatcaatttttcctcataactttaatagtcaccagcttggtattatcaattcaattcctagcatctaaatttgttgttccaccccaccaaaatcaaagaaagaaaacccacaaatgcagagacgaataattttctggtcaggcattaaataaaacagaagagtagaacagagacattccaacattttagaaatatgattccggagtcacaagatctcccatttgcacacttacccacttatttatatcagacgtagatgcttattccgctggtattaaattatgcattattgtcacagtctgaagcctaaaactttcacttgaaggctcccaaacaataagatggtatgagaaaagaaaaaactttctataccaacagctctaagcagaccttgcaactatgttatgctctaacagtagaaattagtttcgtgaatttgaacccccaccactaaaacactcaccactaaaccaatcacttagcatcaagtggcatgtaatttttttctttcttatttactgaaaaacaaagctacgtcaaataggaagcagaaagtagcatcttacatttggtgaattacgacgagtagaagctgtgaccagagttataccatgtgtattatcatagacagggggtttccattcaggaagtactgcaagtttaataaaaaaaaaaaaagcactaagcacagaaaatgatgtatcacaattacaaacagcttctcttttgtatttgcacaatccattaacaatggaacgaactccaataaagagcatttgaaaaatattagtttgtgaagcattgaaacaaacttcctttaattggtgaccgtaccaaatgtcagaaggagaaggcagcaaataggaaaattttgagacagagaagaacgatttctcatagtcagctgaacagttataacccattttgaagggaaatactgatggaagtataatcagaagtctaatacacgtgtatatggaaattactaaaaggttaactattaagtgacacaaaagtaaaatatcgacttacctataaggttgcaaccatagagattgaatgctggactcatgcccgaagtaacctgaaaagacataaatatcattattaaagacatatgtagactgagtgagtcctaaagaaacataagctagacaagattttcagatcagttaaaaatgatgcctttgtcccactcagaggtgtaaaacgagtcaaggatcaagtgaatgtactcatcctatgaccatccataggtaaaacagagaaatgaataaggaagcaatttcagagtgggagttcttcacttaccactcccatttaatttcatggtcaaaagatatctaacttaagtgtataaaactctacaggtttaatgctgacaaccctcttaatgcacctgataaacctaccaagaagtggaactattgtagtagttttacttagtgaattcaaaaaaaatgacagcaatgaatgatgacagcaacaacgatgataagaattattattaattattatgttgataatcatagtaagagaatgatattcaaatggtaaatctggcttatcaactcatgtgcatacagagctggagaaatataaaaggggtgggaatttctcagcataccttcttgccacgcgttagacttagcctgatgtgtgtattatcaaacataccattccgaataagagttctgaagatggcttctttgacctgcaattatacattcatactctactgggacaactcctctcaaacttaaggaaaaaaataaatgaagcgaaattcctttttattaagcccaaacatgaagcatatttat

SEQ ID NO: 2304 - DNA, 559 bp, Cannabis sativa
aaatgattgatcactccaacacctaaacccagatttctaaatgaatagtccttgcatatgctttgctttgtttctagctttcttccatggtagattatgaccaaaagcttttcattttgatgtgttaaagttgttgaaattggtgttgtagtatttttctctttttttctgtgagctttgtagatgtctcagattgcaggacatttttcgctgatctgttttattattgtaacctggcaggctttgcaagttgatgaactaaacttaactgatattggacctaaatttgagcatcacgagatgttcccagcccgaaccaacacaggtgtgttcatttttttgattgtggtgtttgtggagactggtgtatggattttaattagtacagcaagtaattatgaaattgattgactttagttcttttgcttttctaaacttgtttattgatcaatctcatgttttttattgtcagaattcgtacaagtgttctcaccttcacatgtcaaaatgcgtgtttgggagcgtggggcaggttggtgtgctttcagttgttttttgc

SEQ ID NO: 2305 - DNA, 2360 bp, Cannabis sativa
gggtatgtttgggatgataaaagtggctccctaaaatacctatttagagcaactccaaagaggctcgactagtcgactccctattttttttagcttaaaagttgttttagatagtcattttgttagctaagtacagtaaaaaagtagttgtccaatattgtaaaatgattttaaaatatcgtcaaagataaaagatgattttgaataaaatttatgacaaacttccaagccccacctaatatagttatagacgtttaagattgacttgtttaactatcactcgtatacgaataattcagatcactttccaaattatttagacataagaaagtcacctaatctaagttgggttaaaatcctagaaaaatcaagttagatcttctaaacttcttgctagtaacttttgaagatagcatacccttactctaacaaactcattaccatttggctcaagtaacaacttgtatggtgaatacaagagagtcgtctaagcggactgactcatttgctcacaccatacaagttactttatagtgtgcaattgtcattggtttcaataaataaaatgccaacttgatgccaaaatttactagcaataatatctaaaccaagtaagaaaacagtgtactatggaaactgtgacttaaagtttgagtaatattttatgaatctgttaaaatatttgatgtgccgatctaagcatataatacttttttcagcttaacaactaagcatataatacttgcttcaatttaaacatgttccattcatagtataattcgttgtggtcagtgctttctatgcttgttctcatttttacattgttatagtcgtttttcaacagtcatgtcgtttttctgaaatcttatcttttgtttgcttgtaacaagattttaattttgctgtgttattgtgatgaagggtgaccaaagagaacagagctgcaggcattcttgacaacttcgaggagggtgagaagtattctcaacacatggtcagaaaatttgtgcgaaacaagtcatcccaaatcatgcccaacatcaacagtttcttctcagacccaaattaatgaagtcaaaacctcaccaattcctcaattgataattgataatgatatcacattgatattaaagacaaaacaattgtctttttcaaatcacattcatatacttgattattgttattctttttaggctgctcatatattattacatttattgatgagatccatggtagatctcaaaaaagccttataatttgtttttagtaataatcttgaccgatgatattatcaatcaaattttggtcgaaacctataatgttcttgcaagtttggcctatcatgataatgatgtgactttattgtcaattatatttcttagtccaagtaattttttttttatttctattttggtagcagtctttgccagtaaagttgatatgttatttattttttatttttggctaattaagattttttctctcggaactttaacatgtattaaattatgttttctgaattttttttgtcgttaaaaactcttcctgaattattgagattgttagatttaaggattttgtctaattttagtaaaaaaattttaacatggatgaaaatataatttagtacatttgaggggcatattaaagtttgagggatataatttggtagatatttaagtttggtgagtatagtttagtacataaacaataattgaaacagtaaaattgaatgaaattagacaaaaatcttcaaggcatgtacatgtcaaagttcgggaaaaaaaaaatcctaattagctaaaaaaaaaagtgttcttgacaatgaaaaaaaattgttacagtcgagttgaagttttctccattcattaatggttgtttattgggtctcatttctataaaaaccattttctcctttagcagtaaaaggttattagcttttcaactagataacgttcttggtctgaccgaggagatcagaagatcatagtgaacccttcttcccaaacccaataccattcctttgtatagatgacgtgtttttatttttcaattaaaattttgtaactgtatatgacaccattttttttttttgacaaatgaactttcattgagtatatgacaccatttttgttttgggcacatctcacaaaacaatgatggttaccaaattttatcatatgtcaatctcacattcttaatccatttcttggaaattaattacgacaaaagtttatcttttcaaaacggttagattctggatcacctctttattgtatttatttttgtcttaatgatacttttgtttgtttccattagcaatatgcgctgtctttttttcatttcactatcagttcagg

SEQ ID NO: 2306 - DNA, 2583 bp, Cannabis sativa
taagcccatatatgcgccatcaaaaacggctttttatataatttggtatatgtttaaatctatgtcatgaaggtaacgcgttctacttctacttctactattttttatttttcttctttaaatctttatatttacacatacataaatatataaattaattaattaatataaaagattattaatttaattaatctaatgataataataagcgtttgggccatgtgacaccccccatttcctatgcaatatttctcatggctcttcttttataattcctcatcatcacttttttaagctacctttttcaactccatattcatatatatatttatatttatatatatataagaagagatctccattagtaatactactatacacaaaactatttttctttcaataacaacttcttccttttctctctagtttttagctcatttgagctcaaaccttccatatacataaatacatatatatatatatagtagtgtgtatatatatatataattgggtttttttttcttcttatgggtgtagtacggcacccaggaaatatgagatcatcaagtggagaatgcatagaaggaatgcttggtgattatgttaatggcggcaaagccaaattaaagccacaaaaaagcggctcggctcggctcgtcacgcttctcacttttctccaattctctttcgccgtttacgccacttttctcctttactacatgagcccatcaatcgacttgagaacccgacccgatttcacatgggcgacccggctcgctcataactggcggaaacaattcgttattccacctcacgttttgggtcggtaccaagaatcatcttcctcgattcaaacccgaaccgaaatagaacccgtgtttaaacccggagaggtttgcgagagcgagaagatcgattttactcagaagaagtcaaacgacgccgttatgataaaacttaaaagagagctttacgaagaggttatggattaccagactaaaaatctcgggtcggaaactttaacccaactcatggcaatgaaatctaaatggggcccgaatacccgacccaaaataaccgttttactaaaccatttcaaacgcaaaacgctctgcgcccaactagagtcgttactccaccaaacggtgccgtttcacaacgtttgggtattgtcgtttgggagtccaaacgaattgtcgttgagaagaatagtggaaagctacaacgacagtagaatcagcttcattagctcaagctacgatttcaaatactacggaagattccagatggctctacaaacagattcggatctggtttatatcttagatgacgacatgattccagggaagaaaatgcttgagataatgtcgcacgtggcaggaagcgacaagtataagaatgtcgttttgggaagtatagggagaatattgccgtttaggcaaaaggattttactttcccgagttatagaaagtttcggtcaaaagaagccgggttgtatttacccgacccggcttatgatattacggtggataagattgtacaggtggattttctttctagttcttggtttttatcggctgagctcgttaaaactctttttattgagactcctttcactttttccactggtgaagatcttcatctcaggtaaattaaatcattgtcttttttaccattttttaagtaatttacgtgaacacttaattttttttttaggttaaatgtcaaattattatgtgtctcattctttatttgtatatttgaattaatttttaaataaaaaataaaaatttaataacttaaacaatatttaattgcaagcgaaaattaaatttaactatatatatggtgcagattatttatattgttataatttaattagtgtgttgaaaataagtttaaaataggattttacgtacattgaaattttcaaatttttttttgtatttttattgaggggtaaattttttttcaaaaattttgtgtaaattttatattgtgtattgtattaagtttttgctattgttatatgattgttttttaattgttctactattattttgaattgttctgttttgttgttttagactgttttataaaataacagtatttttataaaaaatttcgtgtaacaataaaattataaattttctgtccaaaattcaatatttttataaaaatcacttaaaaaattaggtacaatactaaagtatttaaatgatatttttttgacactataaaattaaaaaaataataataaattagaattatagttctttttacgatagagggtccaaatattttttttgttatctaattgtttaagaatatttaaacgaaattaacatatattatttttactatttcttttgggaccaaatcttgacaaatttatgatgggttatagtatttttactttgactgtgtaatttggggtttaaactaattaatacatgtaattagttagagtcaacttagtgttagatttcttcattaatacttaaataaactcaatttatagtttattattttacagtttccaatgttataaatgaatgaaatctagtgctgatattcaggca

SEQ ID NO: 2307 - DNA, 1468 bp, Cannabis sativa
ttttttttttttttgaatacaaccgttgtttttagtgcccatggttttattttgttttagtttaaaaataaaaggataaaataggagacttattcaatcttctcacatttataattttttttttctatttttatttttttgtgttaataatatacacgtgagctaaggaagaatgtcacttaacaatttatatattttatatcataaccattaattagataaatgaaatatacgtttattagaaaaatcacatgtttgaaattggtttattatataataaataagggtttccttttggatttgctgaccattatcctccaaatccaatgaatgatatacattatatcgaagaaattaaactctatattttttttatattgtcttttttttttatctctttttttaaacattgtaccaattttacttcaggtacaatatatataaaaaaaagtatatttcaattaaatataaaattaaaaataaatttaattaattgattaataaaaatgatatttttcaatttgctaacattattatttcaaacaaccaaccataaacataatccatactactttggaattacattcctctaaattactttactttactaactaattaatatgtaaatataaaattacacacacatatatatatatcttttaagaggtcccacaacccactataccaaaaatgagagaagaaagaggccacttagaaagtgctttcatcatttcccactaactataccattgaattttgaatacaataataaatatagagcatatcaagtgagctttgacaattcttctctcctttacttacttggactttggcagcaaaggtaacaatgcctttgcttgcatttttaacagcattgacatacaagtagaaccctctttttaataaagaaaccccaaaaagcaacaactatggcatctgacattgattgcattttgtggggttggaataggacaaacaacaatgggacccaccagcatctactcacacttttcttttcccttggaacttaaaagaggaagggaatgaatgcatgatgatgacccttttcaaaggtctacgaaggggggttcgtttcaggcttaacactagatgagtctggtggttgagaatggtatattgctgatgctagtgatatgggcatgatgcaaagggcctttgattgaaggaactgcattgcagccccaacgttttcttccattagtttagccacttgtctttcggtgccatcgctagaccatttatcccatgccggttgatttcttccaccttcaccaccaccaccttcttcctgtagaagaaaacggattgaattaaagcaattacagtcaacaacaacaacataaaatttatacttaatacctcagctgaggatagtggaatatccgttacaagtggtgcaactgcaccagctccgcctaatctactcatgctcaaaacctgtcgagta

SEQ ID NO: 2308 - DNA, 977 bp, Cannabis sativa
gggagaaggagttggtagacattgttaagataattagagtgggtactgggtagatcttgttatgattgattgactagtgatgtctctcaacaatccaaatccaaaccttacatgcttctgtggaaaatacttatacataacccactgatcaccagaaataaatgcattaatgtagaaagagaaaccacctgctctccttcctcaaatccagtggtataaagctcaccatgctatactcgtcaacctaaaaccaacacaaatgtaggatagttagttatacacaagccaccacatcccaatataccacgacattgtacgatcaaatgttagatatatgcacagaaaaatggtttatactcttcataagtgtgcaagtgcttgtgaagtcttagaatcctttaaacagcagatattgattgtatcaaggatcagcctttgcatcgttatgttaaacaaatggaaatggtaccagtggccacatcaatccatacatctcaaaatgcaagcatgagaaaccattaagatagtaatgaataagctactctcattggaaactccactgagccccttttgatgagtaattagatatatgcatttctctacaaaggaaacaatctactacaaaaatggaataaatggaaaaaggaaaaccaggaaactgccaaatgcaatatcaggatagtctgtcactaagtttgtgtaaaaataattaaattctttgattaccactgcaacactaagttgcatacgtttgacaagaatttaagctacaacttattagagagaaatcagaaaacacatttgtatttgcactttcatttttggaacataagtacatcaaatccacctactcaccagttcaatcaaagctttattcagctttgcgaattgaggacccatcctttgatttaactctgacaacaaaaactgaggctctggttccaaaaaactaagagcaaatagaaaatagacatatt

SEQ ID NO: 2309 - DNA, 2109 bp, Cannabis sativa
atattaaacttattccaatttctttcgtattatagtttatgccattgttttaagctgtaatgagaatattttgatgctttgtggtcggtggattgtgacgagcacaggggcatttgtagtaagtatggtgtttctagatatcccactctccagtggtttccaaaagggtccttcaaactcaaaaagtgagtacattcctctttccatcacattatagttcttacataagttctagtcagaaagatcgactacaatgttaggttagcaatttgtgaacatattattcatgatatatgagtactaaggcctaggttcatcaccaaagaagaaaaaccaacaccaaaacaaaaataaatatacagattacatattttctgtacttataatctgcagattgtattagataaatctttttctcttttgctttccttataataataatttttatatattctgattatattttacatgatttaggtatgaaggccctcgtattgcaaaagctcttgcaaatttatcaataaggaaagatgtattattcaataattttttttatcaagctacagtgctaatgcaagtttgttatgtatgtatacatatggactattatttttatgtagttgatttagtttaattgttacgtatttttgttgtagtaaataaataagtttataattttatgtagaatgatagtagttttttttaattatatgtaataagtaaattattttaatttattgtaaataatatttatattatgcttttaaattatttttgttgattttagtattttttttattttttaatccactttaagtgtcatttttaaaacaccaaacctcaatagtgttggtttagatttgacaccaaaactttaactttttgtgactgtgcaataggtgtcaattttgtgaattgatgctaaaagtataagtgtcagtttaaaactgacacctacctgagagggcatatcagttttagacattgaggctattatttttcgttcaactcactaggaatttttcatgtataaaaaaaaatcaagaattgctttcgatgcttaatcattaatttccatccacgctaacttataaaactcagagccatacctgtctggtcctaaacttttggtgccaggaatgctaacagggacttcttaacatcctctttgctaaatttctaattaacctcagttgcatagcaatatctaggcaaggccccatctagagttaaatcaatttagtagttgtactagaacttctcataaacttctgaagtgatcaagaaaatgtttgacaaccttattataattatttagtcatctaggaaagaaacaattcagtttgcttctcttttttaaataggcatagaaataagcattgttgtcatctttcttttgtaaccaagttattttgctttttacaaataagaaaactcttataaagataatgagaatgatattggaaattgttaccatcctcttttgtagtcacctataatgaagtgttattcagacaaacttgagccacaataaagcatgttgaaactcccccttagcagcatgatatccctgctcaatatctcatattttctctttgttaaagggcttaagaacatgctaaagtcacaacattattttaataatgtggtgcaaccctcgaccatacattgccttatcccagttacccttcaccaaattttttaaattcttatatgttttccaaaaattgtaaaaaaggaaaggtttccttcctaaatccccctgcttatgagtttcaaccaaataaaagaaatgatcataaatgacttcccattgaaacacaacaacaatattcaataataattcaagtcaatcttcatttgtaaaagcatgatcaatcttagagtagaccatatccttcccatcatgcttattcaactatgtgaatttggagcctaaactctttaattgattaacttaatttagtgctagccaagcattagaatcaaccaactctgaagaaattatggccttgccccccatttttccatcatgatataaaactgcattaaaatctccaataatgaacaagacttaatagacaatgtcattcttgtgagacccttcaa

SEQ ID NO: 2310 - DNA, 1364 bp, Cannabis sativa
aagaaacaaacctgatatatttgtccacgaaacattccacgatcgacagatgacttattaagaatcatagcatcttccatatcgtatctgaatttcataagaaataaatgataaaaatctacaactttgaaaaatacgtataaatattcatccttcattggaaaaatacgtatatatacatcctcacccggtatatgcaagtacagcaactattgcatttgtgcctattggatactcatccaagttgtacttcgtatatgtactcgtccgaacaatgggagattgcggcgtctatgaatacaacaacaacaacaaaaagaaggttcataagataaagaagttatcattgttagacagagagagagagaagaacaaacctgaagatgatatagtttttgatcagcacgacagtgaagcgcttgtatagcgaaacccattgtttgctttcccatctacaatttttcataaaaggaaaataagaatggaaaaacaagcagataccgaaaatttctaaacaagaacaggaaacaacttcatcttgactttcggaaaagaataagaacctgacactggtacatgttacgtggactctgattatgatctgaccaaggtgtaagattagctaccatacttaacatcccggttggatgtatttcttcgtgagtggcaggaaacgcttcttttcttccaccatccccgccatcagggcattttatttccatgaaaacctgacacgacacgttgtaatttgttagcgtgtgttagtattttagagtttaatacacacactatagtgcaatattaacctgctcaaatggaccgacaagctcaatattttggtcttcggtagaagggattgaaatatttttgactggccgaacaaatctagacggacatgtagacagatataaaccaggataagtaccgtcgatgcttaaaggtacatatcccacttcgagatcatcgggaatctgaaacgtatcaatcatcatatcagcatcatggaacatgtattaaagaaaaacaaggacagaaaagaataagaacaaaccccggaaacaggtgagactttcagtttccgtaaatgagccgctactttctcaattacactagaagatatagaaccaactattcgaccgtccaatagaacagaaagaacttctggaggaccagcttgaaccaacttcggcaatgcaggtaacattccaacctgaaccaaaacattgaggatagacattctaatcttgtaaaagtctctaagttctccatgtgaatcgtagaaagatgtgattcctggaaaaataacatattttacttcattattagcaacacaataacattgccaaccatagtatcgagcatcg

SEQ ID NO: 2311 - DNA, 6334 bp, Cannabis sativa
taagcaatgtaattaatgttaattgatcagttttatactaattaactttaacattgacaatgactattgaaggtggtcttatatatctgatttgagtttttttatatgacccgtgagatacatcctcacataaatccactcacaataaataaaagaaatatgggcatgtgactattatttgtttatttatttgattattattataaaaatatcactggaaaaatgtcatttcttgcatttgtccttaactactccaacataaaggaattattctatcattattgcctcttggacttttcattgcatgtattttttcaattcgatttgcaattgaaagtaaaaatgtactcatgggttttaacacatgttttgtttaataaattaatattccaaagaagttttgtaaggatatataagagtacaattttaaaccaagtatcttatagaaaaaagagtgtcaaagtaatcttaccatcaactaacgtcaaccaatcaaattttttattttttctaaaaaaatatttattgtgttagcatatcgatgctaaattttaaaattaatccaactatagagatacaaaattgatttttatctcttccatcttatctcatttgagtttatttataataagttcctcttgtgacattttacattgatatcgttttatttaaacttcccattaacaaaaatgaaatgagaacttgaaaaagatatgacgatacgtaaaatattttaaatcgcttgaactaaattaacatatttttgtgccttactgttgactatatcccaagttatgggatacattttgattgatcgacaagcttgcaaaggtttttacccaacaaccttacaagcttgtggattaatctgaaaatatcatgtgatttggaatgaaaaaaaatggctgaaatatcatgtgatttggaatggaaaaagatggctgaaatatcttcggaaaattgatcaaaataagaccattgcaaacttttacatttctcatttcagtccaataatttaagttaaaaagttattgatacaaataataattaacttctaaatatagaaactgtttttggttttcattcaaactgaaaaaaagaagagctattgaatctaactctataatagacttttgataattgggtaaactaatttagtgcttttcaagtgttaaatgtactgggcttcttccaataacatatttagtaattggtcttgtgaggttaccttttactattatgtagggtgtaacaccttttttgggtttgagttgtactgtacctccattgaatgcaatcccaccatgtttaaaaataaaaaaaaaaacaaaataaaattgatctaatgatctctcctgtacttgccttatcaacccaaacatggcctttcatgaaattcaatatgttatttattaatcctgttgagagctcaagaaataattcaaaagcatatttataaaaacaaactcacatgtggcatttaattggagctgggagtcttggagaagagaattttaattaattagttacaattttttctaaagcttaatttaccaaacgtcaaacacggtgcggactcagaattcccaatcccaatcgaaacaacgacagaaaatgcagaaagcgacacgtgtaacatctaccaatttgtcggtgacattacaatataatccaggggtaaaaatgtcatttcactcatcacagtagtaactagttactgaattaggctctcgctccactcactctcactcactagcttactctttgtaaataacattttaccataattgtatatcctcttttcccgcggctttgaacgcggcttcactcttggctttctttctcaattctttttttaattaattaatattactgattttattttttaataaatatatatttttttattatttttgtaccaagtataaagggcgagagcgtgatctttggtagagcctttccaaaattatattatgggagctgccaaagaatcgaacccctgactgagacactatactcttctcccaggtatctatttcttcgtcttcttcgtttttttctttgattttgattctctgcatttctatctttttcaatccttgtttctttcctttctgtacggacagatcttactactcagtgggatcgactatttcgttaactttggttcaggaatcttcgtgtgtgtttttacatatatatatataaatattcatggaagtactgtattggagagaagaagaagagacaaattttggaataaagataaaaaagtagtgatcgatgaagttctacatctcgacgtccgggataaagagggttacgatatcaagttcaggtgctggtaaagctgctccaccgtctacattcacaccgacggcggcggtggctgggactaggcggattacgattcggaccttgcttccggtggttttagtgctcgggcttcttttgccctttctatttgtcagagtaacctttctcgtgcttgaatctgccaccaattgctcatccactctcggtacgtcattattcctcattcaaattattagttattaataaatttcgaatgaaagttgttttggatcaaaatttctgaggctgttgtacattttctgattcgaattcggtaaaactgtactatgcatatatagcagtatatatgtgttattgccttgttgttgaatcgcaatgaatgaaactcccaacgaaaatgaaaatgttatgagcctttgtctaatgtttttttccccaaaaataaatcaatattctgtgtatttcagtttaattaaattatttcaatttgttctttttcaaatggcagattgtataggacgaggtcttttcagcgggagtgattcgtctccggtaagtggatttatctcgctccaacgacaagtttttttttctttaaagaaatgaattataatactagtttgttgaaataaattcagtaaattgtagactagaagaacattacatatataatagattcctacgtgttcactagagtatggctacttgagtagtgtggacccaattttgctgaattcttctaaaacctgacagaatttctttattttcagtcacactttttaagttattatatcagaacagtaatacaaataatttcatttttgttatttccatgactttttatttgagtattttaatgtgtatatatatagtagttggtttccgtaggcatggaatatactgaaatagtattatttatggtggtatatacaaatggaggcattacaaacaaatatcttttaacattttcctaatttccaactttgggagagagggtaatttagtctgtgaaatatagaatacagtgtgtggataagcgcattctgaggaattgtcggtattccacttcaaacaattgctttccttgccacgtggccagttggctgagaatcttattgttcttcttctcgtccacttgatctactttatttcaatttccagtgccattaattattttttacattagtgtaggaaacaaaacaacacaagaactttaataattcgcgtaatttttctatttcacatttgaaaaaattcattataggtgatgtccttgtaattactaaataaggagttgcattcatgttccgccagaaaacgctaaaaaagcccaactggcaatatagctttttctgtgtgtgtgggtgggtgttgatgcactcttacgtcaacacggtctccatggttatgatgtttttatctaatgtctatttttcttttatcttttttgtcttttttttcgtgtgccgactgtagaagcttagggatgagctgacaagagcactagtagaagcaaaagaagttgagcttcataatgaggacggcttggaatcttttgacgaacttgtaaaagagatgacatcaaagaggcaagacatcaagacttttgctttcaagacaaaggctatggtacttgcattataaccctgctgacttttcattatcaactattgataatttgcattgttctttttttctgtattgcgggattgaatagcgatgacatatagtagtagtcagcagacaatattgatctcgcattatcaactttaatgttaatccgggtgagcgaaaagattagtagattattttgtatccatgtatgtttttcactcttgtgcatctggaattaattacttcaggtctgtcaactgagatgaaatatgatggtaaaataatagatatgctcttttgtagagtaatgttcaatcagggtaccttttattttgctctgctacacagtgattggctcttgtcaagttgcctaacactccctgtcatgaccctttgccttttgtttttgttaaagaaaaaagaaaaacgcgtctttctctgacagttgagaaatttgaggtcgtcttaggcagtacttagctatacagattcttttctctcgtctttatgtagatatagctattgatccgtcggtatccagtttgtctcattccctttatgcagatgtgaatgttgcaggagactatcttttgcaggaattgttcaattattactttgctagtactgctatttattttggctaggttcgatatagataaaatcacagttgggtaatttcaccctgttgccattttgtacacgtgaatacatgtcaggttaataatttggagtacagtttggtgaaaaatataaagaattattcatttctttctttctttcccaacgaagttgtatgaagaacatgtattagcattgtcacataggactgaaactattaatatataataaatttgaagaccctgcattagctcttgttgaatttctctgttttctctacttgaaatggctgtgtagctatagtaaacctattgcaagtaactaccgggatgcaaatattctctctagatttcgtggtttcttgaatttgagctatgagttttttatctcacttccaaaacggatatgagattatttatatcgattgatgtacaaattttagagtatcaaaatcttttacaaaacaagtattctacccaatcgtatctgagtggattttctaatatgcagctatcaagaatggagcgcaaggttcaatcagccagacaacgtgaatctatttactggcatttagcttcacatggtgtccccaagagcttacattgtttgtgcctcaagttagctgaagagtacgcagtaaatgccttggctcgaattcgtctacccccgcctgaatatgtgtctcgcctttctgacccctcctttcaccaccttgtcctacttactgataatattctagcagcctcagttgttgtctcttctacacttgaaaatttggccaatcctgaaaaattggtaattcacattgttactgacaagaagacttataccccaatgcatgcatggtttgccatgaatcctgttaagtcagctgctgtggaagtaaaggggctgcaccaatatgattggtctcaagaagttaatgttaaagtcaaagagatgttggagatcaatcgcttgatatggagtcgttactacaataatttgaaagaagaagatcttgagcacgaaagtcaaaataaaaggtacttagaggccttaagtcctggatgcctttctctgatgaatcatctccgaatttatatccctgaggtaatccactcccattattttcatacaatcctcccctgttcgaaattgaatgtgaatttgtaatgatacatttgatttttatgggccacatgtacagctatttccaaatctcaaaaagattgtgttcttggacgatgatgttgtagttcagcatgacatttcatctttgtgggaaatggatctcaatgagaaagttgttggcgcagtagtgagttcatggtgtggagatgactgctgtccaggaaagaaaattaaggactacttaaatttttcacactctgttatatcatccaactttgatagtgatcgttgtgcatggctttatggtatgaatgtctttgaccttgaagcttggaggaggtccaacatcacagaaacttaccaagaatggttgaaacttgtaagtatcttcttgtacataactacttgattggttttgaaagcattttgttgaaagtttgtattaccaatcaatgatgatatgatatgatattcttatttttgcaattgcagaacctcagaaatgggttctcattgtggtatccaggagtaactccaccaaccttgatagcatttgagggccatgttcatccaattgagccctcattccacttggatggattgggttttcgcaatccggacgttagagatcggcagcttctggaagctgcggcggttatacattttagtggac

SEQ ID NO: 2312 - DNA, 1617 bp, Cannabis sativa
  modified_base (119)..(121): a, c, t, g, unknown or other
ataaataaataatattcatacatgtgattgatgagaaatgctaaaggataccattggtgtctaatacctttctatgtgtcaatattgttattggtccaattaagtatcgggtcccatannntttaatataatagcttttaaggaatatcgttagtcaatcgcaacaagacatatcgagaaggtactagtcatcactagtacctaacagcaatgctcgtgatttattgtaaatgacgtaaaggtctcttctcccaggctatattgctcttgttaactaataataaataataatagtgtaacctattgttttatttattagaagtaaggagatacaaatacaaaaagttttatatctatatatatgtcaacatgcattacattccgattaatattcgatcggtaacgataatataatttcagaaaagggccaagctggatgatatataattatatattaattatgaaattatcggttcgtatgtacgcaattggaaacccatgcatgtattaaattatttatgttatatataacaattattgatcagtattcacacacgtgaaaaacatctttcaatttaaacgttttgagtttgattaattgtaaacacccaaagaaccaaaaaaaaaaaaaaaaacaaataacatgttcaattatatatctaattacacggctgaaatggagctgagaaaaccaaaacaaagacaaaagaaaaggaaaaggaaaaagaaatcgtgataaaataataatagttgtagttgactcagaaaaggtattggtgggtggtgaggtgagtaagaacaagaagttagaagaaggaaaagaagcataaggttggctgctgtagctaaatggtttgaaataaatttgtccatataaataactccatttattaaaaattcttttggtcatcggatacggtttgaccacccttcctcccccaacccaatttcctacaactttctcattttagcgttgcgttgcgtttcgtttgatttcgctgtgttgcaacaattgccttgccttaccatacctaagaagtacgacatcactgctgactttgacttttattatcaataccaccattataatattctattatctattatgtatatatataaacagcacaaacttcctcatatctatatatctatatttccatttctaaaacacaagatttccactcgctccaattatcattatcccacccactttccccacttttctttgaaaaaagaaatctctctctcattttgacattaactcaagaaatacaaatctggaatctggctggccaaaggagatagcatagagatctagaaaaaaaaatgaggagaagtaacagtgataagaggagaggaggaggagatcgtgagatgactaaggcctcttactcatcatcatcgaaagatcatcaagaactggcagtatcatccgccgacgatgatgaaacttccttcatgagcagaggagctggtttcagtggtcctctcgaaatgagtaaaaacaatcacaacagtaaaaacaacaacgatgatgacgacgacgacgcctacgttgaggtcactctggacatccacgacgacacagtggccgttcatagcgtccaagcaaccacg

SEQ ID NO: 2313 - DNA, 1382 bp, Cannabis sativa
aaaatggaacttgaagatcctcatagtaggtaagactgtagtggtttcaagatctcgcttgacattgactagcttactcatttgaaaatctagtgctgtacaccattttagtagtctttttcttccttgcttgtctggattcaactttcacttttgttttctttgttctgaaatggttcaataacaattcattattttcagatgttttgtagctatttagagcttcggatatccttaaaagttattgttagatatattattgttttccgcagtaactcagtttttttgctgtatttagaagtcttgttgaattgaactgtgtaacttgacttaagaattgcaaatttattatacttagtttgaattataatgcaaacaggcatgacttctgttattttttctctgtcaatcgttcgtaggtacaatttcggatggagtcatgggaaagagaagcttgaatctgggaagcttggtaaatttgccattttctttcaaaatggaaagggaataaaatttatcctagcagtgctttgaggcaaaacctcctaggctttgtagaatttttattttcaagacaaatgatagaatttaaacatgataatgatgagaatacacgatagtaatgtgattgtggtaatacttggtaatgaatgtaattgtggttgggtgtgtattttaattttgtcaagttctgatagcaaaagtgtggatgctaaacattctaacaaggttcaataattttgtcttccctttaggaattccaattcaaatgcttcaacctgatggattaattgattacaattttaaatttcagatatgcttaaaggctctttctatgctaatccgatcttggacacaccaacaacagatgcatatctaattgaaaggtgaggaatctagatttttttttgcagtactgcaatccagtttgtatgtatatataagacatcaatgtctatgataacaaataggaaagttgattttgcagatattttgttggtgtttgttgaggattatgccatttttagcacttattgattttccttattaaggtgtgatgttacagatacccatcatactgtggatcaaatatatggccagatgctgctttgccggaacttgaaataggtatgttttcatgacaaaatgattgtagacttttctgattcatcatgagaatcttccttcaggatccctcagtgtgaactcttgttttggacttatcatctgcaatcctttgggagaaaagaaaaaaggaatacaatatttaaagagagagagtatgtgtacagaggagtcttgcaagcaatgttcttatcactgaatatattaagtcagtcttgatttactactgcgtcatactttcatgcgataattaagtt

SEQ ID NO: 2314 - DNA, 2380 bp, Cannabis sativa
agagcaatcctctgtttccatacacaattattccaatttcaattatcatcaatatatgctaatctttggttgttaattgttttatgtattttttatttttatttttatttttattattatgtatagccttataataaggatcatcaccgctacaaagatatatcatatatatgtatgttaggataaatattattttagactttgtattttgcaaaattatcttctgttttctgttttgttaaataataatgtggatcttatatttttcaaaatagtacaaataagatcctgaattgattttttatcaaaataaaatttaataataatctgatctaaaggtcttatgacaaaattgtttacatttatagtatctgtttgtgttggaaattgtcttcaaactgattatattaaaaaaagttatcgaaaattaagctcacagtcttatttttactattttgaaaaatataaggtctaacaaaatagagggtccaataattttttgtaaaatataagattcaaaataatatttactctatatgttatgatatttgttgtagttgtttttcttacatgttcaaaatctcaatttttgagtatctttattaagcataaacagtatttaccactattttgaaatgatattagctatattctataataattataaaattgaattatgtgaaatctgatattatacttaaaaagatattaggcgctctcttttatgcatttcaatcttttttcttgaaatgaagtagcgcaacttcatagtgttctaatctcgattttcaacaatgctaataatacattgttattaatatattattccttttttcttttcaatcatgttgactatttttgaacatagctcttatgtcattgttatgaaactataaaagcttagaaaaagttacattgcttgctggagtctttagcagtgctgtaattgcagattgaaaatttttgacatgtcggaaaaccggcacgagcacaattcgtctaaaaataaatattaatttaggtacaatacggtaagatgctacaaattgacacagcacaacattaagaaatagacttaaacacaacacgatatacccaaaagtacaacacgtaagcatgaatagactgaaaaaacaaattatatacgtatttactaatgaatattcaaaacaggatggactggcattactatggctgctgaattaatagtggaaaagggtattgatggagtcatcctttattgtgataatgttactgttgtcaaggcattagcagcagggtattgatcgagtcatcttttaatcctctaaaaattatgaacattgtagaactttatttttgagatatttgtggcgaaacctccttaatatttgcaattgttacatatataaccctaatcaaaaaaagtaacgataaaaataccttattttacgattttgttgtaatcatacatttttttgggtgttaggtgtcaattaagtccgtttagtgtcagctcagaaacatatagcgacatatttctttagtttatttaatacataatctaataatatgtcgccacgtgtttcgtagttgacacttaatggccaaaaaagagtacgactgtaataaaattataaaataaagtacttttaccgtcacttttttgaatagaatcatatgtataacaattgtaaatgttaaagggattttatcgcaaatactcctttactttccgttattttatttttacaatttttatttaaattactataaatattctccattcaattacattcttctcacttttttaaatattttctcttaaatatagttgaagcacgagattttagttaataattttaaactacatgaaatttagcttattcatagtaaacaatatacacataaattcatgtgataaattattttaactaatcactagaaaaatatttgtataggctgtacaaaatctaatttctcctacttagtaacttaagactgtccagttagcaccgcacattactgtattattatatttatgatttaatgacaatagaataattatggaaatagagaacaatactgtattatttagaaataattaaaagtaccaatgcaaattattttaatcattattactattattataattaattaaacaaaatcaaagcattaagtggccacattcatcacaataatcaaataataataataatattgatcattaacacaccataaccgcgttgagccaacactgttcacagcacattaaacttaattctactgaaccttcacatgctacttccaaaacaaatctctatatatatagctccaacattcaccaccttaaatcatcaatacaaaatacaatcatggcttttctttcttcaattaactc

SEQ ID NO: 2315 - DNA, 1246 bp, Cannabis sativa
attattgttttcgttttctttttctttttcgaaacaacaaaaatatttcataatttaaacatctaaaggataattatgagttttcataaaataaaatatccaatttaatttaatttgtacgctctaattcaccatttgcaaagggtgaataatttaaaatttgtatttgtgtaaaattagatgttaatttacatgtaaaaataatggattaaattcaatcaacacatatttatatttattttttaaaaattatatgtataattcatattttaaagtaaaataataataataatttaaaaatctaatacttttgatataaatatatttccaaacttaatatatcaaatacatatgaatagaatttagtatgaaggtgtataaggttccatctcaaaataaattaatcttttcttatgattttttacactagttacctttgggtgaatctaattgtcaaaaataatatggtccatctgtcatcaattttgtatgtcgttggcctattttcttataccgtttataatgttttgaatttgaatttattttggcccatttgaaacccacacacgtgaatgtctaacacttcatcacgtttatcatgtaacttataatcagcagaccatttggtttcttttttttttttggattcaacttctctctctcaaatcagcttcttcataaattcctctcctctttctcattattgggttttcaatgctttgggttagggtttgagtaaaatttctctcatttttttgagtttgggtttggtttttcttgacccctaaaaatgactaaatgtaatatttggagtcattagtgttatgcttgaaagtttgccaagaggagcttcatgcatcaaggggagctcctcctctcatcaaggggacctccacgcatggggtgctcctcgcatgttaaggggaactccacgcatgagatgctcctcgtatgctaaggggagctctacgcatgaaatgctcctcgcatcctaaggggagctccacgcatgggatgctcctcgcatgctgaggggaagtccacgcatggggtgctcctcacatgccaaggggagctccacgcatgctaaggggagctccacacatgagctactatgcatgccaaggggagctccatgcatgagctgctctacgcatgccaaggggaagatatcgaggctagataggtctaagatgggaatcgcaaacgagatagtgactacacaatgcatattgatataggagac

SEQ ID NO: 2316 - DNA, 3218 bp, Cannabis sativa
agagagagagagagagagtaaacactttgtttggtgtgtttctcagtatgtatttgtaaaaaaaaacaaagagaaaacgttagtgaaatactcaaagagagaaattataaagaaaaatcaaagagagaggttgtaatcgatttttacctaaaattgatgaataaaattcaaagcaccctgtattttttgttttgttttggccgtgagaaaaggggttgtttctgggtttgttttttttttttattttttcgccgattgaaagcttcaattttctaggttggtttttggttttgaaaccgtgagtgttttgagttttttattgggttcatattttgtggttcttgagtaggtgcgaactggatttcgaattagtatttttgggttttacctttgttcatattttgtggttcttgagtaggtgcgaactggattttgtattagtgatttttgggtttttcctttgttgtgtggctgtgtttgacaaccggagaagaagaagagggatctaagaaccctaggtgattttgggttagaaaggagtagaaaatctagaatcctagtttggtgtgactggttgtttgtgaaaaagagattagaaaaataataacccgaacactaggtgatctaataatagattttctcactctttgcgacttgtagctctctctgtgtggatgccatggcaaaaataagagccaagaatctgggaaaatcaaaagcttccaataagaaaattaagaaaaaagggcctaatttaactacagatgtgaaaaaaaccaaaaccatggaggaatacttgctgtggaacccatggaatttactgaagatgaggaagacaaaggaaaatcggacctcgtgcttcgagatattgctgcggattttgcttacttcctacaagaaaataaggaatgtcagcaatctatctcgaaggatttcaacactactcctctggttctcagatctaagagtgtagtgaggaaccttgattcatcttttgttagctctaaaaaagaggataaataaaaattacgattgccgacattgaggaggaagttaactactagagttcgtctatagtttactacgtgcttggagtcgatcccccgttttcagttcaagaaggctttgctcgaaggatttagaaggacaactagataagataggtatgatctcttatggaattatctgaatttattttactagccttaaagttagagatgaagtgttagcaggaggttatattttcatcaataagaggccagtcataatgaaggcctaggatccgaatgtcaacttcaagaaagaggatattagaacagttcctatttggattcagcttgaagatcttgagctgaagtactggggacaaaagtctatattcaaaattgttggtcaattgaggaatcctttaatggtagatgaggtgacaaaaggaagagacaagctgaattatccaagaattctcattgaagttttaatccaacaagaattccctgacctaatatattttgagaatgagcatgggtgtgatgtttctgttacatttaactatgagtggaaacctattattttcaaccatttcaaaggaatgggacactcaataggggactgtaggaagaagaaaggaaagaagcgagaatgggttattaaagataaaaataagaagcaggggaatggagaagaggaatttaggcctgcggtcaaaggttggaaaacctaagcttatggtgacccctaatgatcctcaggtttcaaattcatttacagtactttcggggcaagtagaagatacaaatagtaagacataattctttcaagagaagataataacacttcaggagataagtgttaacttggaaaatgcaagaggagggagagatcctcctcagctcagtggataaaatcctaagttggaacgtccaaggaatcaatagtcaacaaaaacaaaatgaagtaagccaatttattgctaaacaaaatgttggccttattggtcttctcgagacgagagttaaggctctaaagattggagccttatatgttaggatgttttctagctcgtgttttactgccaacaatgcttggcataatggaggtcatattatagtggcttggaatccattgagctttaatgttaatatacttaactgctcgagttagctaatccatcttcatgtttctaccatagacaacaggaacaagttctatgttacctttgtttatggttttaacaatgaggatgggagaggtgtatatggaaagatttacaaggattaagtgctgctgacccatggattgtacaaggagacttttatgatatattagaaagaggggaaagagtaggtattagagttaaatatagtcctactgctttttaggattatgtttcctcttgtcaacttgaggaaattaagtatggagggagctattttacctgaaataacaaacagaaaggtgaggacaagatttactccaaaattgacagggctatggcaaatcaaaggttgctggatagttatccgaatgctgaaacaatatttcttaatgaaggattttttgatcatactcctgctatattgacagtgtatcctaccccctccagtggtaggaaacctttaaaatatttcaggatgtggtcttccccccgatttcagcaataagttcgagagatttggagccatgaaataagaggaacaaagatgtaccaaatcgtagctaagcttaaagcactcaaacaagtgttgaaatcaatcaacaagcagggctttatggacattcaagcagttgatgtgtccatgccaaaataaagctttttgaatttcagcaggaaacacacagggatcccacaaatttggagtcccagaatcaggaaagtgaagccaggaagaattatgcagatgttcacaaggcctatgtctcctttatgcaacaaaattccaagatgaactagatcaaggattgagattcaaacacatctctttttcactcaagcattagagaaagaagaaatcaaaatagaatcttctctattattaatgctagaggaaaaagaattgatgaccctaatgaagtaacaaaagctttcttgaattattacaggacattactggggtctactatgcaaggaacaacaggtgatggctgatgtaatggaggatgggcctgtgttaaccagtggccaagctgagatgttgatggttgatttttcaaggaatgaa

SEQ ID NO: 2317 - DNA, 1107 bp, Cannabis sativa
ttcaacaaattttatcccaaaaaactttagttcgagcttcatgtcagtaaactactttggaagttaaccaattttccttacagtcattcgagaacaaataacctcctgaatccctaaacggtcgaggcatgcttacgcaacagtccgggcatatttcacgttttggctttaaacttcttttagtataagtttctaaaaatctcaataagcactaactaatcactaatccaattttttaaaactcaaataacaataaacaacccactacaaccaattaaattgcaaaatataaattccacaaaacaaattcaaatttgtatttcaaattcatttttcaattttccaatcacaagtctttgtttttgctttgattgaaattattgggtctttcataaacaataataataattggaaaattatataatgcaacctcttaaaaggatgcagtgatacatttttatcttttttaatattcgaaataattttttagtctaacttttttgtatggtcattaaattttagttatttaagacatcctgtaaaaatttaagaaatttgaaaaagttcaaaataccaaaaattgtgtttaaccaatgtgtcacacgcgtgactattttattttatacccgtgtaaaataaactatttaaacattattttctatatattgtaaattatttcaaatttctcaaaattttgtaccatatgttaaatagttatagcgtattagagtaaaaaatgctgaaacaaaagatgcattcaaagaatcacctgtaataatatttataaaaaaagtcaaatctaatacacttattttatatattgaacgtgtgaattcgtgagaggagaaggaacaaaaacacgtgacactgtcgttttacactgatgaataaaacgacgtcgtttacaagtcttaatcaatcatcagagatcggagaagaagaagacaaagacagaaatcgttgtacggaaacgaagaaaacaaccaccacaaaatccatggcggactctcgtatcaaacctttagtcgatgcaattcacgctactccaactaagtgcgtcctctacctcgccggcggagcctcacaggtccactctctctctctctc

SEQ ID NO: 2318 - DNA, 753 bp, Cannabis sativa
aagaaaaggccaagatggaagccactataaagaagagggtgcctgaatcctttgacaagtcattggcctgtgaaaataaggcgaccaaaatagagaaggaccttggagacaggtataaagacttgcattccaaggcccttacccgtattaaagaatttgaagccaactcgaagcaggccaagccttatatccaagagaaggataaaatgattgacatcttatcccaggagtacggtagaaaagcccaaattatcgaagaaaaattcatcaatgagactacactggaggaaaaggcaaaactccacatcgacctacagcaaaaggtagacgcagcgaaagtagaggccttcaagagggctaaggaggctgagggtaagttggctacattgtcgaaggttgttgatgaatcccaaaaaagaatcaccaaaatggagggtgagagctcaaatttgaagggatgtctccaagagcaagaaccctagcattacaaggctttggtacaagcctttgtctactcagtatatactctctgatagcacaacaaatcgatgattgacctccttgatgctaaagatagggaggaacttttgcccaagttgtttacactagaggaggcggagaaagctaatagtgcaactcaaggaactagaatgatcaatcctggaactaccattcctattggtgagaagatgaataactctgctctttcagcctctgaagtgcatgtctcgaccaagtctgcgatgctggagg

SEQ ID NO: 2319 - DNA, 1715 bp, Cannabis sativa
taaatttgtttggacaggtgatgttctatgtgggagtgaatctggaggaaagttgcacctgggcattctacaagaatggttcggcatacattggtggaacactcgtgcttatgcacttctttttgttgccctcttcctcattttaccactggttatgctaccacgagtaggtcagcaagcaacattacaactcttttcgttttcgcatttctacaaacaccttaactccaacgtcaagtaaattcttttaatcagattcactcaggcacagttcagcgatatcgattcttttagctgtggcttttgttctcataacctctgccatggcgattaacgcagtattccaaggcaaaagtcacaaaatgagattgtttccggactttgctaatcaaatttcaatgtttgacctctttactacagtcccagtactcgtaacaggcttcggatttcatgtgaatggtgagaattaagttttcttttttatttagaaaaaaaataataaaatccaatttcccctagaaaattaaattactgtgataaacaaatgcagttcatccaattagagcagagctgagtaaacgttctgatatgagatcagcgattcgaatctctttgttgattggtgtcatcatttacttcgcgatcgggttcttcgggtaccttctgtttggggactcaatcatggcagacatcttggtcaacttcgaccagaattctgataccccaattgggcaattgctaaacgatgtcgttcggttgagctatgcgattcacctcttgctggtgtttcccattatgaatttcagcttgagggtcaatatagacgaactactcttcccaaataagctgaatttagcatcggacacacccagattcgtgtctttgacactgattttgctctctcttacgtacacagtggccatagctataccaaatatatggtattttttccagttcatgggatcaaccactgttgttttcacctcattcattttccctggtgctataattttaaggtacgtataagaaatccatccctaatattatctttatttttattaatttataacttcattattaatactttagttttttgattttttttttcttttcaatcacatttggccattaatgatcaattcagtaattgagttttgttagctttggccatttcttttatggtttttggatattttagtgttaattaatcaagtaatgtatctgtttatgggcagggatgtgcctggaatatcaacaagaagggataaaattgtagccattctcgtaattttattggcaattatgactagtacgattgcaatatctactaatctgttcagttcatcaaagaactgaatcccattgattgttcataccccactgtgggaatttattcgcatgcatatttcctaggcagattttacagcctggacttgcggttttagagggaaaaaaatctgcttgaaagtgtaatgtgttattatattttagacttagtaataccacctttacattacagctcatgataagaatacctgaattctaaaggtggcaattcgtattaatggattgtattcgtgtagttttgacacatatttacaagcaaatttcaaattcaaacttaacttatttattaatcatgttaaaaaattaaaactcaaatccaacttgtttttaaactggttcttttaattcaatatgtgtaacatatatat

SEQ ID NO: 2320 - DNA, 1087 bp, Cannabis sativa
atgaagctaaaagcatcaagacatctactcaaatgggcagtagagcttggttagtttgaaattccctatcagcctcaaagaataatcaaatgccaagaattaggtgatttcatcaatgaatgcactagcatcaaagaagataacctcatggtccgtgtagactagagtcccaaatcagagattgtagcttagaaggactctagaccctctttgaatctttgcatagatggatcttccaataaacatggatttggcataggactcatcatcataactcccaaaggattttgcacccactatgaattgtagatcaaattcaccataacaaacaatgaggcagggtatgaggcattcctagcaggacttcgattggaactgtccatcaaagctgaatcactaaagatgtacattaatctcagttagttgtcatcaaattgtaagtgaatatcaagcacgaggactcaaaaatatagcatacttgagcagagctaaagacctcttagacaagctgaaacactactccattcaataagcaccacatgaatagaatggaaatgtggtttccctaacaaaactagataaaataatggatttaactccctaaccatagttcccgtcaaataccttgctcagcctagcatcagcaaagactcgatcgagcctattctcatgatcgacaaccgtccatcatggatgactttgatagctcaatacttggagcaaggtattcttttagtagacaggatcggagcctagaagatgatacgtaaagtcgcttgctttataatcatggatggagaaagacgtagaagaagctactcaatgctctgctaaggtctatcacgcacgaagaagccaagtttctcatgatcgaggtacatgaagggttccatggaaaccacactggggaaaaaacatctcaaagaagatatttaggaaaggaaacttttggccaacaatgatcaaaaatttaatggattatgtgaaagatgtgacaagtgccagagattcttcaaaatacctagagcagccttgaacgagctcaagggcatgcaaactccatggccatttttgatctagggtatcg

SEQ ID NO: 2321 - DNA, 1866 bp, Cannabis sativa
tattgatccacaagttgtagatcattgctgccagtattgaagtatgcactctttgtctcttttccttcttgttctgcactaaccaaattttccatctataaaaatctgttggccaacttcgaattcccagccacttacaaaccagctcgaaaacttgtttgtctgctctacaaaccggacatagagtactttccaaagctatatgaaattgagagaatttgtcctaaattaacagttgagcattgatcgcttgccaaaagataagcatatgcttaggcatgtttaaagagcaccaaatactctcgttaaactcaaactggatctggggcaactttgaaacgcccctgccttgattatgtctgcactagcaaatttgttcctcaagtgacaaagtttcctccaataccaactagaatatgagttgggctcttcctgcaaaggagaggtgcctagtagcccaagtgtggagtctttgtttaattttcttaataatcactccacaatcttcagctctccattttgtaggtcttagagggacccccaggtatttgagaggaaaatttccttcaagaagggccatctctctcataatagcttgtttaacgtcttctctcacctctccaaaatagagttgagatttgttagtgttgatagaaagtcctgaggtatcactaaactcatccaaaacatcttttaacacctgtattgagtgtaagtttcccttgctaaacaacattatgtcatccgcaaagcaaagactaacaattttaagattcttacacatggggtgatacttgtaattagaatgacacgcaaccaattgtaatctcctagttaggtgctccattatcaagacaaataaaagaggggagaggggatcaccttgtctcaaacctttctagcctttaaagctcccttgcactcttccattcatcaatatagagtaagaagttgctctcaaacatgtcattatccaagaaataaatatggttggcagattaaaagcattcaaaagggcttccaaaaactccaagttcactgtgtcatatgctttactaatatcaactttgatagtgcatcttggagaaatgttcttccttttgtaatttttcaagagatcttgaagaatcattacattatgagcaatagatctcccttgaacaaaagctccttgattctgattaacaagatcaaaaagcacttgggaaagtctcaaacataacaacttagatatgcatttatacacagtagaaatagcaagctattggtctaaactccactgcctttgttgggtttttagttttagggataagagttaacatggttgcatgaaattcgtgaggcatgatacctgttatggaaattctccatagctttggtaaattcagcacccagttcaggccacattttcttaaaaaatcttgctccatattcgtttggtccaggagattttgaattagatatactgaaaaatgtcctccatatcaatttcacttgtttctctaggttaagacgactccccagatccatacagtcagctcaaagccactgagcaggactagaacttgttcccatatagccttggaagtggctcacaaagtgtcgagttacctcagagtaattgtctataagctccccttggtcattggtgtaagaaacaatactattttccatccttttttttttcttcagattagcatggaaaaaagaattgttctcatcccctttgcataaccaagttaccttgctacgttgtctcaagaaactataatacatcttttcttgagtattgaaatgagtagcagcctcccgcttgttctttactaataaaatgttgataactgttaattttggtatgcctactaa

SEQ ID NO: 2322 - DNA, 3315 bp, Cannabis sativa
ttaagttaagaaaagataagggagttaaaacataatggagtcttgctgccaggaaaaaaatgtaatatttctataaataaagggtctcaaatgcaattatctaagttttccactaacttattttggattttggtatcttgtggctgtgattgtcccaaccaggaaaaagttcaaaatcacagactaaatcttatttgagatgaaaccagaaacatacataatggcttctttaacaacaaggcctccatccattgttgtgaaccataagattcctcccactgtggctttgcttcaaatgtgctgcaactttcatgaggtaagacaagttcatgcacagttggtaatctcaggactcctaaatcgccctcccaacggtggaagacttgtcgagtcttatgtaagagtctcaaacatgaactatgccatgtctgtctttgacacaattcaatctcctgatgtgtttgcctacaacaacatcatcagaggattcatgctcatcaaagacttttatagctcgctcttaatgcttaataaactgttgctgaatggcttcatcccggacaattatacttacacctttgtcctcaaagcttgttctcaacttaaagctctttgtcaaggtatgcaagtccattgcatgatgatcaaggctggcatatcagtcaatagttacactcacagctcgctcatacgaatgtatgcaagcgcaggtagtatggattgtgctgagcttgttcttgctgagttaatctctacaaatgaaagcaatgctagtagtgttattattgccaagaatgctatgatatccgggtacctaagtcagactcagcagggtcatgtcgataaggccagaacaatgttcgacgaaatggaagctaaagatgttgctacttggagtgccatgatatcagggtacaatcacaatgctatgtatgctgaagccttgagcatctttgaagagatgatggcttctcgggttttgccaaatgaatccacgctcgtgagctctttgtctgcctgcgctcatctgggagcgctagacaaaggaagatggattcatggctatgtggataagaattgtggtggtgaagtgagtgttactcttggtactgctttggtagatatgtatgttaagtgtggttgccttgaatgtggttatcaagtctttaaggagttatctcatagagatgtagttacatggggagctatgctatctggttttgcaatacatgggaagccccaagagtgttttcaactgtttgatgagatggtttcacaaggattattccaaccgaatggagttgtttttgtggcgattttaacagcttgctctcatgctggattcgttgaattgggacatcgatatttcaatagaatggttaatgagttcggaattgtaccttcaattgaacactatggatgcatggtagacctccttggccgtgcagggaggttagcagaagcagaagatttcatttcgagaatgccaaaagagcctaactcgatcatttggggtgcgtttctcagcgcttgtagaacatacaaggacacaaaaagagggaatgtagcattcaagcacttgaccgagttagagccaatgtctggtgatcggtacaagcttgcaaggcttatgtttcacaacactggcgaaaaggaaattgccaacgcgattagaaagttcatcgacgaaaatgatttggagacaactcgcggagtgagcttcattgaaatcgatggtgtggtgaatgagtttgtatcaggcatagttaatcatgacaggaatgaagaactctatacaatgtgggaaagagtaaacagattacttaagacagcaaaatctgaaactgacaaacaaaacctttctttgtgtgtgtgattattattaatgtagtaaacacaaatgtcatagcattacatcattattttcataatgtttacaacaatatacaagtcaaaagactatatcaaaaacaagctatagtcttgactgtcatatcctttttcattttgtataaattttataagttaaacagatctgatcttgagtttttctacaagtatacaactgatttcgataaggaaggattcaccataggcggttgatcctaggtttctgtcgaaactgcttctttgtcacgcaccaaggaccggggaatgtgctcaactgtacaaacaacaacagaaatcatacagcaaccatttccaaagagttgtataagtccaaatgtttatggtaagttatgcagcttacattgccgattagcttagccccgaaccacgctgtgtcttggccgtagggaggaggaatgaccttaactccgctcgacatagatggagagagtatttcatgcagttccttttctagccgatctgaaacaacaaccaaaatgcataccacaacacatcagtgtgtcaattttcaccaattttatgcttttttccacatgaaagtgaactgcatacacctgccaatccgggtaaacacgccgtgcctcctgatagtatgatagtcttgaaccaagcattgtcacttgttagttctgcagcatcacaatggtccatacagagtgctatagcctggtgcaaacccatcgctcgcctgtaaaaaaacataccataaagcgtttctagacatctttttcgatgaatcaataagtacccaatgtttgtaaaactgtaattgttttctaattttataatatggcacatataacacccagattctagatcatttggtctggacagaaacatgtaatactagttatcttcaaattttctattcataaattcaaaatgaagtttgtactgacgaaactggaagaaaattatagtttaacaaacattaggtacttttaccactatttaccctattaaatattattaacgaagttggagaacttacactcctgccattcgtggctggaataagatctcgcctgtttgaaaccgctctttagaaagtgtgaacagaccttctcctgtggcatcacatgatgcctgtgtatctttgagtagctcagcttcataatcataagcaacataacagagattctgtatagaaatcggccataaacagaactcagcctaaacaagatcgaaacattcgaataacaagtaaagagtttgtacctctttcaaagtgcgaacggtgtacaacgattcgaaactaatattgttctgctgcatcaactccttaagaaacccggtaagttttagagctcccaatccaacaacctccacaccaactttgcgcattactttaccatgtaaaactagaagccgaaaaagaaaaggaaagattatatttcagacccc

SEQ ID NO: 2323 - DNA, 2886 bp, Cannabis sativa
gtgggggccgaaggctcaatattctgggcagtaaggattttagtgctctggtcggttggaactgtagaagtgggtgccacaggattttctttggccatctaacccgcaaagtaatcaagatatacctctttgaaatcaccgaggtaattaaagttgcctgcggggttggccttcctaaattcgtagaagaccttaagggcagccgtttccaagttttccacctccttggcgagctcttcctccctggtctgcatagcttggacgtccccttccaactttgagagaagagtgtcgagactctccctctcatcttttagttcattgacctccctagaccagatgtcattgtctccctccagctgggcagttgatggcatcacctgaatctccttggtcagctcttcaacccatttgttagcagcaaggagcttctttttcacctctccgagcttgttcgacacgtcctgaacaacctttttacctacatctacctccctctgcaaagtgttggtagtagcaaggttcttggctgctgtggacttagctcaggaataggcgtaagccaccttaagattgacatgcatgggagaaaatgttaaaaccaaaactagtaaaaagataattaaagtaaaagaggaaatacttacccgagtagcctccttaaggactcctcccatcaccaattctaggtacagctcattgtctgccccagaaagttggtcactcactttaggaaatgactgatccagataatagtggagcatgtccttgtcctttttggcttctgtgcttagcaccatggtgttgaggtggtcttggtcggtccagacccatccgagcccccccccccttggaactcttagactttgacaccttctggacttgagggtccacaacaggcaccatgtccttacaaaggtcaatcactgttttggttggcccattatccttagacagaatatcttcgcccatggatcatttgcctcgaggagttttgcccgagctgtaaccaaccctcttctacaaagcctgaagtacattctaggacacgactgcacataaacaagacaataaagttaaagacagaaataatataaagattgatgaagtcaataactgcaagtggaaataccctgcacgtgggcagaagcattctcccgaacaagtagggatggagcttcatcatccaaagagtcttcctcttgctcagtcaatatggcctttcctttccccttcattgggacggatgattggacatgtctatcaggctccttaatcctgattgaacgctcaattggcgctgggtcgcttggaagagcctttttccccttcttgctcagtctctcctgctcggccaccccgaccttgctaggctttgccttcttcttctccttcatagacctcagcacaaaatcctttgggaagagtttgtacttaacataattggcctcaatcgtcagaagagggatattctaagcagcttctggcagttggagaatttttttatgcccttttcctaagctccagggtgaacggagagcagcaatacaagggaattttcagagcccagtgtggacggtgttcattccttggacaaagtagtattcgtccacaaaattcccaatctttctcaccttggagtgcaccgtgcctgtaagccacttctcctcaatttgagaatagtaaaactaccccgacctgctttgcttgggtgttaacttcaggtcaaagagccagtcggtgtcgtgaaggaatggctcacctcatccctttgacacgtagaggataaatagggcggatagatacttgatgccctttagagtgaactgggtcggataaagatggtagtagtcaaaaatcctcttaaagtacggaagcaagggcaacatggaaccttgcttggtgtgagcacccgaccaagcacagtatcattccctaggggtggtcgccaactggtcttgagagggaaggaagcattggacatcctttaagtaaccgtgctttagcaaattcttcattttggccctggttattacagatggaggagatacccaccgagtttgtaaagcgccttgtcttttggggggatggcttcagtatgttctttggagacacagtcttcatcggcctccaagagttccccagtctctgacatgggtagtctctcttcattataacccccgaaggggagccgccgagctgtgccttcctcctcagctttagagggagtgtcaagacggacctcgccgtgatcttccatttcttggaatttagcctccccaactatgtcttcctcctcaataacagaccaggcctgttatgtactcggcatcgtagcaagtcattctatatgcgcgttagacaaggaagaattccgcacagtctatttagtacgagccatcgtcctattcttgaacggtgtctggttggtatgcctagcgattgtcacagcgaatgtagcgatgggcgtacctgcagcgacaggatttgaccagtctacgagtaaggtatcagccatattggtgttgcactttaggttcttgacacagtgtgtgcttgctgcttatctcctagtcctcaaaatttgaattagatagaccgtcgctagaggaggacggatttgcccgttgacgaggatgatcctcatataaaagttggagaaggtcctggttaatacgatgtttgcttccccaaaactcaccacggttcatctacaaaacgtaggaaacacgatgagtatttggcctggatatcgaaaaaaaaacaaattaaatatacctaccaagtccgatcgaaggatgaaaaatataaattttgcatgatattgaagtttacaatccagagcttcaaaaggttcgaattaaaagttgattttcactaagcccc

SEQ ID NO: 2324 - DNA, 641 bp, Cannabis sativa
tataaggtttttagaagagggaaagcaatggttgcataggttttgaggattaattcatactagttcctaggtacatgttggatcatcttatgagttatgaccaataatctccattcttctccctcctctttctccaacaaaaatgtacatttggtatgtcaaaacatatataccaagaaagaaaaagtttgtggttaagtggtatgtatttgtaccatgtattgggtatcccctaagcttgaagccatactatacccatcagggtcggccttgaaggtagacgagttaggcgtgcgtttcaggcattaatttttttctttttttacattttacgaaaaatttacaagtaaataatttaaatggtaatcaaaattcacataataattcacatacaatcattaaagcaagacaaactgtaaatttttttaaaaaatatataaatgtaataaataaataaggatgagaatgtgaatttggaatgttaatcaatgcaggaccataaaccccaatataaatgcgaagcagaagatcagtcgatcagaacagggtagatccaacggtcttaaatcatccacgtgttctagatctccgccatagcctagtctcaacacaataagccccgaatcccccaccccctctct

SEQ ID NO: 2325 - DNA, 1898 bp, Cannabis sativa
tgagctatgcagctcttttatgcatatcattattattatcatttgctccctatatttatgaatatatataaactaattaagcagagaacataatcataaagacgactaatgattgaattgagtgaaataagggcatcctatagaaatcctaaacaatttactgcatcaaaaataaagttcaaaataatcaattgctcacttatcataattgctcacaagtttctaaaactcgaacagaatccttactatagctctaatatattggtttgcaatttctctatatacccaaaaaaaaaatgcccataagcaaaataatgcactcacctaagaattttatatacaaattaattaagcagagaaaataatcaaaaagacaatgaataattgaattgggtgaaataccattggatcactaaagatatgataaccagttacatcaacaccttccaatatgtaagaacctaacaaaaaaatcaattaacaaaaatttagaaacacaacaaaacctaacaaaaccacatcacaacgtatggattagtcatactaccaggttgttcatcgagtttgggccacaaaaaatcgaccttagtagaaagacaagcaccggaagcaatcgcaacggcggtaacagcgacatgagtgattgtagaggtaacggcgccgtgaagagaagtcgatccagcggcgatgacgttagcggaggtgaagacggagttaagagaagaagagacggtgaatttgggaggagagagtaggtaacggaggttggaagtagtagtagtagtagttcggcgattgaatcggtgagccaacattgggtggtagttggatttggttggggtttggcttgagaccatcgtcttctccggcgtcggtctctgcctcttccctctgattctctctctaaaaattttgtttctctctctagaaaattttcaggtggttgtggtggttatctttttcggtttaaatagtaaatttaattaattaaataatagtaataatttgtggtttggaataattggaaatataaaaaataaataaataaataaaagaggaaaatgggaaagtgctctcattgagagttgaactcaagacctcccgcttactaaacgggtgctctaaccaactgagctatgagagctttttgttttgggaatacattataattttcttattgtttttgaatataataagattaaggctaattaggatttttgcccccaaacttttaaggtcgttaaaattttttcctgaattattgagattattgaatttaaagacttttgtttaactttagtaaggaaaatctaatatgaattaaagtttgggaggtatgatttggtacatgttaaagtttgaggggtatgatttcgtagatattaaagtttgaggagcataatttagtacatggaaaattaatggattagtaaagtttaatgaaattggataaaagtctttaaatccaacaatcttaatagtttatggaaaaaattttaaggctgaaaagttcagagaacatgatttggtacatattaaagttcagaagacaaaaaaatataattgacctaagattaatttcacatcagttgtcaatttcacgggttgatggtttctactgctttgaaagttcccttcattgcaatctcttattttcatgatttcattgtagatgtctttcattgtagatgtctttaatcttttgtcctttttttctaatgtatatgttactcatgtcaaatgtacgaccaataaggctgctcgggttggttaaatttgcattagggatggataatgcttgtttttagttaaagaatatccctcacacttatttattctattctttcttaattatattcacggaaattatttggtaattaagtattattattattatt

SEQ ID NO: 2326 - DNA, 2286 bp, Cannabis sativa
aaaaaaaaaaaaaactctataggggaattattggcaatgatagttttttttaatcactttttttttttttttactttattcacaaattggtgtaactaaaaattagattctttgaagctggggcaaatcaactaactcatatttttagatgtaatatttaataattagttaacttatttatgtgttaaatatcaaaatatgtgagattttgtggtatttcacactttgtgttgctttatacgtcactaaatatttctatatttagttaatttaggcaaagtggtatgctttttttaatataattaattgagatttttttttaaaaaaaaacacacaaaaataacaaaattacaaaaatataattgtaagaaattttaataactttttttttttactattttatttacataatatataatctttgaatgtatttttatattatactcttgttattttattgttcgttttttattatttatatatttttttgttgttttgatattatttttttgttatttttatgtgattttttcgttatttttataaatacggtaaagatatatataaaaaaaatatttttaaagtgtacaaaatttaagaaaaaaataataatttatctaaatttttctaattaatttgtgatttaactagacgtacttaccataaaaagtaggaaataccttataataaaaacaaaatcaaaatgatgtttctcactagaaacttgtaattatatttttaaatgcgtgaagcaagcaattggcttatataccaaatgtatgtatagaaaattttactatgccctcttggggtgtattgatgcgcttatatatatcggcattcaaaaaaaaaatttagttttttttttttagttatgtaagttgtaattatttaaaatattttaataaattttgaaaaattcaaaaacaaaatttaacacattaaaaataaagtttaaacagtctgttacatacgtgactcttctattttataggcagaaaaacctatttgaagaacacagttttttctattataaagtattctaaatttcttaaaattttacagaatgtcttaaataataataacgcacacaattataaaaaaattatactaaatttttttcttaaatatcaaaataaataagaggtttatcagtgtaggggtgcattaatttgtgatttaactagacatacttatataaaaatcaaaatgatgttcctcactagaaacttttaattatatttttaaatgcgtgaagcaatgcaatggcttatataccagatatgtatagaaaattttacaatgcattcttttaaaagaagtgtattcacatactcttatttatattggtatttaaaaaaaaaaaatagttcaactttttctataattatatacattgtagttatttaagatattctaaaaaattttaaaaaatttaacacgtcgaaaaataaggttcaaatagtttgttgcataagtgatttttttattttatacgcgtaataaactttttgaacactattttctctattataaagtatttcaaatttctctacaaaatgtcttaaataataataacgtacataattataaaaataattatactattttttatttttaaatgccaaaataaataaatgatttatgaatgtagggattatatagaatcaccctataaacttactaagatatatgtaaagaacccaatagtggtacccatgctgccacgggtgccaagtagtaatagcactatatatgtgtacgatatcatctcagtctcgaaaagctctccatatctcaaatttattgctacctattacaaaacaagccttcaaaaccatttctttctttctttctttctttctcttataagataatgtaaagtaaagttataaacataaagtacatttagttttttcttttttctcttcttcttttattttttccacacaagagagagccaaaatgatagtggaatacttagcactctttgttgtcatattccttatagttcgaccaattttaaacaaaattttccgaacaaacaaactcccaccaagcccaataggattaccaataataggccattttcacctccttggacccataatccaccgttcattcaaacaattcaccgatcgttatggccccataatttcacttcgcctcggttcaatcccatgcatagtcatatcttcacccgaactcgcaagagattttctcaagacaaacgagcaatatttttgcgaacacaacgcatccatcgcggtaaaccggctaacctac

SEQ ID NO: 2327 - DNA, 640 bp, Cannabis sativa
atgtaattacccacttcagtgtgccgttgaacctaaatgtcaatgtaattatgcacttcgctgtgtttttagttattaattagagtaacacgtgttgatgtcctattggccaatttattttctttgaaaataataatttaaaaaacaaaaattttctaaaactaagaaataggaaaaacaaatcaattcttgaacaatacgtgtcattctaattaataactaacggtatagtgaaatgggtaccgacaaaaatattatagattcaggtatttatccctcttgttttttaaattagatatttattagcaacaaatataataatttgaatatttatgcagcaagtttactgaaaaatataaataaaattttaatgatttaatttaaatatagcaggaaataactaatgtgacaactcttattcttaactttgcgtaaaccaggttctgtgacaagattcaacatcacaaacaattgcccttttactgtttgggcagctatcgtgccgggtggcggttggcagctagaatcgggtcaaacacggagccacgatatgagctcggataaagaaggccgcatctgggccagaacaggttgcatttttaactcaacagggcatggtaggtgtgacagtggtgattgc

SEQ ID NO: 2328 - DNA, 1413 bp, Cannabis sativa
aaaaaaaaaaaaaagacaaattaatgatttttgcacaaagctcccaaattgattgaaacaaccttgcccatgtaggttaattattacccgtaataactttaaccttgtcctcaatgtggaaggaaggaaattgttcattgatgtgtggaaatcatccaatgtgcctcaaaatttgataaagtattccatttaatgaggattcttgtagtagtaaagtctatgattttttgtctatgtttggagcacacttttaagtttaactcacaattccaactcgattggctgtaagttggggtagaagaggttgtgagacctggtcattcccaacgacacgacaatgttaagagacatgaaacactagatggatagcgacactatatatctggcaacttgagcttgtaggaaacttgaccaatgcactgtatatctggaaattatccataaaattgagcagatcaaagcttctcattagtcaccaagtcgcttatttctagtggtatgggcgaattttgagatagattttatcgcccaccttaaactcctcatggtgacacttggtggcatcaaaatgtttttaaatgggatcataacaagtgcatgtgaaggtcataaaggattgcatcttgagattctaccaaataaagtttcaatagtcgagactctcatccatatagagctttgaatggagtgcattgaattgaggaatggtatgaggtaccgtactaaaattctgtccaagcaagccatttggaccatttttttttttgggttctcatatgtaaagattgaaagtaagcctccaaacatcaattaatcatctcggtttggccatctatttgagggtcgtaattcgtgtgttgcttaagggtggtaaggcgtgctttttactggtgcccttgagcttgaatcactgttttcaaaaattacttaataagaaaatgtgatcttgatcaaaaattatagattgtggaagaccatgtaaacgaaaaatcttagtcatgaaactcgcaattgaagattcatatggaggtgcctaaaaataaatatgtgagggtttaggtctaaaaaagacaatattatactaattcgagagttaaggtgaggtgacaacaataaagtagatcaacagcacccaatatatacatatcttgtttaagacatataattaattaagaggttgtcaattggggcaataatcaatttatttctatttcatgcttacatatttttgaatattaatgcaacaagcaccttaaaggaaagattaatgttttataaaagtagaacacttgttaaaagagtagtgttgtagaagttgaacattacacttgggacaatttatgagtaaagatggcctataatgaaacctatatgtaattatatctaagttaattagtgagatcacttatatct

SEQ ID NO: 2329 - DNA, 1700 bp, Cannabis sativa
ggtaaaatatttccaacaccaactccccagttccaccaaatttatcatcatttaacaaaaaccccccacaccaacaccgtcattagaaccaacaacaatagcagaactagaatcaacaacaacaccaactatcatggaacaagcaatgtcacttacatggtcaaagattcactttcctacctaggattccttctgtgggctttgagttccccatgaagtctgccctcctttggcacgccactttgaggagagtagaagaggccaaaaactccttgggacagcgacacgagactgaaaggagattacttcataagagagctaacagtctctcaggagttaggagggttgagatttgttggtctccttgccatcattctagctgggccaatgatagacatagaggccctatggaagtgattggtgccaaaggttggaagggaagccacacccttcactgcagagctattagacaaagtggccatcagtgcatctaatataccctcagagacatggacaacttatagtagcgtcgatgcattttccttgactcatgctaccaaacaacaggtagtgggggtaagcttcaactcttccacctctattttcaatgttgtatattattttctcacatttctttattgtactatatggctttgatggctgaaatggccactaaagaagtaggtgccttaatcattgagcttgagtagaccaacgcaaagagaaaataattgtatgttcacaacaggaccctactcgttgagcttcaggaaaccaaatcttaaacttctaacgaggtggacaaagccaagaaggatgttgaggagaggatcaagagcgtacttggatggaaatgaagctttgaagagggatcttgaggacttgaagaaagagaaggagtcattaaaggccaactatgattagcaagctcttcttacgcgaggcatccacataacagttataatcgtagaaaaaccagagagaggttgcttagggaagacattcatcaaccacctaatggccccaaatatttcattgccttggtggctatgcaaagagccggggaaactattgtgcaattggtctgaaactccattaaggcggaggctaaggctaaggctactgctgaaaggctcctgcttcaatccatggaaatgtgcttctcattgttcctccatactatcgggaagaaggacccttctatcttgaagcatcttcgaaaagatgaggaagaatatacccagagtaggctttccattaacaatgataactatctcgagaactatgtccttcagggtgttagtgaggagtctagagacaagtaagtcggggacttggaactcgagcatccagtaggggtagtagtttattcacgaactgtaatccaggatgttgtaggagcttcttaaggataggccaaaagatccaaccagagaatgatttctatccagcaattcttttatttttcctctttttttatatctagttttgcaaagacaattttaatcatgtcctttccgtgaggctgtttgtaatggcttttaagacaattactttatttatgcatgttttcttgtcatgccactttgacaaatttctttttaggatattgcaaagtctttggttccaatagtcgaaacttgataccttttgagcttaatgactttgtaacttttcggttgaactttttcaaagtatgc

SEQ ID NO: 2330 - DNA, 3496 bp, Cannabis sativa
actaaatttgatgctagttttttttttagttggtatcttattatatactatcattcaaataaagtaatagttgcgtaaaagagaaaaaatagtcattaattttattaagaatagaattaaaacaaaatataatttagctacaattaagtagaatataaatctatattaattttttaaaattaaaattataaaatagtaaaagtgaatgttatagaaaaagaacaaatataactttcactattcctatacacattatattatatgaatgttataataatgttaaattgacatgtatattatatatataggactgttacggtaaggattggataaaatacttatgaatagggatagtaatttatggttttgatttaatccaatgtctcaagttaatttttgaaaactacaccataattaaaatatttatttattaataattagttttaaatattattaattatagattcaactaacaaaactccaaacctaactccaaatcataatttttttactttttattttatgtttattaaaaatttaattttaattatatatatttattttaaatttacatagaaaaagattttaattaaatttatttttaaaacaataattataattatagaaaactataacatgttcaatttataataattttatatactcttattaaaataatgaaaacgtcatgaattcaatcatttagaagtaatatttctttatttatatttaatttaaaattttaattaattcaataatttcaaaattttataatattatattaactaatttactttttaagattataatattcagcgtatttaaaaattttaaatataaaattaattatttattttaattacattattcatataattatacatgaaatagaaaataatacatattcataatatgcttattcttcaacttagttcaaggtaaatgttgaatgtatttaaaaattttatgtattgaattaattatttaatttaattacactatctatataaatcatgcatgaactaattagtagtacacatatatagtggaaagagtaatgtacattattacattagaaaacacaacaaaattattctaacatgtttggtaagttaacctatctcttgttaagtgatatgcgttcaattcttgacaccgtcatttgataattttataccatttttttttacctattttatttcatttatttattttttttgaagaatttttttttatctcatctctttatcattctcaatagcggcgctcattcaatctatttcacactattttactcatagtgcattcgattcgtactcagtacagatttaatatttttgttctaatctaatccgcataataactcaaatccaatttacaaaaaagcagattggatcggttattttggattggttagtttttaatattgaattacttaatatttattattttttttacataactaacaataacaaaataaaataaattattgttgttttatgtcgccaacaataaattataatagataaaataaaaaataataaacacaaggaaagaaagaaaattgtatgtataaagaaatatttagttttgttttattgtgtgcacttgcataacaaataaattgtcactgtgtatactcatagtaaataaattttgcaacaataaactattatatttggataatactaatgccttatcccatgtcttatagttatctaaagttgtcacagactatcaaatttggatgagaacgacggtaatcgagattgttcagatattttttagtgtaaattttttatctatttattaagtatttttttatttgacaaattttttcatttaattattagtacatgtgaatgtattattttattgttcactattatactttatgtaatattaccatcaatacatattaacaaataaaaatttataacttttcaccacaataattataaacttttctctgtagcatgccatcagcaattaaaggagtggctgcaatggagggctgtttcgacctctctgtataggctaattcgatgggttaaaagagccaaaaccacttcaaaaagcaagttctggctgctgctattactgctctagcatacaacatatggcaagccaagaatggaatactatggaatgcaaaatatgctcaaaaaaacctgagtagtcaccaaaacaaaaatggaggtagttagcagggttgaaagtttgtggcctaaaaaagtcaatactaaagataggatctagtttgatactttgtaatagagattagaatgagcattacatacccaagaaagatttcgtatagttaattgtttttcaactcttccaattgaagatgctgttaagatgtaattgttttatttggagtaatgataatcttgctgattcataaaaaaaaattataaactttaaaaaatttataatataaaatttgttctttattaataaattttaaagaaatttaaattattgtttagaattaaacaaattttaaattattaaattaatttaaaagcttaaattaaaaataaaaaataaaaaaaattatgtcttttcaaatgattgaactcatgtcattgtacttgatgtgagataactttaccacttaattatattgttggttgtattaatttttataggattaaataacttttctagctacaattattgttcagtgaaaaataaaattaattaaaaattgatatatagattttaaattaaaaaataattaattaaaatttataaataatcatcaggtaagaaaaataattaattgaaaatcataaatagccatcaagtaaattaatatatgagttttgttaacaaaaatataattttttttttttgtggtttgcacactctctggatctacatagggaaccaacccttgacatggtgggtttccatatcaaaatttgaaattgagtataaattggaaaagaaaaataattgtaccacatactaattaaagttgtttaccaactagcattactaaaagctactacatatgagtttgatcgataataatttttaaattgattggatcgttgtcatagtttaaacacaaatgatcttaactataatgcaattattgatcttttgagatacctaaagtaacaatttgattattgaatatatatatctgaaaaatatcttactattcaaaattttcataaattattatatttggatgatatattaatgccttatcgcacatcttatttattgttcacaacaattattgatcttatgaattgtcccataataacaagatcaatcaatatactatcatagaaatttaaaattgtttaattaattaaaattaatatcaaattaaaaataaattataaagaccgactcttgtgaaatcctgaacaaatttagtaggctggattgagcatgtcatcgttggggttgtagaaaccaaagatctaacattcccgttgaaccatttatcttgttaaaatatatattgtaatgc

SEQ ID NO: 2331 - DNA, 1265 bp, Cannabis sativa
ttttttaacttcaactttcattacaccaagccaaaaagggcaaaacaacacaaaggaaaaccagacgtaccaggctatgtgcagctccattgagagcacggggaacccacatcagctctacaccagtaacggcatccgaaatctccatatcaatttccaaaacaaactgctaattgggagccttgccagatctaacaccatcaatcagacccttacaatcctaatacttttaacaatgacggagctagggggctgaaagtgtacgtgccatgtggcccccaatcgctatttgtgtaattaggtatcgaaatcattttcggaagtgttgaaaattatggggttccaactcaaaacaattggcaatgagtggagtagcccatattgttcttatatatggctcaattatctaccatttattctatgtgggacaatgtccacaacaggaagtttatgaatctgagctctatttactctcctgtttgtgatgatatgcctgaataccgttttctttattgtgtttttacaaaaaatagtaattcatcataatgtggaagttggttttggtcaattctcttgggcaaacaacatggaggattggaaaagctggagtgtgcaaccttggaaaggtctcgtggcttccatcttgaataccactgctgctgccataatttagcatgtttggtaacaagaatcgttgtattttttatgctattttgtagttcagttgttagagagattaagcttgttgttaaagctagagttaagggttctcttttttctaatcttagtaaaagggaagaggacattgccttgattaacaccatgtgagtgtttttctgcttgctgtcttttgggcagcattttgttgtagtttggtggttgttaatttgaataaattttttcctatgcttaaagaaatatttggagacttatataatataataattttataaaatatttaccaaacattggcaaactgctgccaaataataatactttactctatagcatataccaatacaacattaaattaaggtggtgtttggtttattcgaatataattgtaatggtaatagaaataataataggacgtaataaacattgtaatattggaattgaattgacaaaaaattcttactttatttattatttaattatatttccaaagtgaaaagagaaaggataaaattgtcttttttattatttagttgttattataattcttattcataaggtgtaatagtgtaatgaaaattcatagaatt

SEQ ID NO: 2332 - DNA, 640 bp, Cannabis sativa
cagccactggcggcggcggtaccggatcgtctgtgatgaaagagataagccagagaatggagaagttcgcgaggcttatgggagttccattcgagtttaacgtcgtgtcggagctgagtcggctaggcgagctgacgagagagaggctgggaattcaggatgacgaggcggtggccgtgaactgtgtgggaacgcttaggagagcggaggtagaggatagggaggcggcgatgagggcttttctgtctctaaagccgagaattgtgactgttgttgaagaagaggcagatttcacatccactagagaagatttcgtgggttgtttcgaagagtgccttagattctacactctttactttgatatgcttgaagagagcttcggtaggacgagcaacgagaagctgatgttggagagagagtgctcgagagggatcgttagtgttttggcatgtgatgatgatcaagattatgaagatcaatcattagatcatcaatatcatgatcaacaaatgaattgtggtccgggagaagaaggaaatgatgaccaaaataacgacaataatagtaataatgatattaatgatggtaataataataacaacaactttaaggatggtaggacaagaaggagaactaatac

SEQ ID NO: 2333 - DNA, 2046 bp, Cannabis sativa
aggactggcttgttgttagcctcagatttagctattaccatctcaaactttggcaagcgaataatcccagcagatgaaagcttaagagaaaaaataaaagctgcatcagatgaataaaataacaaaaagtccaatcatctgttatcaggacacaacacatgtttaaaattaaccatgtaaaagaatcacatagaagctgcatgaagttttattttgaataacaagatatacacccattaaaatcacaaaattcaatgttcttaaaataaaataataaaaagccaaaatataataataaaggtaaagatgaaatcccctcaaaaaaaaataataaggtgaagatgaaggagaagactgtccaccagtgggatacgtttcattgacatagttatctgatttaagttgtaagcggacatcaaatttgtgcactactgtttacatttaggcacagcaccacctataataacaacaactccgaaatgattcctaatcatactctgatttattaaatccccttacagaaacagcctagaataacagcaagatcaaaagagaaaaagagcagtaatacacaaatggcatacctgaaatccattgaaggtcttgcactgcattccagaagcaagaagaagcaagcgactttcatgagtataaacataccaactcacattcaatctccttgtttccaccaactggagtgattttgactccgaattgtaagaaagcaagtccagtccactgttatcaagctcattagcaaaagataaatagggaaatacctttagtacaataaagtcaaacaccatcaacccatagacacggatacttttccatttaaaatcaaacctttttgcagcagtttgaaacagatgaccatatgactaatgtgcacatctaacttatccacagaacaaaactaacaaaaatttcttctagaacattatatgcggcacttgcatacttctagaaattcataaagcataaaactacatggtccaacagtaagctattacttaaagaaatttgcttctatttttttcaccctctagtagaagacatttattccgagttaactagaaaaacacacagatatcaaatataatgtagatcaagatggtttgttctcttacctcgtctttactagtacaatatcacacaatggacaatctgtccaaaagaatcccaaaatactctcagagtctggccgacacctctgactaaaagtttcattactttctctatgccaaaactctatctcatgagaagaccgtaggattgctataaattttccgtctaatgaataccgaatagataaaatgggcccttcactaattgaatcacttgttggagaaatactaggagcaaagggaaccgttttccatgagaaaacctgaatgagtataagagacaaggaaactgaattaattttgataaaatcaagaagctcaaaacttaaaatatctaatgattattagaagaaaatgttgtccaagatattatatctacctgatctgatgtcggtgatataagaagtttacttccatcatcatagaataaacccctcacacctgaaatactgcttcttaggggtggatattggatataaacatgtgataatgcgccagatccatttaaaccaacattagaatgagaactcgatgctttcccagacatctctttggagtcaatcttttaattagagaagttgaagagtagcaacactacttgtttacatgcactgtaaaattacagttagaaggaatcaggtgatgccagtttgtgaataaatattgtacatatacatccacacatatatatttatagacagggaggtaaagtaaaattctcgcccataacaatacacacacatatataaatatatttatatacatagtttgatgaatcatgtctagcttttgaataaaagaccttttttaattgtgttcttctaactactgaactagatacttgaaatggcacttgctgtatttacactgtccacagagcaatgaaagattagtgcacttcaagcctttccccgcagct

SEQ ID NO: 2334 - DNA, 2643 bp, Cannabis sativa
taagctcctgtgttctgcttcagtacttgatcttgaaactgttctttgtttcttagaggactaggacaccaaattggggccaagataaacagagatgcctgatgtagacctcttatcataagggtctgatgcctattcaatatcacggaaaccagtgagaggcaatgctaaagcagatttgagatgaagaccatgatccaatgttcctctaagaaatctcaggatctttttgacaatcttctaatgagattttaatggagtttgcacaaattgagataccttgtctactacataagtaatttttggccttgtaacagtggcatattggagagcacccactgtgcttatgtataggaaaggttcagaaataggatcactcctaaaggctgaaagtttttcaccgccaagcataggggttagcaaaggatcggcatcatgcatttttacctttgttaaaatatcgtgtatgtacttctttttacagagatgaaaacctatatagtagtgtggtgaacttgtgttccaaggaagtagctaagatcactcagatctttaagagcaaaagaagaatgcagttgagtgatgaggaactgaataacagtgttagaactcccagtgacaattgtgtcatcaacatacacaagcacaaaaagtgtgtgttgatgagtaatacaaataaagagagaattgtctgctttggagcatacaaaaccaaataacagaaggattattttgagcttgtcaaaccaagcacgaggtgcttattttaggccatacaaagccttatgcagtttgtaaattgaattaggtttgcctgaaccaacgaaatcagggggttgtagcatgtaaccctctttagttatatcaccattaataaggaaagcattgttgaaatctagttgcttgatttgtcattatttagatagagcaactgtcacaataaccctaatggtggttggctttacaacacatgcaactaaaagtctcttgaaaatcaaagataaactgatataggaaacccttggcaaccaatggccttgtacttgttaatggtgccattagggttttctttgattcttagcacccatttgtagcctgtagctcttctccctttaggtaattttactaaagtccagattttgttctttactaaagcatgcattcagtgtccatggctttgttccagttcttatcttgtaaagctttagtaacatacaatagtataatagtatatagcaaagctttaggttttgagatgccgggtttggctctagttaccataagatgagtgttgagagatgtgggagcaggggcagggagaggggcaggatgaagtgcagtgtcgccagggaggggggatgaggtgtggatgtggaattgtgatggaagaggaataggaagtggagggagacacagatgaagtagatgtaaaaggagaaagagagataatgggatcagagatatgagtagtggtggtggtagacataggataagaacaggtgtagcagtatgcatggagtgatctctagtttgagacacaagaacataatttgacttagtagtaaaggggagagaaaattcattgaacaacacatctctagagatgtaaattctgcttgtgggagacaaacatttgtagcctttgtgttttaggctatagcctaggaaggtgcatttgatagacctaaactgaaacttatttttgttctagggcctgatgttggaaaaacaggcacaactatatacccttaaggaggtgtaatcaggtggtttatgaaatagaacatgaagaggagattgttgctaaagcacaatagtaggcaatctatttatgacaaaggcgttagttctcacagcttcatccaataagagagaggcacggatgtatgagcaagataggtgagagcagactcaatgaggtgtttgtgtttgcattcagcaacaccattctaatcatgagtggtgggacaaatggctcaatgagaaatacaaaattttatgagatatggttcaagagaatgatattcactgccctaatctgattgaacagactttatgaaaatgttaaaattaatgaacgtttgtaaagcttcaaattttactttcaacaaaaaaacccaagtacatctagagtatgcatcaatgaaatgtatgtattacttatatccatttgaggaaagaatgggagagggaccccaaatatctgtatgaatgagttgcagtggaaaagtgtaaacaattttagagttagaaaaaggagacttgtaattttacctttgcaacatgtttcgcagaaatcatgaacacttatattaacatcaaaaatttcacaagctagcatgatgccttttacaatttttgcagatggatgacccaacatgctatgccactaagaaaattttgaagaatttggtacattaacaacaaaatctgtaatattattaagaaagcataatgtagaagaagacatggatgaggagattggagaggagtgatgagcttaatgcatttgagatggatgaatgacataaagtccttggctaagctgaccctgcaagattacttccttggaagtctaatctttgacaaagtaatggttagggaagaactcaaaatagacattattattagaggaaaattaag

SEQ ID NO: 2335 - DNA, 2382 bp, Cannabis sativa
aataatttttccactatttttaataaaatatctaccaaatagaagtcattaaaaaataaaatgaagtttgattaatttttattcctttttttttgttgagaaggtattgaaaacacaagaatataaatgaaaaagtatgtaccacatatatattttttttaaagtaaacaccatttgggtagggatccttattttacaaaaattactaacataaactctttattttgttaaataaaaaattaaaccttgtaatttctaaaaaaaacacatgcttcaaaatggcatttgcctttttccatcttacatttaaatgatcttcgattcttttcaaaatttattggccattctacaaaaacaatggaaaaatcgttccattaaaatgacattctaatactttaaattgcagccaaacaaattgaataaaataaaaaaaaaatgattaatgtccatttcattaaccccaaccaagcacaacctaagttcacataagatacttgttgtcaccacaatataattttggcaacttaaaatcaagagaaatgctaaatatcactcttataaaatatcacattgccactagtataattcaatatcaagtcttattttattttagttataattatagagaaccgctaactatttataagatgctacctcataagaggtgctaagtactatagtgcttcataacaatactctaaaatcaaacaacacaaacttgcaacttaaatgtttttctctccaagtcaagttaaacaagcagacctcccacaatcatcaaaagccaagaaacacagaatatctgaccatgtaattattatttcagctagatgacatagcaatcgaagcaacagataattgttatgaaaaaaaaaaaatcaacaaaacgaagttactgcacatctcaagaacgatgcactttatataagtgaagaatgttgcaagagcctatcgacccttaacataaaaattcataagtgaaaataaaaacagaaaacaacatgaagtgttttaaaggaaaagcctttaggcaatgccggtcatgcaatatcgttctgtctggcttgttgcagcaattcttccctcactctcctaatctctgcttctctctccaatctctcttgctgtagcaataacaattacagataagcaaaatcctaacaagttccataattgaccagctaattagaggttaccatctatattacaaaatcactttcacaccaaaccaaattgattggaatgaaccaaatttcattattaagatgtgggcattataaggtcctcaacaaatttaaattgtaaagttcaaaactttaacatcacaaatttggcaaacccatttttctaattcccaaaccaaacaaaatccattatccaataagaatataaatgttaaatgtaacagttatcagatccaatcggaaacttttaacaagccagatgataaaactagcaaaataaaataggaacataatcaatctagggtttaatctgagaacgaaaaatacgcacgaatcataccaacatgaaaatttcaaattttgggtaaagcaaaacagcattcaaacgaaaaataatttaaccatttaaaagaatttaagaaatacaaaaagaaaatcaaaagaaattaaatgaaagggacgaaccttttcgtcttgatgaagagcgatccaaacatggaccttttccatggattgccagaacacgaaagctccaagtgacatagcgaagtaggtcgctaccttcaccatcttcttcttcttccttcttcttccacaaacgacactgaatcaaacgcaggacttcgatgagtaggttctgagaacagaaagaagaaaagggttaatttttagtttcctctaaaattatatggtgcagccggaataatgttctttcatctacaactctatctcccgcttacacgtggccgtaagcttgaccaacttccattctaaaagaaagcccactactttttttagaccaactttcttttggatttcataaatatacaaaaatactaaaaattttacatttttacagctgcttttttaaaatatatatttttacgaatttattttgttttctttttaataaaaatattgcgtgttgttttttaacaaaatattattttaaggttgctgctaaaagaagtaatttgatttgtttttacaactatatatatagtgttttttttttttaagaataatatatttttaatattgccactactagaaagcagcctgaaagtaatatttttattggaaaaaacatgtgaaaatttctaaaaaaaaaaatatataaaaaaagaaaatcgtaaaaatataaaaaaaaatagaaaattatctaaaaagaaattcatttttaagtatattatgtaaa

SEQ ID NO: 2336 - DNA, 1823 bp, Cannabis sativa
caggtatgttgttaaagatgtccttggccatggcacatttgggcaggtggcgaaatgctggatttcggataatgaagcttttgtggctgtgaagatcattaagaatctaccagcatactatcaacaggcattggtagaagtatctcttttgagaacggtaatgatgttatcactttaccatatgcataagattgtgagtatcaaaaactgtacttataagtttgctaaacgtgttttctgtttgcagctaaataagcattatgatcccgaggataagcatcacattgttcgtatttacgattactttgtttttcaacgtcacttgtgcatttgctttgaacttcttgacacaaacctgtaagtcattaaatcccttgatgattagaataccaatattttttatttgaaccatattccagtgtatcttttctggtccaatatattttgacaatgttattcaggtatgagcttatcaagatgaatcattttagggggctgtcactgagcattgttcagttgttcggaaaacaggtgtgatagttattggtgcaaatagcatttattctacgctgcaatttttttttcttgttgctgtactaattgtctatgccttccagtgatcttgaatcttacattttgtaatttcttttttctgctttaagtagattctatgtggattggccctgttaaaagatgctggaataattcattgtgatctgaagccagaaaatatactcttgtgtccaaggtttgtactggcaataatgcagcatggaccatttcttaagaatatatttttattaacttgatttctgtcttttaacaacagcagtgttaagccagcagaaattaaaattatagactttggatcagcgtgcatggagaatcgcactgtttactcctacatccaggtttgtggctacagcttaggtttctgtacatctatattttgcagagcagagtcttacatatataagttcttttttcatgcagagtcgctactacaggtctcctgaagttgttcttgggtatcagtatccttttaaatatttacattttgttctttgttatacgcacgaatataactgtattgggtgtcattgtacactacgcggttaaaacaatcatcctgaagaagacgaaagatctacaactctttttctaactacagaaattagagagacgatgagcacatcaaattttctgggtgatataggttttattgtgaacattgggaggttaggtttagagtaggttaacgaactaaaatctcagaatttctaatttataaattggaattgattgaaaggactacggtcgtcatagatgagttactgaagagttgattgtttaggacattgtttgttatgtgtttgtagatagatgactgaaggtgttatctttaacatttagtgattttgtaagtaaccactcctcacttttgctttggcagatctgtgggttggccgtcaaaagctagaggagctcttgtgttaggtagccaaacttgcaaggttcgtgagtagtctatggcctttgtgagttgggcttcacaaccctctagccaaaagaaacactgagttgcaatatactccctccagattgtgggattcatttggcttgatgtaacattaccaagatgcaaatggaactatgtctttaatgagatcaagtatcgataaaaaaaaaaagaatatgtgatgataataagtgggtttgctgggttagtgtgttgagtagcctgcattcaaattcttgcaaatgtatcctataaaattacaagtaaaaatgaagagaattaatgagtaatatgatgatgaagg

SEQ ID NO: 2337 - DNA, 793 bp, Cannabis sativa
ctcaggagggttcgtgcggtcatatagctagggaggaggccaggcctagaataaggtaaaggaagaagtaaagtactcgaagctttcagatctggtgcgggtcccgctagggcttcatgtaggacacgtggcgccaactatgtcagagattcgttggcctcgtgtgacgtgtcacggtggcgcgtccgccaaccggaggaaaagggctggttttctcggtgggaatggtgctgactttgctttcttacccctgttcttgggttatatatatatttagatatttatatatgcatctccaaattaagaactggtactagaaaagagttgtcgttttggatttttattgtggtactttttggtggggtttacattttctggagctttcctccaatgccgaacaaaaaaaaaactggactctattcttgcagctacaacgtccaacaactaaaaataataataaaaaaatcctatctttctctctgtatcattgtttaattaacagaaaagacataatctttgttcacccaaaaataataatatatgattggtgaagaaaacaatttaataataataataaaatgatctgatcagacagaccgcaaagtttagaaaagttaagagaaaaacttgtggtgtgatcaagatgtgcgtgcacattaatgtgtagattttattattattacattgcaaaaatagagatgaaatttaaataaataaaatattttggagcttttaattgtgtagtatgaattaccagcttatagttatacttctacctttctaatttcatttg

SEQ ID NO: 2338 - DNA, 939 bp, Cannabis sativa
taagtggcaatttacttaacactttaacagctaaatacctacaaaaattttataattataacttaatatactattatctctaaaaattaaccttaaatatttatttataataaaaaattaaacacaactatttataacataaattactaaaaaaaaaaaaatggacaaataaacaattgtcgtttttgtttttatttgttagaaaaaaaaaaaaaacagttgacccaatacaacgtgatttacacgtgctattcgagaactttaataaaaggcaccaccattgtcataagatcccaactacaacatatagtcatctctcttagctcagagacagacagccatattctccgacaccctcaaccacaaacgtcgtcgttttgactcttgtatggtactttcacgttgaccaactcattttcttctcaaaactccactttctgctgctcgacatgttatcattgaaacccactactacacctctcaacaacaaccccaacatctccggcgaccggagtttcagctcgatctccaccgccaccgccgggaaagatgaagaccttagaagaaagacccgcgtggcggtttctgggtcgaaactcaggcgacgtgggtcggttcgggctgcgattagtagtggggacaacaaaacagacactgtgagtagtaatagctctgttccggctcatcagagtgaagataattccaacggttctctgaagaagaagaagccatctaaaggaattgaagttagagcagtgatgactatcaggaagaagatgaaggagaagctcgctgaaaaaatggaggatcaatgggagtttttcgttaatgggattggtcaagggatccagattcaactcattagtgaagaagttgacccaggttaaaaaaaaaaataaagattaaatttttacatcattattgtgacttttttttgac

SEQ ID NO: 2339 - DNA, 2960 bp, Cannabis sativa
aattattcaaaaaaaaaaaaaagtggccgacaaagggacaacttgatttcgtggactataacatcaccggcctctcaaccgtccacgtgttgtcaatggactgctacgatccctcgtctacgtccgtacggtcctgtcaagtgtcaagctcccgttaaaacctcaccaaatctctctctactaaaatttacatctacggtcactagtcgctatatcagcgggttattttcgtctttggagtgacggagtggtcatcatggttattctactcatagttgaggttaatttggtcaattgcgtacaaaaatattaaaaaaaggataggaagtttattgagaaagaagatatgtggggatatttgtcagagtttcagttaagaagctctctttcttctcttcatctgattttccttacactctcttaccactcagaaacgtacgcacgatcaaatacaagagaatttatataaatatatatatatatataaacatataataaaataatatacaaacagtgaagtaaagctttcaaattcgaccactttcgcaaatcgcaaatcgcgaatgtgaatcttattttattgcttttgtcagataaatagcggggaaatttttggaaatgcaagacgttcactcgatcggagatgggggaaggtttcacgcgggtagcggcggtggaactggagcggcttcagaccggaggttgaggccacaacacaatcagactcaacagcaggctttgaagtgtcctcgatgcgattcgctcaacacaaaattctgctactacaacaactacaatctgtctcagccgcgccatttttgcaagaactgtcgacgttactggacgaaaggtggtgtcctacggaacgttcctgtcggcggcggttgtcggaagacaaagcgttcgaaacagaagacttcgtcggtgtcggtgacggtaacgacagctccggtgctaccgccgccgtcgcaggatcggaaatcaaactctcactcaagtagtgagagctcaagtctgacggctacgaacactaacgctgcgaccgaagcggtttcagcgccttcaacgagttctggttcaaatttgctcagtgttaatcaggaatcgaaattcttcgtttcacagagtacgaatgctagcttcgaggcgtcagcgttaatcgatcaaagcgtttcggattgtggaattttctctgatattgggagcttcacaaacttgatcacgtcgtcatcaacgggaggaggtgcattggaggctttcgaatacacttccatatgcgatatctcgatctctccgttcaggttgaatcaacagaatcaagatcatcatcatcaccaggtttcacagagccagacatggcaacagcaaaacacgaagacgaacgtggctcctccggatcatgatcaattgaagatgcaggagatcactggtgggttacttgatcagacttcccaagctgatctatctgttctaaaagatagatccaatggtggggtattcggatccttgggagattggcaatcatgcggagatcaaggtatatttgatcttcccaacaccgttgatcaaacatactggggtcagagtcaatggaccgatcaagaccacactagtgtctatcttccgtaaatctctcacctttaacttttcatttttaattattattattattataaaaaaaaactctcaacgtctcatattaccaaacaaatctaaatataaaaaaatcagaaagaatttttttaagcaaaattatgaatatgactgctttcgtatgtaaattttaaaaatatttttttgttttattttttcttggtgaacttggggttgatcttgttaagtattttatgtaagttgtaactaactggcaacgttttttttttttttcttcctcttgtatttctaagtttattattgggagaggggagagttttgttgtctaatgtaataatgtattttgatataaaagatcagtattaatattaatgaaatatagagaagaatatatatatattgttttatcaatttgtcaagatgtatttatttatttgttgaagataagaataatcactatttaatttaatatttaatcaactctcataaactttgttataaaacggtgtaattagatttagtgggctttaaacactggcaagtcaatcacaatacataaacgtcaaaaccaccacgtcagcagtcggttggaggcggtgcgtgtgtgtgtgcgggatgagtgggtcccatgatgggtagtgatgagtcccatgcgcgattatgactcgtcgtgcgtttgagagggagaggagtttaagtggggcccataaacaaagcaggggcattgttctggaatccttgtggacacgtggctattcctaattggttgaacggttagtgagagagagggcggtttgtctttggctcaatcctcaaattgttgttgttgttttatgatctcagtcacctcactccaattcacggtggccttccttagccagctacaactactctcctagtagacaatagtagtagtaagaataagtaagtaattatatcatgttaggtttcgcactctttgggattttgtaatcgagtgctgatcgtgtgaaatgatgacgatgacgtggcgatatgctcgtgggttttgcttgggtcccactcgttaggtttgggtggagtggaggtgtgtgtttgtggggcccatttagtgaactgagtgcagaagtggtctcccttgaaagtcatgcatgttggcaatagcttgagttgattttcttgtgagccattggggcgacgtacctataatgcaaatggccaattggtggagtcttcccaagatattttgagaaaaaaaaaagagagtggattatataaatatatattagtattcatttaattattacaattttatagtagagttatggtttgcaatgtactttgtgtaataaaaatttcacaactca

SEQ ID NO: 2340 - DNA, 979 bp, Cannabis sativa
ttcacatcaccatctttcttcaggaatttctcgcttagacagttgtaaagttgagattgaaaaccatatttctttacaatggcagaacaggctagatggaattccttaatctatcaaaagcactgtcaacatagttcaaagattgaactcattcacttcatcacttattcttctattattagtttttattgagaaaaatcataataatttgtaataatatgcattgaaaaaagaaaaataaaaaaaagaacctatccaaacatgttttaagctttttgctttttgaaaattgtttttagaaaacagtcgcgtcattagattttaaaaactacaaaacacggtatcctattcctacttttaaaaactgaaaacataaaacaatgccagacaggaaacaaaatacttccaattccgcttgtccaaaaggaaaagttattaaagaaactattgttttgaaactcacaaacaatcatataagaatttccccatctccaagaagcaaacgcaaccattttatttgaatttgcaaaacgagtcaattctagttttagtggtgggggcaatttatatattcaacgtggccaaaaatagaagttttgctaaaagaaacaactttcaaaactcatgatccatccacaaacaaaattggttatagtacttttagttgataagactaatttttgcaccttagaagataaccaggatttcttatgtgtctagtgtcttactcaaaaatagcttaagttgtccattttgacaccataacttgagactaaaatcacaaacccagaatatcaacagaggcagttaggttggagcatagaaacaatagcttttgtctagtctaatatcgactcgttgatcaggggttagctaactgaatctagaatcctaggattgcctaaatgttagtattaagacccaaccaatatatccgttagggtgtgttcgttgaatctaaattccttaaacttatata

SEQ ID NO: 2341 - DNA, 917 bp, Cannabis sativa
acttggtagaacaaatgcatatatacttggtagaactagtaaggagaactagtaaatatatgcgttctgggtgcagttccatggcctgcctacgcgtttcctggcgaatgaaaatattcctattctggcaaaaaaagttggtcacttagtgaggaaggaagagaaaaagaaggaagaactagtaaggagaggttatctgagaagtaaaatagagttatggttatctcatcctttcccatctggtttcttcctcaaggcggacggcaagccagactcctgggttcaatttaaatacgaaaagcttccccccctctgtttcagctgtggaaggcttgcacattgggataaggtgtgttctgaccagcctatgatggtctactcaaaggttggtccagcagttccaatgtatggaacttggattaagagtgaaacagggagtagcaattgtttcaacatgaaaggaaaggggtcggcccaactgatttttgaaagggaggaggtgccggaatgggatttgagtagaaggaaagaaagaaatacgtggaaacggcaccccaaagtgacggaaaaaatggagaaaaactccggtgacatcgcggtggctgttcaagaaacgggggaggagtccggcaaggaaaagggcaaggtggatgatagtacagtgacaggtggcctcaaacggaaaggtgtgcaggagggaacgtccactactgtgtctggtgaggtgtgtacgggggaagaatgtggaaggacaggtggaatatccgttagtgatgattttggaggaataaatgttgaaaacgtggggaatagacagctgaagattttgaatattgagaatgggcctaattatttggagttgcctaacccggatttctctttaggcccagatggagaagaaaggatcccggacattg

SEQ ID NO: 2342 - DNA, 1200 bp, Cannabis sativa
tatctcccggcaactgacaagcggaagcctatttgttgacatggcatacaaaggaatggagagagccaccgattttaccaaagtagtgcgacccacaaaggataacaactttgtcttccaaccttcaatccttctcaacaccttttccttcaagaacaaatactcttcccgcttcctccttttaaacacgaacggattttccaagtgtttttcatggccttcacattctttaaccttaagcacattcaagatattctcctttagggggttccctacattcttggagaaaagaacgctaggtttagccaagctacatctctgcccagaccagaattcatacttttggatacactccaaaatcatagtggccattttgacatttgctcgggtaaataagatcgtgtcatcagcgaacattaaatgagtaactcccgaggcagacctggaaatagcaactccgtgaagatgaccatttacttgctgtcttaggattaacttggacaacacgtcatgacataacaggaataaaaaaagagacaaagggtcgccctggcgtaaaccccgagaaggaaagaacttcttttgagggactccgttgatcaaaactgaataagaaaccgaccagacacatttcatgatcaggttacaaaccttctgatcaaagccgtggccccggagaacttcaaacaagaaattccactccattctatcataggctttaagcatgtccaacttgagagccattaaaccaccctttcctttcttattcttaatagtatgaaccagttcttgagttaaaattgacgactccgcaatctaccttccgggaacaaaggctgattggaaaggggaaatcaacttatccatcactactctcaagcgggtagccatgatttttgagatgattttatagccaaagttacataggctaattggtctgaatttctccaccgtacaagcattctcctccttggggatcaagcaaatgaaagtatagttcagcttaccgtccagtcggcccgatctgtagaattgttggaccatatcaatcacttctccccccactatcttctagtatcttctgaagaaaaaacccggcataccgtcagggcccggggcctttagaggatgcatatccgcaactgctttctcaatctcttcaatcgtaggaatactttggagcatagtgttttcttctaa

SEQ ID NO: 2343 - DNA, 894 bp, Cannabis sativa
tatatatatatattcatataaatttgtagtactactctactgcaccaagtaagtatgtcaaaatacacaagtgtgtgatcatcaatgattgatgaattgcatcggacggtgtgctctctctttttttatctttggcaaaaataaaatctaaagaattaatcttttagtggtgacaatatatattatgatcattatatcatatcaagagaagaggcataataattagctatatatatatatataaaaatattcttactggatcacacgtgtatatatattttcatatatagctcaattttaagtagagctttgtatattggaatcaaatccaatacctaagtgaagatctaaggatttacagccctgttttattggagcagtattagacaaaggggaaggtttgaagattacagaagtagtagtcatttctggtggtgcagcagcatgagcatgtgtggttaaagtgaacttattaaatgatgatgatgatgaagacgaagaagatgtagtgttatcttgttggaaatggacattactgcaaggtggtaaagaataccatttagacaactgatgagacgctgttgctgcttggtggaagtgagaattgtccgagtcgaaagggttgaaactaatttgctgagattcatcatagagtgtgaactctgaagcatatgagtttgaatcaaaaaacaatggagtagtattatgatgatgatgatatgaaaaggcagctgggttgttttggaaaggttgaagatagtagttgatgctggccttcctggcttgaagttgcaaccttttcttcttcattctctcctttttatgagcattttgatggcctcctaatgcctgagaattagcgaattcttttaggcaatattgacactcgaactt

SEQ ID NO: 2344 - DNA, 1865 bp, Cannabis sativa
caaaagggattaggtgaacctgaatccaaagaggaataaagtttacttgagaaggaacaacagtgtcaaattcatcaggaagagcaaagagaataaggttaagatcaaaatgccacggttgtccttccataacacgtctcctatctccttcacaaccaaaacgcaccagaaacataccagaatggtagtaagagaaggagaaagggcagcgaactatccaagcatccttcatggcattggcaacccagtcagctttgatagttttaggggtcaagattttggcaacaaggaaaaaagattgaggggatgcatcaaggcgaaccgagatgttgtcaaattcatgaactaaagcttcttcttctgtaagattaagactttgttcatggtgatgagaggagatactcatggctaggggttggtagggaattgtagaaatatagaacaggaaggaaaataaagagtggagaggtatagcagtaatcccataaatggttaaccttaaatagacaaaaaaaaagagaaatacctggatgaaagaggcttcattacgaacctaggagaacccggattaggccatcctagccatagctctgcacttggaagagaagatcttttactgcagaatatcccaatagaagaaggatcgacgggaattaaatggctgattggatggtagaaaggattttggccaaagattaaaccctgcatcaataaattgaactcgagaaaagagggattagcagccaaaattaaatgcacattaaaaaagatcatctttgcctcttaaatcaacacaaagagacaaaggaagattgctgaggagagaggagaatggtatccacaataaatgcacagaaatgaaagggaatagaaagattaaaaaacgagaaaagaaagcaaaagattaaaaaatcaaactagaatatgaaaccagatgaagaggtagagcaagctggagaaaatctctatttattatgatagacttgatagtttacattaactttgaatatgatgatgatattatgagtttatcattaagtttacgttaatttatttaattgtcatattatgataataaaatgtattaatcaaatgggtaggagttatgttaatgaaaaggaaattaatacaaaacatgtttttatattggagaaaatgataagctcaaaaaatattagaaaaaaaataaattaattttttaccccaaaggtgagtatcatgatcgaataatcctaaaaaataccaacaaacttcctttattacaaatatagaacccttagcatttatattttgcacaacttatattttaaataaataatagcaaaacatttcccatgtacttgttgttgttgcctccattctttaaaaatgattatcaatttgcatttctacactaatgagagtgggacaacaatctctaataaaaaaaaaaagtatatatatatagtaagatcaagaaattatacaaatattattttaatttcaatgaatcatgtcaatatttgatgaggaaaaaaagtatatagtatgaccaagaaattacacaaatattatgaaagatgaaaaatgagaaactatctaatgttacactaccctatatatatgtgtacataacacaaataaaaataattttatttgaaattaatatgtttaatttaaaatatgtatttacaaacatatattaatttataaactcactattttttttcacaattgtatttgaaagatttttaactaccacctctaagcatatgatgacaaacaataccaagtaaaaaatcaaagtattcaaagtcttacagctcattctattatcattcttttttttctttaaaagcaatattaatttatattgtatgtagaga

SEQ ID NO: 2345 - DNA, 2121 bp, Cannabis sativa
tcaaaggaatattatattggcaaacagatggtgacaacattctcacatttgatttagacaaagagttatcttggttgatatcagtaccagttccagctgcagaattcaagaccattcctcaaacatgtattggtgaatgtggaggacaacttaactatgtcatgatctcagaagagggacttcatctatggtgtctcgaggactctttcgagtctgaatggacacttaagtattggaaatcgttagagatgatggaaaaagagtttccaaagctcttctacaacttacgcggacgagtaatgcaagatgtgagcatttgtgacactccatggatgaatcccatggctttcaatggtggaattttgctgctgagagtttctgccaaaatctatttgtatcactttgaaagtggtaaaatggaagtggtttgtgttgctcctaagttgggtttgagtgccatgtttcaacctattctacttccttattccatgagcttggttccactcaagtaactgacattaactaacactacacattttgttaggtttaaaccattttggttacaagttttatatgcttttagtataaaaaggtgacaaatgtttttgacctctaatgggactgttgtatcaaacacatgctattaaagtagttgttaattactcaattgaccaaaatttaagaaaaacttccaaaaatactttcattttacattttggacttttttatagtaaaaataataaaccgtttattttggttgtttcataattatcatgagattaatttctcattgaaacaaaatgtatttttgtaaataaaaactttaagctataaaattgtaaataaacattaaaaaaaaggtatttatgaaaactcccccattgaattttccatattttgccacaaaatttgttacaagaaaatcaagcttgaactaatggaaaaatctttcaaaattatagataataataatctaccattgtttacattacaaggaaagaaagacaaaaatgaaaagagagacttgtttgcaagccatgaaatcttattataaatataaaagaaaggattttaatgtgttgttgaaagctgaaaccactcttcttcttcttgatatttttacttctgcaaattatatactactggacctttctttatgagcttccaaagtgcagcttttgcttcttctaatgtctcgacggaatgcccttcatcgaacgaaactctctgtatgttgaactgcatacgataatcgaaatcaaatcaagttacaactatacaaggataaaacaaaggacattgcaaagttatcggtttaaacgaaaagactattaatacctgtgcaccttgacgaacccgaacatcggttcctttgctatctatagatatgagtgcagcatcatccacttcagtttcagcagataacagttcttttaaaggcttcgaaaatattgcattgagttcctaaaaaaaaccacaataagaaacaaaagactcgtaaaaagaatgcatatcgcattagaacaaagtatgaacctttaggttctgttcgccaccatcaactgcaatcttatcgggctgaatggcttcgtattccttgacatcgacccaagcaacagtaccaaacccgccaatgaaatatatgtcactgccagtaaggaattagcacaattgagtcctaaagagattcatttattgaagaaaactataaaaaccgaaatgtgaatactacagctcaagtcatgaaaccgataaggactgataaggctatgccacctaaatctgagtacgtggaaatcgagatgtaaaccaattttgaactttaaaacgcagtaaattgggacgtaaaatactccacttcgggaaaagcaaagatctaatggagttgaaaccaatgtctgattaaacatgttagctatgtcacaacaattgtttgtgtcaaattcaatttccctcaatcagcacaagtaaaaaaaaactaggcttgattataatgaagagtcaccccacgatttgtctcgacaaataaagttcgttcgaaaaagaagtaaagaacaaggtattggtgtaaacggtttttcccactaatcaaagttcattaaacagctgagaaattaagat

SEQ ID NO: 2346 - DNA, 621 bp, Cannabis sativa
tatgggcccatcatttatcatcttgtggaccgtacgtgctgcatgattcagagggagggaccgttgattcttgtcacaccaccaaataaagttcactctgatggagcgatagagaggttatccccacgcgacaatacctcaacttggattctaacattgaaagtcatcatatgtatagataaagtgcagcagcatttcatccacctagactcggttttttttctcttagaggtatatattaagaaaaaaaatatgaatattgtataattcaccacgactttgccaagagaaagaaagaaaaaactacgtccctcctatgttgcattgactcgttttatcaaatctactcaattatttcaaccttcttataaaaaaaaaaaaaaaatcttctcaaagtattcctcttattgttccctactgtctacagaacaggtagaccaaaacttactacattttgaaagttgaattgataagtccttaacctaattaatagcacaataaaaatatagaataataattggattttttttcaaatttaatgaatttttgaccaaatgagagtgtcctaatatgtgtaaaatagaatgagtactatatgttaggactgaacattttgagtgg

SEQ ID NO: 2347 - DNA, 955 bp, Cannabis sativa
agcattcttctcactttgcttaccgtcaagaagaagtgaagcatcacatccctacaataatattcaatagtttttattacttatgatataaatatattttaagaaaaaagtagtgctaaggatgttaaatagtcctacattaataaaaatattgttattattaaacatcaatagtgttcaacaccactacgaggtgttgcctttgtgaatgaacgactatcttatatagtcaatattctattatagttattaaattaaaatatgtgagatttgatacttaattgtacccataacattatgacatctcgtggtagtattaaacatcaatggttactttcaacatttttctatatactagtaatgtgtgagaacttaatgaggtgtcatagtgttattggtataaaatattgagttaataatgaatattattattaggtatcactagttatcaattttttataagaatcaataaattaaaatatgtaaaactcgatattttagactaataacaacataacactttggtggtactatgccctagtgatgctctttagtaattttagaacttaaataccatataagtgtataaactactcatccactcatgatgttgagccagggtcagccctaggctaatgcgagctaggctcatatatatagggtcacccaatccaggggcccaaacgaataaaaagttattttaaaaatatacatatttataataaggattcaaaatttttactttttcgaagattgaatacaactcagggctgaccctatgttaaacatcttaaagtgtcaaacaacaacattctaaatataattggaaaaactaaccttaacaaagcaatcgtgaaactgcagacgaagaagtgcagcaacaatagtaggatctttagtgaaagcagctttaacaacagttttgacggttgcctcaacattcacttgtgttgtt

SEQ ID NO: 2348 - DNA, 2174 bp, Cannabis sativa
taaatatggtgagacatatgatagatcccatacaaacggtgtcgtattgcacatattgtcgtttggattaggttggtccattccattgttgtttttgttcttatccactcaaaacgactgaaacctcaactctcagtctcaactctcaactctcaactctcaaccaacaccaacggtcctcgcttcagtcttcatcttcttcctcccaatgctactctctgctaactcaaccctaaatcctcttctctccaatttctcaaacccagattctgcttttgttctcccttctaatcctcacaagctttgtacctcacctaaactaactccgcgaagacctcttctttcccccgtaaactcttcttcttcttcactccaaaaccctaactctcttcgccacgtctccgacaatgaggactccgatgaagcctcgtctctggtatcttccgcctccgccgttgcctctgccatccgtggcgtttcgacttcccccgtcgacttcgttcagaagattgagaagaatcccaaaaacggattggtgctcccaagttcagattttcagagactctgcgttgagcaattggacctttttcgtcgaatcgttgatcgtgaggcctttctctcggtaagtttgggtggatatttaagcttttaataagtatatttgagaattatattactggaatttctgaagtatataatgtgatataggtatatgtaagaccagctggtagttacgttatggatcgtctagagctgcgtagggttactgcttatcctggagtgaatgcagctgatgttgtgatattggttggtagttttggcatccccgctggtctaagagcagcagaagctttactttccaatcaagaagtatgatagttgggcctttactggtattaatgttgtatatactacatgcttaaccaaaattataatgtgcccatttcttattattgatatttattcgattgaatgtttgaattgggtaggtggaatttgtacctgagtatagagctgcagtttttcccatggttaagcacccttttgtggtggggttcttggttgccgaatttcggaacatggaaatgccaactcaagggaacgagcagagccaaaagagtgagcctcagcagaaaggttatggtttttctttggactctggctccaaatcatgggatattcagactgtgaaggaggaatccttcaaagtggggaagtttactgcggagcagatatcaaatgctatcagcatttctcggtctttggctatggcttatgtgatggatcaggtagtttacaaagttaattggattcaaattgaaacttatgtgcgtacttacataacttagaccaggggtagctagctcaaatggtgaggcgttcctgcttgggtatttacctagcaattgctatattgtaagggagtctagtttcagaaaaatgttacctacttacattttgtggtcgttaagtcttaatttaattttctactaatttggaaaccaagaattttataacagtccaatgaaaaagaacaaacaaatgattttgttttttttaacagttttgggtaatcatcatgctcatattcctaagagccgttggtttcagttatcataacatcccggcatgtcactaaattatatgctcttagctggagactggtttatgtacacctgactttgtttgcatatataacaatcttgcttcattcttctgcagaaagcaatgctactccagcagtcctcatggcaaaataatgtcaggatgagtgatctgattgagcaagtaagtgtaagacatcttctgcttttgatatagcgatgaatgagcttggaattttaatttactcttcgttttatatactcccagattcgtggtcctctgtctagcattcggactttaagcaaaatgttatctcttcacacgaaaagaggtgaggtgagttaggtttgaaatcttactgtaacccagaattagcttactattatatttttcaaagaaaaatctctttcattttctgttgccttaatgctggaagtttggctatgtagatatctaatgacattgtcgaagacatattggtgcaaggtgatcacatgaaggatactctccaacaactccaggatgctgttcacctgacaaaggtggatttgtctgtgaacataaactct

SEQ ID NO: 2349 - DNA, 1193 bp, Cannabis sativa
tcacaatgctttagtggaagcatttgaatacgagttcaatttcaaaagcaagccaagtaatcaataatatcacatagatcataatattgaacatgcaaatgtagaattattctaaccctaacaactaacggaggggtccaagacgtacctcgcaggcttccttctccgatagggcgtccctgcttgagagttgcactggtgattgtgtcattgtagttaggaacatcatcaatgccagcattactgcaaaccaagataatttcaatatttcaagaatagtgtcaataatctcattagccattaaaaaaaagcaaaggaaaatatacttgtcaaccacagaaagaaaactcaaacctgggggatgtgttctttatatcagctgtctgcaaagaagcatctatcgggtttgtacacttatccggtttttctcctacattagcatctatgttttcagatagcaacgagcatggaatagctctattttcaaaaccagacgcagaccaatcaattttttcagatggtaaattccttagcatctcttcagttgctttagcacgcactctctgtatttcctcttggatgttccaagaccccgtgttaggggtatcccatttaggctgtgttcaaatttcaaaaagtaaaccgtgataaatatagttaatacagaagtggtagaacaaatacagtaaatatctcaattgtttctttgagagaacgtttcagtacattttaatcatcccaaagaaaaagataaagatacaaaaaatgcataagaatcaatgctcaatatggtaccttagatgacgacaaagcattaccatcatttgaataaggtgttttctcattaaaaagatgtgcacttattggtgatgaagatttgatctctctattgttgaaggtaggagatgcccattgtggacgtgtgcgcatatacactttggccatatccactggagaacccacttcagcttcaatagcctgcaattaatcagatcgattttgcaaatgcaaccaacaatattatactagtgcgaaaaagctatacagattccacattgatactatatttcctattttgggaaaggaaaaaataataataatagttaacagattatatatatagctcaaatactatccaactgcaagaatgtaaaaaaataataatgatatgtacaatagtatctctaagcttt

SEQ ID NO: 2350 - DNA, 2859 bp, Cannabis sativa
agagctcacctgggaactttgggaaatacaaaatggttgataaaatttctctttacttttttaagttagtgttttaaccaactaattcattcccactcttttttggaacaaagtatagaagtatattctctctgtgatcttttcaagtttttattttagtattccagcattccaacattctcagaaattcatgtttttaatgtgcaaatttccaaggaaaattttgatggcacatattcatcttccctaaatgaaattctggaaataagactgagaaactattccgttggaaatttaaatgtgtgtgcattgaacacgcagaattttgacagtcattaatatttcctttctctggtatgatacagtttttgattgttgcttctccactgacgtgttggaagaagatgaatacaaagtgtacttgggtggcattgtcccgcagctacaggattactttcctgatgcttccttcatggtttttaactttagagaaggggtgaggcgaagccaaatatcagatgtattgtctcagtatgacatgacagtaatggattacccgcgacaatacgagggatgcccacttctaccgctggagatgatccatcacttccttcgatcaagtgaaagctggctgtcattagaggggcagcaaaatgtgttgttgatgcactgcgaaaggggtgggtggcctgtccttgctttcatgctggcaggtcttttgttgtaccggaaacagtacaatggcgaacaaaagacacttgagatggtttacaagcaagctcctagggaacttcttcacctgttatctcctttaaatccacagccttcacagctgagatatcttcagtacatctctagaagaaatttgggtgctgattggcctccatcagacacccctctccatttagactgtttgatacttaggctcattccactttttgatgggggaaaaggttgcaggcctgttataagggtttatggtcaagacccttcaacgccagccaacagaagttcgaagcttctgttttcaacaacaaaggcaagaaaacaaattcgcctttacggacaggtactaaatatcacaactcaatctgaaagataaaactagcattaaaaaaataaaaattaaaaatattcttatgatatcgaactgcaggcagaatgtctgttggtgaagatcgatatccattgccgtattcaaggggatgttgttcttgagtgtatccacttagacgaagatcttgtacgtgaggagatgatgtttagagttatgttccatacagcatttgtgcggtcaaatattttgttgctaaatcgtgatgaaattgatgttttgtgggatgccaaagaccagtttcccagggactttaaggcagaggtaggtattactattcttctgtggtttctttttgtgaagctgttggagttgaatcatactcatatctgtatcaggtactttttttggatgctgatgccgttgtccctgatatcaccacagtggtggcaagtgaagatggaaatgagaatgaaagtgcttcaccagaggaattctttgaggtcgaggagatttttagcagtgcagtggatgggacagaagggaagggggacttggatacccctagaactcgcaacaccaggccagaagagttagttcacaaagaagtttggaaggaagattttgatcctcacactttccaagactgtccatcagatgatgggaactacaaactagataaaaaggtggattctaatatagatgctgtaaaggacattgctgtggatgatgtgaaatataagctggatgataaggtggactctgatattaatgtagttaaagacattgctgtggacgagggagatgccaaaacaaatgcaatgttggttactgaagaggtgctgagacatgccataaccaaggaagtgaaagaagatgctaatggaaaattggaagagatggacaatggaatcgatgaagacgctgctgtggaaaagaagttggattccaaggtttcacagcaaaagtcaagtgttgatatcactaggcaaaaatctgacaaatttcagcctgtcactaggaaacagccaacatcaaacacaaaatcagcagcagatacaagtgtagcaaaacacaagactaagcagcaagagtctcagggtaaatcagcaaagccagcagtatctaggtggatacccacaaacaaaggctcttatgtgaactcaatgcatgtgtcatatccaacaaatgcagtgcatgtatcatatcctccatcaagatataatagtgcacctgctgctctttccagctcagctacttctaaggagtctaattcaaatacaaaatctagggtggcttccctgagttccattgtcacaaacgtggcttctaatgatctagccaatgaacaaaaaattcataaggtggataggataaagcctttagactctatccaaaagaagcttgcaccaagccaggcatcttctattcaatcaattgaagagactgcttcattatcccctgtttcaacatcatccttgtcccctgtttcaacagtgacacgtgcttctcaacaacaaatagtacatactccccaacctaaaacagttgtgtcgcctcctccaccacctcctcctcctccaccaccactgccacatctttctaatagttcgttcgtgcatatactttctagtaagtctttaacattgtcttccccacctttaagagtagatgctcctccttctcctcctcctcctcctcctcctcctccacccccacctccacccccattttcaagtagcaacacatcttatgtaaagccatcacccatgtccttggctccacctcctcctccaccaccacca

SEQ ID NO: 2351 - DNA, 1482 bp, Cannabis sativa
ttatcaataagatattctgttaaagtcaaagtagaaaccaaaaaaaatatctttaaaaattcatctacatagccacactttttatatactttatatataatagaaataaatttaaaattaaattaaattttatatatttaaaagatataattgaattatattagattatttttaatttctattatgtaaattaataattaaggagtaagaactctataaaacaacttttaatgcaacatacattgttactataatacctaatttgtatatatatatctaatgaaaagtcatgtcatttcattatattttttttagatgtttatgcaatactattataatgttgttttttatattatatatatgtagtaatgaagctgaggcgattcataagattttcgactctatacgagaaaaattaagatccacatcttcatctcatcataatttaaagcatggcattgttggaattgacaactcaattgcagatctccacaaactattgtcaaattctcgcatggtaggcatttgtggcatgggtggcctgggtaagaccaccctagctcaaattgtcttcaatcaattatgtcatcaatacaatagtcattatttttttcaaaatgttcgagaagaataccaaaagaatggatcaaatctggaacttaaattttttcgtcaattatcaaacgaaaaatgtaaagatttggtttccttaaaggaaaggctgcgccataaaaagttgctcatagttcttgatgatgtggatgatttggaccaatataattgtttacttgaacatagtcattcctggctaaactctgaaagtagacttattataacaagtagaaatcatcaagtgcttcggaatattattggcaatgatgagtggatggtatacaacttgaagggactaaaagaggaggatgctcttgaactcttttgtttgcatgccttcaaaagaaaatcacctgaagaaagttacaaagagctttcattgaaatttgtgaaatatgctcaaggccttccactggctctcaaagttttgggttctcatttattttcgaaaagcaaacaaatatggcaaagtttgttaagcaatataaaagaagatgctgatcaaaaagttacaagtaaattaaaaataagttttgatgggctagaccctaaacaacagagtatatttcttgatatagcgtgtttctttcaatgcaacaacgacgaagatgatgtgaaagaagtgttgaatgcttgttatgattgtccttgtgatagtgctctcgaagctcttgttgacaattgtttgataattagattcaaagaatttgaggaatacagtatgcatgatttgttgcgagaaatgggtcggtcaattattcgtggctctgatcataataatcgtttggaaaactacgatcgattatggaggtcacaagatgtttgcaccatcttggaaaataatatggtaagtattaagatatatatata

SEQ ID NO: 2352 - DNA, 1155 bp, Cannabis sativa
ttagatgcaactttacccaagaagagcccgttatgatgtcagtccctatggagtgtttaggcccatcaagggatatgttccctattgatgtggatgaggccccaaatacgaaggggacgttgaaaatttggacttgtaatgagcatgatttgatggctcccaccaaattttgtaatggttcgagaaaattcaaaaaatgtagaagaaatcgtaatggggctagtatctgtagttatagggattgggctagattatggaattggaaaaaaggctctttgttatgctttgaatgtaacaaagttgattttttttattgctcaaattgtgaaatgaattttatgattcggtttcttatgcatcagcattgtccaccattctttatattttatgttttgaatgtaaaaaagttgagtttatttatattttcgtacatatgaaaagaatacaaatttagcccattgcaagtagtgataggatagaggtcctccttcaaacatgataaatcttcaagcaaaatcttgcaaattctttcaaaagataaaaccagaattattacaaaagagtatttgtatgtctgcaattacaggaaaaaacaaggaaaaatgcattgtaacagaaagatggctctaccagttcgctccttaacgactttctgccataacaaagtgttgtagccactttggtctttgctcgaatccttctctcgcgtgcttgagcttcctgcccactttcagctggctccttagcctcttcttctctttggttcactaatacttcttgaattggttttgaattgatcaatttggttcgaatagccaagatagctaaaggaaccatcaaaggtttattggcgatactcaacttaggtaacaaataacatttgagtggggcgctgccatgaaatggtttgaaaagagagacagatgaatacgactccccagtggtaaagccaaagtataggatgttgtacctcgatgagctcccaccgaaaagggaccaaaatatcgtcgacagagttttgcattagacgttttgccaccgaagattggatatatgactgaagtttgactaagagtctaagacccaaataacccacctgaaactttaatgtcttttgttttcttgttagcttgctgcctcattcgattctggctt

SEQ ID NO: 2353 - DNA, 2073 bp, Cannabis sativa
aattttttaacatgatgtatatgatatttatagactgaacatgatagatacactatttgcctttgcctcacaacaattcatctaactgaaatcacatctcttgtttcacgtgatgtggttatccttttgtagtaaggaaagagattattttcttctttattctttgatttgttttttttttatatcaattcttataatcttatatacccatttttgacttgttatgagccaaccactttctaattataggcctacacaacaacgaaatttctcaattagtatcgaaaatgaattgttaagagaattttttgttttcttgttgtgtgtattaagaagaggagttgtggtggtccctctcggatcactcgaatcccactagtaaatagaaagttgttacctttttcaccatgtttgacgccttaaataaattaacaaacattccagtcaagttaaccactattccagccaaaatcatttcttgactctcactgtctaaatcaccaccattctgttgaatggtaataacttcctcatatggtcacagtttgtacaaatgtacatgcgtggttgtggaaaatgggatacttgatacgggagaagagacaagcaaaggaggattcgacgtatgtgacctgagatgttgaaaattcaatggtgatagtgtggcttgtaaattccatggaggagattagttttaactatattttctatcctacagcaaatggtctttgggagaatgttgttcaaatgtaatttgatatgaagaattaatttcaaatatttgagttgaatttaagacttgagataggacaacaggaggactctattacaaagtattttaatctctaaaaaggatctaattttgacttagatttttttagaaggtaaaattaagacaactaaaaattttgaggcaagacaaaattaattctagatgcaggaaagaatttttcaaacatgccaaaggagtagtataatttaaaattttagtgggcattctattaatgagatgtgatgcaataagaatggcatctctccataaatattttggtatattcataaaaaatattatagcacgagcaatttctaataagtgtttattttttcgttcaaccactctattttgtttaggagtatttggaaaagtaaattgaagtaaaatactattttcaaaattaaatccaggagctgaaaagtatatttttttgggtattacaaatattttaatatattactaaacgggtttacactactatgaatgtttttttttttttttataaaataccttctattttctaaaaatttaattcagagagagaatgtagtgaaacaaaatttttgggaagttattgaaccattgccaaaaagaattacccatattttagtaaaggaaactcagtcccagcctataaatgtcgattctatggttggtttattagatacaaaatactatgattgattaaaaattttaataacctttagcatgtagtttattcaagaaaaaatgacttcgaaaaaaataaatattaccaaatcatccttgcacaagatcaattacatgccttgaatgattattcgacaagtactccaagtaattgtattctcactattcattcatctcctattaatactattatgacagttatttttgaaccaattccaattgcatctgacttagatgatcttcccattgctcttagaaaagaaactcgtaattgtactagatatcctattgtcaaacacatatcctatgatcctttatctgaaatctataaagaatttgccactaatatttcaaagcttgttgtgcctagaaacatacaggaagcatagagtgaacagaggtggagcatggttgtgttttcggagatgaatgctttgaaaaagaatacgacttgggaagttgttaaattactaaaggagaagaaaattgtaggttgtaaatgggcattcactataaagatcaaggctaatggtattattgaaaagctacaaagctagacttgtagcaaaaggtttcactcaaacctatgggatatactatcaagagacgttttctcttgttgcaaaaat

SEQ ID NO: 2354 - DNA, 1746 bp, Cannabis sativa
tgctacttcatccataccagacaatggatctatgaactcacaagagcatgttgctaccttgccccctgatccaatcatacagcaacctgctccacatcccataccagtaccacaagctacccctatttcttcacctagtcagcctactgagccatcacatatcccagccccaacaacaaatactcaccctatgaacactcgatccaagtcaagaatacataaaccaaaagcttatcatgctacatcctatcctttacccgagtccctattacctaaagaaccaacatcattaaaacaagctctcaatgacccaaaatggtttgcttccatgcaaacagagaatcatgctctaataaaaaagattaacacttgggttcttgttccctaccatccctccatgactttagtaggcaataagtgggttcatagaattaagcttaaagccgatggttctcttgacaaatataagtcaagattggttgctaaagggtactctcaaacacttggaatcgacttcaaggagacctttagtccagtggttaatccagcaactgtacgaatattactcactcttccagtctcctttaattggccaatcacacaacttgatgtctcaaatgtgtttctcaatggcactcttgaagaagctgtgtacatgccacagccaccagggtttgttgatccgaaatactcccattatgtttgcaaattgaacaaggcattatatggcctcaagcaagctccaagagcttggaatcacaagctcaaatctacattgtccaacaaaggttttcaactgtccaaatcagacaattccttaattttcaaagggggtggacagacattaattgtgttactagtatatgtggacgacatactaatcacaggtcctaatccagctctcatttctgctatcatcacagatttaaataatgaattcgacatcaagaacttggggcttctacactattttctcagtgtcgaaattcacaggaccacagctagtatatacctatcccagtcaaagtatattgcagacctcttaacgaaacttaaattggatggtacaaaacaatgtccgagtccaactagtgcttcacatgttctgtctcttacaaatggggagcctttcactgatcatacactctataggagtacactaggggcattacaatatctaacattgaccaggcctgatgtagccttcattgtcaataagctgagccaatttattcatgcccctactactgtccactgggatgcttgcaagagactatttcgatatctcaaagccacaatacatgagggcctcttaattcgacctactccaagactatgcttacaagcatattcggataccaattgggcatcttgtccagacgatcgaagatcaacgggtggttatgctattttcctaaggggaaatcttatatcttggtctgccaaaaagcaacaagtagttgctagatcaagcacagaaagcgagtttcgtgctttagcaaatacagcagtcgcaattaaatggctacactctgttttacgtgagttacaggtacaactactagctgctcccattatatgggttaacaaccaaagtgcagcctctcttgctgctaacccggtgttccacgccagatcaaagcatatagaaattgatctttactttatgagagatcaaattctagctaaagagattgaggttcagtatgttccttcgacagatcaaacaacaaatatactcacaaa

SEQ ID NO: 2355 - DNA, 1698 bp, Cannabis sativa
  modified_base (573)..(573): a, c, t, g, unknown or other
ccaagtgaagaagcttccactttgtttaactacttccaattgacattctatcacacattccttgaacttagaatgactgtaactctcttttttcccaattctttcccccttctctaatatgtcattaaaatccccgaggacgagccaggagtccttcacttttattgttaacatttccttccaaagcaagttcctcccatcaacattgttataaccatagacaaaagaaacatagaaattatttcgattgtctaaggttgtaacatgaagatggatcaattggcttgaatagaacaagatattgacgttgaagctcccaaggttccaagccacaataagccttccccttttttcccaagcaatatttaaagtgaaacaccaattagcgaacattctgacatacaaggcccctagcttagaagccttgactctcgtctcgaggagaccaaccagtccaatcttatgcctttcaatgaaacccttgacttcttgctgcttttgcagactgttgattccccgaacgttccaactcaggatcctatccattgagaagaggaggatctccccctcctnttgtgtctccaattttgggccattcttctttatcaagttccccatgttctagtatgtgcccagcaacttcctcaagcacattaaatgtattagaagtttcaggatcaatcaaatagacttgatttttctgtttccaacccttagatacgggtttgaaaccatctttatcaacccctggctctttattctcccctgatagatcgactcttttctcttttacaacccattcctggtactggatttgtagggttatttttatggattcgcacgccaatgaagagaagagaatctatataaatttctcatacttgcaatcttttggtttgaattctccactagcctcgtaattgacataattttttccttcttcccatcatccattgctcttcaagagaactggtatagatttcatgccctattacattttgatagaatttgaacaaattaacattataacatactgaaaacaatagtaaaataacgatgcacgactatcttttttgttatagtagtccaacttttatttgggtgcccagttattctgtatatccataatttccaatacagtatagttaaataattaaaaaaaaactctaaaactacgttgaatctattaaaatttaaagagaattattaatagatttattttttttccaagtaatgttgtatatgaatctgtaatttataccatcacgtatatatataaatcacattttagaagatgcaaattgtttttctaattgaattcgagatcattgtgtgagcatcatttatattttcagatttaaaagaatcttttttagattcttactgttatccgtatttttgcctgcacaatacgtggaccttaataaaggagagacgagaaatcattaagccgcctaagggcctcgctccgtgctcccaaaggataaaggccctaaccttgcagaacagaccaccgcgaaagaagtcctcccaaatgtaggccacgagggacatatccgtgatttagcaactctctcccatctggaaggcaggacctttttctcccgcgaagatcatggaccttccatcaagaggtattgatccggggtactctttttactcgtaaaggctcggtctgcacatgccaggctgagggcc

SEQ ID NO: 2356 - DNA, 1305 bp, Cannabis sativa
acatacagggacaacttggttagatatatcatacatgtgtagtataaggaaacatgttaaaataagtaggcatttattttcatagtacacagtaccaaaacgttataaatgcagtaatgccgcataagatgcagagtctatccaacctgctttcatttctcatcttatcctctttcaactgatcctgcactttcgagtacaaatgacaagattcgaggacttcgctgtagtttttactcctacggcaacttagtgcctcctttaggataagtaaactattccttccgttgacgtgagaaccttccatatcttccaactgcatgcttacctctgttaacttaagagttgtctgaataccctctccttctgtttgaaccactctaaacttcgtactgagtatgcattccactacttgacgaggaagaatgtcctttgcaggaagtatggatccaaagcgtattacaaagtctctgtcggttggccagtgcctttgcccgccaagagcgctccagctagcaaaattggcagcttgcttcatttttttgtttacaacaatccaactaagttggagcccatcacgaagctcctgccatagtttcccgtcttttctttctctctccaaagatgtaattggtggcaaaccatcagaaactgaaattataacttcaccataatcatcatcatctcttgctgcataagtgagcagatcaatccgaaatgggcagttgtaaaaccaaccattgaagctatttgcatttggaatgtcccataaaacttttgagcaaattgttttctccttataccttatatccacaatagaaataaaatctgaaggagaaatactctcaacttcatccatgtcaccgtagtattcagtttcggtccattcttctggatactcgcgaaattcattcatttggtattcagaaacttccttatttacaataagaggaaaacaatctgcatagaactttctgaatccaccaattgaagatatcaaatatttgacatcttccctattggttgaaggccacaaagaagaacacacatcttcccataatttctcttctcttgagatggaagagaaggcagcacaagtgcatgctgcactagccaaagtgggtccatcaagacgcctcaatatatcataaaaaatatctgtgctcaacgaccccatgcagtccactggtgcaactgatgtacccatggatctcaggatctaaaaaacaaagcacaaacaatatttttttttttatgtacttcaaaggatagagtaatatcaaacaataattcaatagagagaga

SEQ ID NO: 2357 - DNA, 2184 bp, Cannabis sativa
ggatcaaactcaatctccgacccgaatctagaccaaagtcaagatccaggacccgaacctagatcggaccagtacctgaactcaagactagacttaagacctagactcgagaccggattcggagctgagacccaggattcaaacccgaatctagacccgagacttggactcaacccataatcggtggtagtgtcgagtttattgaaaatatattataattttatacaatctattaatacaagtcaatactaaatataatattgtattaaataatattaatacaatacaatctaatctgacacaatataatacaatacaatagtacggcgtatcgatgaataattatatatagagtgcttatataattgttgtattaacaaagtgattaaattgaagaagtatatagtttttgcactgatcaaattaataattgattagtttaatcactcaaatgacagagacgtctccagaattgatacgaggagagaattagcagccagccatcaatgaaaatagagaatatttttcacaataaacatatggggcaaatcccactaatcgtattcgacgtgtaattgaagataaacacttaatagtatctaagtagtaaaagtacataaattgaaagaagaacaagtgcaccgagaccgtttctttcggcttaagtgtttgattgatgcaataataataaaatattattattattattattattattattaagactcacaaagtccaaaactgattttgtcacattttgtatcattcaaccccgtatacatagaaattaagagaggcatcaccatttgtcttcaacattactcaagtgtgagataacatattcactcagaatacaccactatcatcatgacaaatcactctaaacttttccaactttgagtgtttgaatttcttatagccctctgccacaatgaactccacaaaagtattttgatatagatgacctctgcagcttgtaaatgaagtaataatattgtaattgcgttattggggcactgtttttatatattttgctgtaattgtgatgttttagtttggagtcaaaatgctaatgatggtaagtgcaacatcgaatgttaccactaaatcaggagtttattgctattactcaatgtgatcatattcctttatcaccatcaaaatcctagcaactacccatctccataaacaaagtaagattccatcaatcaatgattcattctagctactctccatatttccatatgccaacatattcgtataaatatatacataaatatatatatatttatagagattacttgtagaactacataatgatgcttcacttttttttcagctctttattagtgctacaacaaagagtcctgatgctgaaatggaattattatcattgagaggacttgataataatggaattattatcaattgtagctaaatcaagggctttcaaaaaagcaggtggataaagtaaaaatcctttgaatccaattacaatattgaaaagatactcgcaattaatcaacatatatacttgattaatacagtgaagtacatcaccttggttattggtgaagctgccctgttgaaagctgcggctgacaattttgttagccgacaagatgaaaatagacctgcaaacacaaaaggtcttatatacgcataactaaaaggttgacataaattatgcaatgtcagaaaatatctgctattcacttacattcatcatgatgtacccaagcttaactttttgtattaaccactttatgcaatactgtgaagtgaatatatgtaatatgcacaaatacatgcactcatacacttccatcacttacagtatcaaacaaatggtcaaacaattcggttatgtaaaataagtagagaataaaattgtggaatccccattccactcatcacatcagattcagataatgcagcgcaagggagaagaaagaaacaagtcacaaatgcccaaaattatatcaaatacacttttcgagttcagaaaaacatttgatacagaagaaaactctagacaagaaataatagctactaatgtcaaatatactgtacagcaaaaacttataattacaatgattgtaaatttcaaccagagctttagaaaatagagcagcaacactaagagttccagcacagcaccttcacctaaataagttatttcca

SEQ ID NO: 2358 - DNA, 1912 bp, Cannabis sativa
tttatgtgtagatgagacaacaacaacaagtagtgggagaatccaattttgctatcattgggttttgtgttgctactacatttttggttttggctgtgaaaatctttatggttatgaagtcaagaagagaaaatcatcatcatgctggctctgtagctgatcttgtcagacgtggtcagctgaggtctgacagaagaggcatgtatgaaatttcaatcctttgataccttaatatatttagtcctaatgtgaaaaattaaaaccccaagtagaataagaagttataatatcatatgctcaatgatacaagtttagggtcacttgtcttagactgaacccccctcgaatttattgaaaagctacccatcaatgttttccactctacgtaaatctagaaaacagaatttctgaaaattcttagggcgtgtttggaaagccgaggaggaattagatttgggtgtaattagtgataattacacagttttgcatgtttgtctgactatgtaattaacgttacagtgtaattggagataattgagaagtttcaattacactctctaattcttatggcttcctatgagaatttgtgttattactaactttctattttaaataatagttagtaaaaatgttattttcatgaataattactatctcatattcaaacacacattaaaatatagtgtaattactagcccgtgtagttactatcttaataattacacgactaagtaattacatagtgacttccaaacacgcccttagtcttaaagacacacttagctgtcccgaatcctattttctcccacaaatcttctgctggagattcaatgcttacttaccatcatttctgatacaagttctgtttttgctcttgttattgtcaatgcttgtttttgtttttgtcaaaacagaacaaggcctctcaagtatgatgaccctttcaataatccaatggttaaagttggcaagagcaattcaactgtagaaatgtgtggaaaagtataccgcttagccccagttacccttacagaagagcaacaatcggttcatcagaggaggagatctcgagcataccagtggaaaagaccaactatatttctcaaagaaggcgattcaatacctcctgatgttgaccctgatacggttcggtggattccctctaatcatccttttgcaaccactgctagtgacattgatgaagatcgagcacaaaacaatgtgaggcaaaagcgtggtgttccatttcgtattcaagctgagcacgaagcgctgcagagaaagcttgaagcattgcagggtgtaagtatagtaatctcatcatctgtagtttgatgattagtatgaaaattggtcatgaaatggctgaaatctgtttctttttccatgttaggaacaaaaactgaacaaattaacaatcgatccaagcaacgctaaagatttcgagagagcattcaagtcacatccgaagtcatcggaaggtggagaggaaagctcgttgaatgaacatacaggaaactcacaagaacggtcctcaaattcatcgccatcttcagaagaaatgcaaaaaccatgagttgtcatatcttttttctggcgaaacttttaatctttatcgctatctgtcaattttgatctttataaggcgggtggttcgaatatgtcaagggtagatttgtaaatagggtgtcgtcgtagttcatatttgagacgttgtcatgtacatttccttgtgtttcttatttccttttcccaaagacaacttgtaataatagtctttttccatctgtttgaatctccaaatctttttgtttcccttatagctatgtctatatgtatatttaggcaagttaaaagtgtaaaaccagattgattaacacttacaagaaaagaaagctactttgatggatta

SEQ ID NO: 2359 - DNA, 1573 bp, Cannabis sativa
ttagtatagtctaaatagtttatagtgatgaaaataagtttaaaattttttaaacacgtgtcgtaataagttgaaataactctgtttttattgatgtaaactattcattcttgaaaatttacaagtttgatatatggtaattataacaaatgttgccttaaaaaatatattctgacgtgtgttgaataccaaggttgaaaatcaagttatcttaaaaatattaataataagtagctgatattcatgtacaatttttattttttttttaacaatgttaactaattaattatattatgtgtttataaatatataaatacacaatttattttctcagattaacgagtaatactctatcacatgacgaatggatactcttggaatacagttttcatctttaattttaatataatgttgaaatgatgggtgagtattattgtgtaaaaatgttaatatttatgtaagtatttatacaaacatatacatataccaaaaccttattaacactcaagattttgaccatatattctttaattacaatccgtatgcatggaccaccttccattttcaacttaaaagaagttgctatctaagccagtagatgaccaaattatagaaaactcataatttgatttgataactctttcacactatagctagttaattattatttttcctaatttatcaacacatctatactaaaaaagttatggaacttaataactaaaagaatgactgtgtaatttagaaatatgaaatgctttatcaattatatgaaaagatagaaattaataaacgaagaaagagtccaatttgtaagaatggacccaaaattaatgtaataaacactaggcaaattaggactactaaccataatgaaattgctctattcattaatccatgaaaattgcatcttgctctttctttttctttataacctttttcaggtcatctatccaataatacaattcacgatcatattcaatattagaaatgaaaacgatatgctttgtatatcttaaatagtacctataattgaaattctttattgttttctctcttttacaaatgattccccttttcttcttcttcctcttcttcttttctctatacaattattcaccagtttagtccccaaggaagaaagatgtcacatgcatatgcatgtgcttttgtttattatcttactaaagtaaaatgatcgagacaacatttatataaatatatatatattatatatggtatttctttttaaaggaatatatgcagtaaaaatgaaattatcattagtaataattatatataaaaggttaaaaataattcttttttagattttgactaattcgtatgttttataaaaagtatataattcccttttttaaaggaaaccagacaataaaaatgaacaaattaattaataattaacgaaggttgatatattgaattttcgatgatgagggtagctaattaattaagggaccactgccattttaatattatattatgatagactattgaaagagaagtctttgatttgaatcaatatagcaataaattgtgagattatatatatata

SEQ ID NO: 2360 - DNA, 1163 bp, Cannabis sativa
gcgaaatttggtccgagttttggtaaatatggctcggaccaacatggtggagacaatccacaccaggaaaagtatgatgtagccttgaaaatctgtcatggttgaactttttaattgaagaaaaaaaaaagatgtttaaactaatgaggtataggagtgattacaaagaagaaaaagatcaaatatatatcctttgaggcctgcaattacaaagagaaaacaacaaattttgtgcaagttagattaattattgcaatgagacttagagaagagttttttctttataatggaatcttgtcctttagaattggtcaatgccgtacctattaaagctatactagaattttaagtattttaatgctaacatataatatgattagttccataatggggtaacagccgtccttgatggatataaggttagaagaacatgcaatgatgtatgtatacactacaacaatatgaccaagtctcataatatatggtccaaattggatctgtatagcatgaaagtttatatagtgatcagagattcccatatgggatccaagccaaattaagtatttaaaataaaaaatcaaaactcacccctgttgtgtctatataaaaattatatactccacttcatcttgtaacattatgtagcatggaaattaagaatgctatcaaatcagacaaaaataagaagaaaatcaacaagaataggagagttacagtctacttcctatttaaacatctttcttaatttctgtcctaaaaaatatatggagtaaataatgaatacatatcacaatttaaaactactaaatgatactaaagtatatatacacaatgaaagaatggtaaaataaagaggagattcctatgcaaaacattttaaaacatctcatattggtaatggattatgccgagcaattggtaaatagaggaagggatgagcctttagaagggtcaacccagttccctcttccatgtcaactgtgccatcaactttccactcaaagcactgaatcataacagcaagagtgttttgaacaagcctcaaagcaagtgaaattccactcccaaaaggcaaaaaatggaagctttgtcctctatatagttgactagtactactctcatgatcttcactaatatgaaatctctctgacttgaactcaagt

SEQ ID NO: 2361 - DNA, 2179 bp, Cannabis sativa
attattattaatataattcaatattatgtcttatttattttagagagtataaaaaattataagaattgttaaaatgtattattggtgcctagcactatctttaatatcacgttactattagtgtaattaagtagggtcttatataacttaaaaaataattttttttaattaatatggctatcattttgaaaaatactgaagacgactactggtgcaaaaatgctcaaaaattattaatcaattataaaatgttaacatgttaactactaacctccttggtcataataataataataataaaaaatgctataatatgggcacatatattcatgtatggcttactttgattggactaagaaagaagactcacacaaactcatactatatataagattaaaaaagcatcggtgaacgtggtagcattctggttctggactccctccaactccaatggatcctcctcaactcgacccactttcctcgccggacaccttgtcggaggtcgtcgttgattccactcccggcgccgcattccgccatcttcggtctactacttctgataaaaaccaggtctttttaacacatcattgtcttctaaaatgacattattcttttaatctgtgaatatgggcaaaaaagtttgtttcttttctcttttctacgtctttatttaaacctgtaatgggttgtaatttttaatgagtaaattatcataaaagctactactttccctttttattatatacgcactcacactcttcaagtggtcttttttattttttttatttttggtttgtgcaaagaatgatctttttttattcttaaacaaatgtttttttacttgtaaatgttaaaatcatgcgaatcccatgtgggggcttttcttttttcttcaaaataataataaaataaatatgggatctgaagattaagatgtcaatcttaataaagtttatgactttatatgagtgaccagattctctatagaacttttttcagttttttattattctttgattgccctgtctcattttgaatggtcaaggttttaaattgtttgacaagtatttataatttgattcaggaaaatagtagatgggggactctgctactttcctacaagacattgggagtggtttttggaggactagttacatccccactctatgtgtatccttctatgccattgaaatctccaactgaagatgactatttgggcatctatagcatcatgttttggactcttactcttattggagttgtcaagtatgcttgtatagctctcaaagcagatgatcaaggcgaaggtatagaccgatacagactctatttagctacattcatgtggttaatcatggcctatgctggttattagttttggaatatgaacaaaatcatgctggacttgtttaaaaaccatgatgagtacttcatttatcatggcctatgcttgtttcacatgagttggcctctggtttttgagtcaaattaaaacattgtaacaccataactaaaagggatatcgaaattatcctataaaatttaatcaaactactggttgatacatgctctttataccatgcttttgttatatagcatagatttttcttggactggaaagtatttgctttgtgttttatggacattaggtggtttgaatatgtaggcctaaccctcaaaatgtttgtttttgttttttgttataagtttcttttgtattttgtattttggccttttcattaagtttccaaacacttttccaacattccaagctcaacaatgcttaaatttcttttgatgcaggaggaacatttgctttatattcgaaactttgtaggaatatgaatattggaattgtttctcgaaaatattcaaactctaacaatgacttgaagaaccagagtgcacttgggatgtttttcgaaagaagtatagtagcaagaagggtgttgcttttcattgccatattaggcatgtgtatgctaatcggagatgggatactcacaccagcgatttcaggtttggcgcctgtgctttcataagacctttccatagtttcaatgcaacttctgtttatattgattttttataaataaattcagttctgtcagcaatggatggagtaagaggacctttcccttctgtcagtaaatgtaagttttcgagtcttcattctgtc

SEQ ID NO: 2362 - DNA, 1949 bp, Cannabis sativa
cgttcaacatttaagggccttctctcttattgaattgccttctccagaaatattagtatatttttatggataatcattcttagaacagtaactagtaggttcttatggatcaattgatatttaagttttgcagtcattgtaaaaaattatatttaaagctgtggtttggtttttatcaccattttgtgtcactaatccttgtatatttgtattctgtaaatgcatacagatcatatgttagaggaccgattttgaactttctaccttatatttgtatttacttggagaaatgtctttaccaagatgtaaatggttatttcattagatctaactttatggtaggatcaagtttaatgattgtcttgattgtggctaatgaaacaagggatatttactatgttacttagttctggattcttcacttattggcaccccagccttttatcttgaattctttcttatgtgatttttagttgtattagtgtctaatgttttaaggaggataaattttcattattctttcatgaagcactcattcggacccgtagtaacttttcatcaattttcttatcacaggcatctaaattctgatgatttgaagtacagggagtcgttgacagactacaggtccaaaggatttccttctaaagatgtatctggtttttctactggactagaaaaaggccctaaatacagatccatggagaaatccactaaattggatgacactctgttgggagaagtgtcaaatgagaagtcttctagctctaaagcttcacccttgggtttgatagaaagatctccttcatcttcaagtattgaccgtaggtacattaatagatcgggtgctaggcggagtcttgacattgaagaaacagggaggagaaacactgcttctattgataatagagattttggtgcttctgatgatagacatagtcgggacttaccatcagagaagcctttggcagatgaatcgtctcctaatgattccaacttttacaataggcctaatcagggcaactcatctttaattccttcacactctgccttcagggctggagttgacagcccttttatgggctcacatgaagatgatggcaggatgaattctaatgctcgttatcggaggggtgatctcaacatgggaagagggcataataatgcatggaggggtgtgacaaactggaattcaccactaccaaatggctttatgccttttcaacctgggccacctcatgcaggtttccaagggatgatgacacaatttcctggtccactttttggtgttagaccttcattggaaattaaccatgctgggattccatatcatatccctgatgctgacagattttccagtcccatgcgtccacttggttggcaaaatatgatggatggttcggggccgtctcatttgcatgggtgggataacaatggtgttttccgagatgaacctcacttatatgcggcagctgagtgggaccaaaacaggcatccaatgaatagccgggcaagggaatccagtgtggacgtgtggaaaggacaaaacggagatacaaaaagagacttgcgttccccatctcacaaagatgaggccacagtggatgatggtttggccgttcagattggtcagatgtctaatcaggaagataatcgtggtgatgggattctgggaaaattttctgaaacaagatctggtgcaacctcttctgcagaagaatctactaaggttatccgtgagaagaaacttggtccttctaaatctacgaaggataatgtttattgtttaagccgttactatctctccaagcttgatatttctgtagaacttgcacgtccagaattatatagccagtgtatgagcttactaaatattgatcaaagtacaatgactgatgaagagactactgtccgtataatgtcaaaggtatgagttttattcacacaat

SEQ ID NO: 2363 - DNA, 1257 bp, Cannabis sativa
tttttttttttgctaaaagatattggataagttaaaagaaagtgttgatagaattttgagtgtttggagcttcggaatcggaaagagaaaatgtctttgcttcttcattcagattccttcctctctttgattttcttaattttcaaattatgaccaaaaccctaatgtcgttcatggaccttcccacctccatcgccattgacaatggccaagtcttcttcgaagcccttgacgaattccacgtccccttctacgattgccccgattccttctccgatcacactcctgattcttcctcaacctccgcactcgatactctccttcccaaatccccaccaccggaggcttcttctccggccctaactatccggcgacgtcgtttggcttctcgaagattctccaacaaggaatccaatgattcgagtttagacaagtcctcttcattatcggagattgattcagttgagagtagtacgaagtggagtgaaattggtgggaatttgcaggagaatggcgaaaagtctgattttaataaggaacctgttcgaatcaccaatgaggtgagtgaaagccttgttgttgattcgatcaactcggatgcagatgaagtgaatggttcttcctcctctaacttgcttatttttgcagcttctttggtgattaaggctattggatttcaatttgatttgttcattaaatttgtaacttttcccatttgggtttcttatacctcttacatgattcttgttgaccccttttttacaatgaggcgtggtagagattattttattgggaaaatggtgaaattatgggacttggtacttgggtttgttaatccatatgtgtcggattgggtgaaagataacaagtcgattgagaaagtggcatggagttgtttttggggttctctttgggcaatttatgtttgcttcatgttatgttcttttctgttcttgtcaagtttgtttagtgggttcataatgaagtattttgttgaggtgccccttcatatgaagcaggtcttgaactttgatttcactaagcatcgtcctgttgctttcgttcccataatatcttgtgttaatgccggttgtggcatggactgtgaacaacagattgaagctcgaaacacagtcggttttcgggttatccctgttggtcacaaattgcaggctactgtttcaatgacattgcctgagtctgactacaacagaaatcttgggatctttcaggtacttcttcaaattcgttataatt

SEQ ID NO: 2364 - DNA, 1664 bp, Cannabis sativa
aattctggaagaaaacaaaacttaacaaaaacttgacacaagaaagtgcttgtaaaagagaaaagtctacatatgtttacatacctcagataatgaaagaagatatgggaaatggtggtgactgtgatgttgaatcgaacctgcactattataagaacctgaaccgagaaactttttccttaaagtatttaacaacatagccagaagcaccaaaatgcatgatagcaaaattgagaaaggccagggtcctccaaaagtatagagcagctcttccagaggagtatagcaatttggcattctatatttgtcagatatacacttgtaggggcacgatggcttagtaactccgcctgaaacaagtatgcaattttatgtgagaagagacctagaattctacatagaagtatttgtgattatataaagatacctcgcgtatatatgaactcagcacgactaggaagaagatcaagtgaacaaggaacacaaagattgtcatcagagccatcagtatctttatatgtgccaatagggcattcctgtataattgtataacaactaaataagatttatgtaaagcacaacttgatttgtacaagtagactaaaacaaccaaaagggagtttcattgctttaattctacattaaaataaaataatttaaaacttaaagaatcccttctgataccctactttccacttcatggagcttgtactaccctgatttccaattttctagtgatgataaagaaatgatataaaggggaagaagaaatgttttgcctccctgttcaacattaacaatatacgcccttgtgtgcatataaacaagtaacaataaagattcagaagtgaaaacaataaaatcattttttgggtactattagatatatgaaacataccctgcagtaagtgccatagagacccttcgggcattttcttcccgtgatagtgcccttttcaccataaagaccaccattattcccagtacctccgctgttagtatgattcataaacgaagtaaattaggattactaaacaaacattatggtagtatgtgaatattagttacagattaacaagattatttaaggtgcactaaaaggcaatagacccattactatgtttttacttataatatttagacagttaaacccttgaacacttgtgctgacttgacagctacagtaagagtacatttatttttgccatatgtctcaattttcaaccatacctattgccaatggagcctcttatactcgcgacaggaatatacttgtccccattatcgatcttggaccagtggaaatgaactctaccacccccacccccgcctccaccatgaggaccaccactgcctccaagaacagacaaagatgagttctctacaagtctaagcccttgaagaaaaaggaggattgttccacctgaacctccaccaactccgccaatcaaggaaccattaacatttctggtaggttttcttaagctttcaccgtccgcactcaaagctccatatatattaagccccaagagtggccactggaaagatcccataactaggaaatataatgaatgaatacggaatgtgaaaaagtagtcaaaacataaacaagacatgtgaaagtacaatcaaagcataaaaaagtgtaaataatattgaatatt

SEQ ID NO: 2365 - DNA, 2039 bp, Cannabis sativa
taggtgaagctggtgctgtattgcctgggtgtgtggaaatttttcaataaacaaagctcattctgtgcatttttaaatttttgttggaggtgttaaaaaactatttggatttattttgtcaggtcctagctcttactgggtcttatcatggtgatactttgggtgctatggaagcacaagcaccatcatcttatactggcttcctacaacagccatggtaataaatatattagagaaacttgtgtggcaaattttcacatatgttcattatgtgtttcaagttttgtcgcaagcttgtttatacagtttaaagtcatgcagtggaattggaatgtaattccactctatggcgtttctttgaaacataaaaagtttagagatcgtgttaattttatgagatggtgacaatggtagaagttttactgagtggactacaagattaaactaatttaagtagttgtttggctacataatacattagtgagagctatggggttaacatgggctattagttcatttcctttcagtttcagcaaccccatactaaaacgcatccatgtatttgagttttgttaataatgccattgagtaaaaaatgtttattgaaatgtttttatagtttttgtgaacagctattctcctcttttaacttttctatggaagaagctagcaaagaagaaatctcttattcccactgaatcttgttatatgtagatttatggtctttcacaacaggtacacgggaagaggcctttttctgagcccccctacagtctttttgagcaacaatacatggaatctttccttacctgaagggatgcattcaaacaaattaaaagacgctgacataagtgagtctctccctctctctctctctcttattccctctctcttgttaaatgagctatttactctggggtattatgttcttacatgagttgatacttttacagccttcagctcacgcaatgaagttttcaatacaagcagggacaagtcaaatctggcagaaatttattcatcatatataagttttgaattagcacgatatcctgaatcaaaaggttctattggagctttgatcatggaaccaggcaagaaagttctttagaaattaattttctgttttgttacattttgtatactttttcctatttgtggcatacatatggtatacttctctcttatactgtaaataattggagctaactcttgatctgcgtaaatgtaagagtagattttgagtttctatgttagagctgtcaactgtgttagaacccttctgtgttacctgttgctcaaatggtaaccaagggaagtatatgtttctatgccatctgggatcatcattttatagttctctttgattcttctgattattttttggaagtccgtgttaaatttatggcttctgctggtttttcttagaactccttggtgttgaataactatttgaacttttatgctaaaatatgttccctgttggtgccttggaatgattagtcaattctgtttcacatgccatgtgttttagcatttggtactccgactagcataatcacaaacatcattttcattattttggttatgtgacagctctcattgaagtgtcattctttttctgaattgtcttatagttatacaaggcgctggaggaatgcatttagttgatccacttttccagcgggttctcgttaatgtatgtcgaagtaaaagtatacccattatctttgatgaggtttttactggcttctggcgtctgggtacagaggttagtttttatctaagttgcttccattttttctttaatttgtcattttctcggaatatttataagttattctcttgacagactgcaaccaaattactttcttgtgtaccggatattgcctgctatggaaagcttatgacaggtggaattataccgttatctgtcacgttggctacagaatctgtatttgagtcattcatcggtgactctaaggtaatttgtagtagtgatgacttatttcaagttacacattattgccatcaaaaca

SEQ ID NO: 2366 - DNA, 630 bp, Cannabis sativa
aaaggtctctttgataacagcttgtaagtaagggagtcttgttatatctgattctttcattgtgtttcccttaccaatgacttgtttaacctctgcttgggcattggacatagcttctgggtttttaagtagctcagccattgaccactctaatgtggatgcagttgtatcagtgccagctgcaaatagatcctgtatgtaaatagtgttagaaatttattgagattatatataaaatgtgtgttgtgttatcaaataaataagttaaatttatgtggtctattttggaataaagtttatgacttaaaggcataattgtcatcattttaatacgtggataccataagaacaatttccagtttgactaggggtaaaattagtaatagtcaaaaagaattaattactgattttttagttattaataaatagatattggtcctcatttgcataactttacatattgtatttttgaacccccatcatcaggaaattcaagttccaaagagaaactctgatgcaaaaattaaaagatctatggactccggtacgtttctgctattccttaatcttattatttaattttcattaattaattaaggctaattcagatttagaatattcttaacaaat

SEQ ID NO: 2367 - DNA, 1306 bp, Cannabis sativa
aattttatatattgaaacaaaatcaattttacgagaagataaatacctggttagaaacccggtgggagatatggcgggagtgagggtatcgccgaaggggatcgcagccgtcaatatcatgtcgatgattactaccatgatggttattatgatgatggcggcgattctggttgacactatggtgaaaacttcgatcgggagggggagaagaatctaggccgagatccagactggttcggccgaaacgagacctcctggtgtagaataactccgaagcgctcgtcatgcacacacaataatcccacctgtattccaatccaaaccctaaaatctctaattttgccctaatttttatcagaaaataaattagaatttcggcgaaagagaagggaaaattaggggttactttcccatggctctaaagatcatctttttctttcagtgactgaagaagaggctttctttctttttttgcgggcgaagttggaagagactgatggagagaccagatctttccacgtgtcaaacgtacacgtgtttggaataactggcgttggatttagattaggctttgtggggtccatattctcaagacaggattggattagacttttttttgttagctgaattggattctttattggcattaaaacgacgacgttttgaatgagatttttgagaatttatgtcagaaaaccgtgtgaatataatatctcaatttgattagtttttttattctcaacaacaaaaaaaaatattattttgattaggttttatcaaagcaatccaatgtcacacttattagattcttctatgagacacacgtgtcgcaccctcattttttaagatagttatatttaacaaatagtcaaagaaagaaaacaagacaaaggtttttcgagcaaaagaaaaaagagaaacatatatataaacataatattttgtgttggtagccgtatgtctatttaaagacatccttttgttttaatctcaattttaaatattattagaataatgatgaaattatatattatccaactaccatagttgtaacttgcttgaaccttttaaattctcttgacgcaaatatttttacaaaataactaaaatatgtttgcaccactctataatctatatcccgacaacaagatgatatagatatttaatgataaaaaataatgttatggaaaatatgctaataaaaaaaccaaatttcaacataaaaatttaattattaggctcaattcttttaataaaattgtacattaaaactacttctccttcacctaacaccaacttccatatt

SEQ ID NO: 2368 - DNA, 4298 bp, Cannabis sativa
  modified_base (3575)..(3576): a, c, t, g, unknown or other
aaaaccaaaaagttatacatgtaaaaagtgcatgaacatgtagccattcatttttacttactttgtcaaactttttcaaaatctttatgaaggcaagcatgttcaagttcctgaaatcatcatcatcatcaagaaaaaatatttagataattgtttcccaaatcaaaactgaatccacttttgtttagctgttacatgagagacgggtgtgtttatgtttagtacctgtaagttttgaggtatcctaatcctttatagagctcaacaaaagctcctttgatcatcttctctgcatgatgaagcttagttttgttgattcttagcttgttgccttcctgagtgcttttctttgaggactgatttccttgatcttctttgaaaaggtagctaatcgccgataaggtacgcgagggcgttgtgagaggaatgtttatgccaaagttcttcccttggacactgaaaacttgtcctgctagagttcttaatttgctgtcttctctcttaagtcccattggttttccaagctcatcagatgattttgagcagatatctccatactgcacatcatttttctccatctgatcgtctatgctagtgctgtcctgctcttgctcttgttctgttttgtccccattgatggactcctctgaatctaaaagaaaaaaaaaaacaaaaaattattagaaacaaattgtataatgaacctcaattattcataacaacccaatattcactgaactgtaatactaattctaatgcctgaaacccgacaaatggtttttatgtcactacattgaacaactcttaagcttcattgtattttaactgcagatagtgtctgactcaggatttttagttaaccggaagtagaaatgcaagaaattatatactgagcgtattagtataaaaatacttataaaagactaaataataaaaattaatctaatcacctttaactatatgacatactaatatatataggaaaaaaataaaacagaacaatatcttagcacagttgaaacaaatacaatctttaagctggctggttattttggctactgagatgagtaagatgatatattcaaatatatatgtatatatataccgcgggaaagtgtgtatgacatggaggcatcctccttggaatcctgcattgaaatagctcctttggagcgttgctgattgaatgcagtcttggcttcaatgagaatctccatctgttttttcagagactctcctctctcaagaaactctttctcttttgctttgtagaactgattgactttgttgagctgaaggtctaaacagttgaagaactcttttgcagcatcggtatccgcgaattgctccaacaattctgtctcatacacgtctcctttacttgctgaagaggcaagtttcttgtgaacctgcacgtagtgatcaacattgagctccacattattagctcacaacacaaaatagaagagatcatcataatgcaaaaagagaagaggaaatgaaagagctttgtgtacatgaataacttcatgatgatctttacgtttaggaccaaacaaagagaagttcctcagagttgtcaaaagggtatgtgacaaagagttgttttggtgcttattttcagacttgttgttgatgttagtgttaagaaggtggatttttttgaggtccttcttgagtttccaataatcaacaaatgcttctttccattcagggactaattggccttcaaattgcttagaaaacttcaccatcttttgtgttattgttatttttctgttctttctttctctcttaaaacttactctttttgagagagagagataagcttacttaaaaagagagaagagagaactagcgttgaagttgttgtgatgagtggttcaatgaaaggccatggtgagacaatttaagggggtgaaaaaggaattttgattgatgtgctcgtaccgatgctcgacagcacattctaaaatatcctttgcacatataccgtcctatgcttcctccacttgaaagggtatcatatatagttatagtagtgggttatatatctatataaatgtatatattaatatatatacatatagatatagatagaaagcttggccggaaagtttctcacaaatcgccgccggcaagtatgactagtcagctagctaactaaatacttccctctatcccaacatgtatgctcttcttaattcccatgaagattttcaaagagaataattatatgcttatttaaagtgacatgcattgaagtttaaagtatatatgaaaaaaaaaattgcaaagttgaaagtatttcaaagtaatgaccatctagagggcattctacaatagaatttgtcatttatgatcattattataagttatacatgaccaatcaaattcaattaatactttttttaaaaaaatttatttattgggtgtgcttgatcattttgtgatatatgtgttattaactttcaattttccctattttactactaaaaccattttgtttttggaattgaacatgcatggagtcaggggcatttcggacttttgctgagaaatgccccataagtgagtcaagagttgcttattttcgtaattaaagcttattggttcaattttttttagaagactcacacaaatgtggtatctaattagaccagcttgattttccactaattgtggataacgggaaaaagtttcaattattaggcatttgttttatagggcaccctctttagattgtggctatgcaaaattacaacacattagaagataagatacaatgtgttaggctttatgcagtaaaaatgttcattattaatagcttaagggcgcgtataatatatagcagtacgaactaattaattagttaatctcatataaaatacatattgttatatcctgttcctgtaaatatattattaatatatttgtattattgtctacatgcgcatgtatatatagtctatagatatgatcttatataagattcatttttgctttgtcgaaatattcactaacatgttcaatctggaaaaacccgacccgacccatttatacaccataattgataattaaaattgtatacatataatgaagatgaagaatatatttttcttcttttatctattttattctatagtgtaggtacgtattgtgagatcaatcagattaggcacaagatgccaagaactattcatatgcggtttccatttttatagtactattcttgaaggaaaagcaacattatatatggagatcccaagtgacaaaaggcttataaaaagataaaaacattcacatgtattactttgtatttaaaggccttaaatacttgatggaaatattatattgtagcaaataattataaaatagtaaataattttggtgtatatatatagcagtagaagtagcagtactagtagctaatagtatagtacaattcctagtagcaattagagaattccatgttctattcctttgttctaaacccacttaccctctattgccaatttgttggacccttcaccttgacactcaaattttcaaatccaaactctctctctctctcnntctctctctctctctctcattagacatggattgcactatcccctattaattgtggaaaatgggcagcgtgcttataaggtggctagctgactcaaagatacgctagctttttattgttttttctccgtacttcacttcttttacacacataatatagatttctatatttcgtgatattatttcttgctacgtcgcttaatattggactggaagatattttctaaaatatttctcccaaattattatttatgactattagaacagtgagttagtaattagtctcactactacaaaaatggcacttagcgtcagctaatgaaattaagtgagtgtttaaaactgtcgggaaaaattaaatattcccaacaattgccatcaaaatctgcgacagtattagggtaaaaatacgaatttttaatcaaagttatactcgacgattaatcgtccggtataactcagatgaaataaaaccctcgtcacttaactttgtttttcatttcagctacccacgaacctagatctcttttgcaaacccaacaatgcactaaatctcgaaacccaacggcgcattagtcagtaaatcattcttgctatattatgatgtgtaatactgttagaattcagttacatgttagttacaagttaatcatttaataagttgtaatcctttctactaatcaatgagaatcttctttgtctttcttcaatctctctctctctct

SEQ ID NO: 2369 - DNA, 1038 bp, Cannabis sativa
tttataaatattaaaagagatacatagtctgcaataataacttaaacttccctatattgaatagcatacctacaaatagcagctggcacacccctccctctattatacaagtcttgacattttcacactaaaagcttaaccttttccaaatggcaaataccaattcattaacacattcttcatctttttccctacaaaaagaaaagaaaaggaaaaagtatagtttccatattcccaatgacacttaacaatgtacttgtcacttgtgtacacactaatgatcataacccaagtggcttaagaaaatagaaatgaatattgaatcgacgtgttaccttctaatataagattttatttatttattttatgatctttctttgctgaaattatgaacaataataatttcgatatgagtatcgtatactacaaaaattcaattatttccacccgttgcccaaaactgttctaccacatgtacaagttacagaagtgtgtttatatatagatatacaatgattaatattcgatgaagacaccgcaaaaggagccaaccagattgcgccaactcagcaagggctcacatgttcttacccaaaggaaaaatctttaaatggctgctccaaagggtcccacacacagtacccccaaccctgccataaacaattctgtcttgccctgacttaaaacgagtagtccaataaaaatccagctgttctccactgccaatagtcttttcccattaccaattcaaaagaaaggcccactaaacagtgacgtggcggatccttattgggacgaagccacacttcgacgatgggaccggtcaagcttggtcaccaaagcggatagaacttgccacgtggcgtccccttgttcgataggagtgttgaatagcagggcccgcctgaccgtggggtccatgaggtttttctgtatggtagagatattggtcgcggccacgtgttcaagaattcttcccaacttccccacgaccttttctgccaccgtcaatgatatctacggccaccggacagcctc

SEQ ID NO: 2370 - DNA, 2273 bp, Cannabis sativa
gagaacaaaggcttgatgtcctctatattaagcccatgcttaatagcatagccaggaatagataacaaagattctaggcaaagccactgcaccattaacgacaaatcagttcaaaagaccagagagagaaatagggagagagttataaaaataatttaaggatctgatggattattcaccttccaattcattagaactgcacgtcttgttcgcaccaaaactccaacaccgataagatcattgatattctcaagaaaagaaagaaccaaaaaatcgagcatagctttgccatctaattttgacagcaacttgtcattttctctaataaaatccaaagtttgagtggaaaacacagacactaaagctctgagggcaaaagttaatgcttcatatgctgcaagacaaatttctgctccagtctgccacaatttccacagagatactatcataaaatcttcaaaagtaaatcttaatctgaacacgaatctaaaaataatttaatctgtgaaaactaaacttggtacacacctctgaatcacaagctggagatgaaatagtgctctgaaagaaactccataaaaacttgaaagcaaaatctaaaggataatcactttcaaactgtgcacaccaggatgatacaagtgcaacagtcttcatggatgttatctgttgatccatagaaattcaaaattacgaacaaagtagtttcttcagcaacaaaaaatgcatattaagggaagaaaaagatttctactgcataaaaaggcctaaaataaattaattggcagcacaaggtgactcagaaaggcaaggttctaacgtttaagttttaacagataatgaaaaaactactccaatttaatttctttgtcctggaaagaataattaattggaataacagatgttaatcatacagcttgaagcaccacagtggtagtggaagatgataatcggcgttgacttgggcccccaagttttcctttcacagaactggggatgttactctccatcttaatgctagaagagaatattgaagaagacaaggttgcatatgagaccaactcttcctgcaaatcagacaaaatagtcgtaccacaagatcataacagcaagtcaataagaaacaccgagtaatataaaaacttttaagagctctgtccaaaaagtaaggtgtaccatgatagaatggaaaacattggtaaactttttatataaagcagcagactctgcataacccagcttattaattgtctcgcttgaaaaaaattctgctctggttctaaacttgattccaaattcagtagtcctgtcttgcattatctgaagctccagaaccaagctcaaggtaaggatgagaaacttaataggtagatactccaaattttcattttgactgcagatattagtaccatgattttgaataaactgcatacaaaattggtatattatgtcagaaacttcctttgagagagaaaaacaacattgcatgaaaattcctaaaagtaagacataataatccaaacactaatcgacagcagaaatgccgaataaccatcaatgcagataacaaataaaaacagcgggtaaaatgaaggctcaccatccatatgggcatcaaatgacactcctccttgattgctagaaaaagtacccttgcccatctctttgcttcagattcccatgcatctaagtcttcatcgccataagtagaaaatgaattatttttatagtgaggacttgtaaacctgctggggaagtcatggaggctcttcagaaacttaaactcagtactggaacagttgactctgcaatgcttccttctgcaccccataagccattcttgtactttgactcttaaagagcctagaaattagagatggagatacaatggttagcctccatgtccacactgttaattgcatggatcaagtttcaatgtctcacatcaaactatcaaaggagagagataagaacaaggcacagacaagtgatgggggaaataaagaattttttttttttttttgaaactagactccccgcctaacactcaataagaatttttgcctctataacagtgttatttactgataacatgagtagatgtattagacacccccaaaaaaagcaggggaggagaaaatccaacacatgtaacatggaagatgatatgataagtctatagccaccattttatagtcataccttgtgaagtccaaaaagtaagattgcaacttgacattgcacagagaaataatcatataaacattcaaaca

SEQ ID NO: 2371 - DNA, 1192 bp, Cannabis sativa
caaaacatttgggttcgccgcttctagtttagactcaaggatcaaatcagatagctcagaaatagtccctggtgtactgctcccttcattcaccattctagcatcagaattcttagtatcagttttcgaatttccaccgtttttgaggcgtctcggggttatcttccttcttttggtcttactgtcccctataccagaattattaacaatgttgtcatattcaatcggcacttcaaagagttggaaaggtgctgggttactagtcttttgaattgaattcacaacacggggatctaaaggaactggggatttcaagctgtatggtgctggtgttttctcttttagctcttcacgcccatcaccatttcttttcagatttaccgctccttctctctccatacaattcatatcaccattagtcttgccgtcctcccaacccaatgacttacccaaaagagatgtatcatgattcaaaatcagttccatgtcctcaacacaagaaaattgcatattggaagcctcagcctttttaccatgagatagcatatctgaattcttcacattcccagaagccgttcccaattgtacacttgcagtaggtgaaataacattattcttacagggagaatttccatagtgagggtgcgaatagggacctaacttccccttcccaaaaatgtccagagtatccttcttctcatcaacctttagccatgttccatacccctgtttgagagaatttgcctcctcctccaatcttcgaatgggttctaagcaaaccttcaattcatgaccaatacaaccacagttaaagcacatatatggtaatcgatcgtacctgaaagggagccatattttacttccttcatgaggaaataaaaagcccgggcaaataggtttttccagttcacaccagactttaaatgtgaagaatcctttggaagagatctttgcaacatcagccttttgcacttcaattagttctccagccataccagcaagtctttctaggttcttttgagtgatagatttaggtggtaaggacaatattctgccactcaattgaatcctagaaagacaattctcccaattagatgggagcccattcatacggtccaagattagtgtgccattagaaagaaaccaagggttcttgaggagaatacggttcaaatcttgggaggatttaaaa

SEQ ID NO: 2372 - DNA, 1071 bp, Cannabis sativa
aaaaatagtatttttataaaaaaacaattgtgttacattaaaattataatcttttaccaaaaatttaaatttttataattcacaaaacgggaatagattagaaagagcgagaagaaagtactagtaaagatgagtacaaatacaatatatatttcctatattatatactaaatagttttggtatagcatgcatagagatatatagagaacaaaactttttaaaagtagaaagaaagttaattgttggcaaaaagaaaaaagtggtacatactcaataattaaagttattctcaccatctcatgtattgtatccataaataatattaattattatatttattacatttttttacctcttaattttactccctttctgcatgaaatgagaacgtacgttacgtacgtgcatgggcgtataatgtataaaaaaaattatatatttcattttgattatttaagagaataatctggctggattaattattgagtcttgttttatttatagatctataactcttgtccagacattaattatatataattttggattatatattaccatactatatataagttcatttattctgtgtaaatatatgcctttaaagtacaacaaacaatatatataatatatttatatttatataaaggtacgtataccgaaagccaatgaatcagttacttagtgcacatgattaaaaaaagttatattttacgcaaaaacaaataataattaaatttagagacaaaaattgatgtgctatcaaccgagctaataactccaaattataatatttagttgccacccatgggtcataccacacgaagagacaaaaattaattaatacatgaacagttcttgcccaaattaattaaacaatatattgtaaaaaagagttgttaaatagattcatgcatgtatgctcgttacggcaacatattatatgtatatacaaaaaatatgattatatatgtgtgtataatatgcttatttatttatttatttatatatgggggagttctatagtgcagcacgaatttcgtgccgcactaaagcggtctgcgagtggc

SEQ ID NO: 2373 - DNA, 2145 bp, Cannabis sativa
ttaggcatgtctcgctcaatagcaggacttggcactaactttgttcaacaaagcataattggctaaactatgagcgaccccattcacttccctaaacacaaaagaaatacccataacagaatcatgcaacaacaaagatctaatacaatctagcaatccatccacatctctacatccatcctcctttttctagattaattggatagcatgtagacaatcggactctatactaaatcgcctatagctcctctgtattcccagtcgaagaccggcctgaatagccagcagttcagcgtgcaaaggcgacacttcctgctgcagaaacgtagcagcagcaaacaccacacgcccatcaccatcacggacaaccctccccgtacccgtacccctccttcccttcttcactcccccaaccacattaatctttaaatcaccacccccagaaggacaccaagcagcctctgcccgctgcgtctgacacccttcaacccgaccttgcccttgaaaatcacacagaaacttcgcacaccactcgactgcatcagctggccgcggcaccttaccaccatgcttcgtgttattccttgtgaaccactgctgccaacataaaatcagaaacaattcatagtcctccttggaccaaaccttggtcaaccgcatgaggaatgccataacatcctcctttccatcacgacgaagctgattgtgaaaaccactcaatttccaaacccccttattagcccgacaaccccatatcgcatggaagaccgattcccaaacctgagtattacaccgttgacaaccatgatcaatatccatacctcgagacgcaagggcggcatttgttggtaaccaagagtgagccaatttccatacaaaatgtttcactttcggagggatcttcaatttccatagcaacttccaccactcccttacatgactatcatcagtctgccctacttctttctgcatatctaacgccattctatacccactccgaaccgaatattcgccattgttactatagtgccacagaatcttatcttccaaaccagacctcgcaacaggtaattgtaaaatcaaatccgcatcgtcctcattaaagatggccctaataaagttctcatcccactccccattctgtagtttcaaatcgattactcggagttgcaccgggatacttggcttatcatacaccttaaaactacgaggccgaggtagccaaggatcctccaatatccgtaccaaattcccatcaccaatcctccatctatacccattccgaataatcttcttcccccatatcaaactcctccaaacaaaagacccgttggccacttggcatccaatacccctttatgaggaaaatagctcgctttaagaaccctgctgcacagtgaagtcggctaccgtatgcatctccaaatttgcttggcaagcaaagcttgattaaacattccaagatcccagaagcccaatccgccttcctccttaggtttacacaaatatttccacttgcaccagtgcgtcttcttatccttctcagttgatctccaccaaaaccgagcagccatcttgtgtatactattaatagtactcttgggaagccgaaaacaactcatcatataagttggaatagcttggatgatagctttaattagaacctccttccccgccattgaaaacatagacaccttccatccccgtagcttgttccacactcggttcttaataacctaaaacaattgcttcttattacgccccacaagagacggcaatccgagatatttcccatggttatcaaccaccttcatacccatatagactcccattgcattcttctcttcatcacccactcttttgccaaagcaaatttcagacttattaaagttcacctcctgacccgaagctctagcatattttcccagcaacactttaaaccggtgacaatcattcatagtagcatcaaagaacaccatactatcgtcagcaaaaaaacaagtgcgaaactgtcaatccctacctaccaaaccgaactccagtcaacctccccgctgcctcctcattctgaatcaaacttgaaaaagcttcagcacaaattagaaataaatagggtgacagagggtctgttgggttttatgccct

SEQ ID NO: 2374 - DNA, 2980 bp, Cannabis sativa
tcattgtaaggaaaacagagatttggagtctgaacctatttagttaatctgatatcatatccaattgataccattaagaatgtaagaaagagcagaattattcaaccaactcttgactaatgctgaattttattacaaggaaaaaataaaataaaaaaacaatatacacttcaagctttttaggaatagatcagctatgaacttacactgactgggtatgagtctcacatggaaatgtttatataataagcttacatatccatggcagaacacattcacaagggattaaaaaaaggtggcccagcttctacttcattgtttcttagtacattgtaaaagaatttgaaaaaacagcgaacagacgcgggcagagactgggcaacccgaaagcatactcgattctctgtcctcgtataacttaaaacttcaaggctacaagaaacgggcaactactgaaaaatttctacccgccaactgcagccaggaacttgtttttgcttacaggttcttcatgcaacactaccacatctttgagcttttcaaacagctcctcaagctgatcaacaccaaacttttgaaagtctagtggtttcttgtatctttgctcatatatttcttcgaaacaaccaacgaaaattcgacaagaatagctgactagtatctcttgcagctcgtatttaaactgctctagttggtaatcgttatcacattgagtcattgtttccaaattagtcttttcttggttcagtctttcatcgtgttcttcagtgactattctttcctcgtctgacaactcatcggatgaaacattacctgtgacattatctgtgcactcttcctgagatgccttccctttcttattatccttccttgttaaaatcataggtggtgcacttgggcctgttttccagttccaaagatagacaaattttctttggcctttaccgtccacagctattgtgtcgctcatcttattgaaaaggtttacaagcttaactacaccatattcagatacataaagaggcctcccgaaaactttatggtagtcagcaggaactcggttgagaggaaggcatcctcctgaaagttcaagcaactttactagctgaccctttaggccattcaagtccccaggctgcacccataaagtagagtcactcagatcagcagaaatagcaggccctgcagaagcttcattcaagccagacggtacactgtttgacctcagagctgaagagttgtaaggcgttatataactactgttgtattctgtcagtgactgtgacactatcgacaaatctcttgagctgtaataactttgtgagacccccctatgtacaatggcttcttcttcattttggacattgtcattgatctgacaccccatgaagtaaccagctggtccagcacgagggggaattaaagccctagaaggtggagcaaagccttccccgcgagccacgcttggccagtcccacacaaactttccagcattgcatagagcagatgaaacaccaaccccagaagggataacaagaatcacggtataaccccgttgaccaagtatatgaagtgctggagcaaaatcaacatccccagatattagcataatgaaggaagggggagggttgtctagggcaaataaaaacatatcaactaaaatggccttatcggcagcatcctttcttccatttggaacatcaatgagtttgacaccagttctctggcaaccctcccgaagcctcctggggaaggcattaaagtcaccataggcagaaaacgtcgtaacaactccttcaattaaaggatgcagcctcaaagccattctaatattaccagctacatcttcagggcgaacatcacttgggacagggcaattctcaatatcccaaaggatagcgacgtgaccatcagaggagcttcgacttggctggttgaatggagcttcgagtgtgtttgtgcttgaacctgcaatatgtgctctttgctcataggagtccaaacgcactagtgacgctgatgtatttgaataagccatgactgctcaactaaactaataattctgtacatggaggataagcaagacaaataatatagattaggattgttacaagctgatgcaaaaaatgtgcaagctgcagataacactgactacacatataagaagcacgagtgctgacttagccaatcaacaatttcaatatttgaggtctccctctgatataaaaaggaataaaaagagtcgcaaatatgacagaaattactgtgaaaattaaggcaacacatcggaaattataaggcacagaagtttcacatgcaatagatatcaaccttgcaattactgaatctgtgttgtactctgcatgcaaagcttttgtatatagatttatcacagagaaaccatggtcaagcaaaaccatgaaaaataggactaaacctaaaactattaatttaagcatgttagcacacatgtacatctgtaatttcatctccatacccactagatagcattaacactatttctagttttctacactgtgaacttgaaggtttcaagttctacaaccaccaaacgagtccttgccaaagggtgactctaactataaacattataaacactaatgtcttaactaattatctatcttattaatgttaggccaaacttttaccaaatagttcaccagaatccatggcaataaacataattaattacatatgtgttgttccttatcaatgaaagattgacatgaaataggaatctaaaaaatctcagctaaactcaaaacaagcaacacaatatgaaaacccattgtaacacatgattccaacatgattttcaagtaagctccattggctgcataggcaaacgacataccatatatttggaatgaaaaacaagagaaacaatctgttaacgacagctgctaacaggaaatttcaagcaactgttttccacgcatttgacaattgcaaagaaaac

SEQ ID NO: 2375 - DNA, 1204 bp, Cannabis sativa
atagaaactttcattgtgattgatgtaattgcttgtgggtcaaacttgaaggtgattaaacattaggctcaaacatacttagacaccataatttttccttagttatattgaataactatatgggtcctctctatttctctctatgtttttctcttaattaataattattgagagtattgaaataataatgggtcagttttgaactgaaaggcgtgctcataacttgagagtagaccagctcatatttgtggtccaataattcatacctctcaacaacttatttttcttcttttgacacagcaatgtggttctgacccctccacacattaaataccaaactggtcttttctgtagtagcttttttaagggagtttttttggggtcccctctttcctccatatctaattcaacaagagtagtcattcccattagtgctgcattcattgttcatgatgtattggacaaggttttgcaactaaattacaaagtataaaaccaccataattaaaataaaaaaaaaaatcatctgtatctctacagtactttctatcgttggtaaaattcatatataatatttaaagaacaaacctaaagtacttgaaacatctctatttgtctctccagagtatttacatactctttaaaaactaccaaccttttttaaccatacttatacattaattaactggcagatgagatatgctatttttttcttcctcctaatgtgaaattcaatctcattttagagtaatataggtaaacatcatacacacatttattgatgaaaaatgtggatgtgaaaaatttgttgtccccatattaatattactgactgtcacaacttaaaagaaattgttcacttgaataaagtattaggacacttggcattgaggaattggtatatgtaataattaatgttttatttataaatgtgtaaagaacatgatgccaaaggtaagcaatcacatgttgcttggtttttcataaaacagggaacttatccctttaagctgagccagtcactcactcactcactcactcacactcactcctcaccctctgtagtacaatgtggggtcactcccttaaggatcatccaagttcaaattgcacaataggtcccacaaatagtaaaaatccacactaattatgggcttttggccccccactgaaaatggtatgggatgagagagagagagagaga

SEQ ID NO: 2376 - DNA, 2822 bp, Cannabis sativa
ctgatgggtgaattgaaaagcaaatctactctaccttggtgtatcattggggatgttaataatgttacttcccaggatgataaaagaggaggcaattcttatccaaattggttagttgatggcttcaatgaaactttgagtgagtgtggcttattcgatatggagctgattggttacccgttcacttgggagcgtagccgtggttctgtggattgggtggaagtccgcatcgatcgtgcgttggtgagtcaatcttggttagatatttttcctctagcaaaactttataatttagaggtttctacttctgaccattgcccaatacatctgcatactgtcaattattgttatgaatgcttctaaaagaaatttttcgttttgaaaattcttggttaaaagaacctttgtgtcataagattattgaggattgttggggtgttgattctttactgtccattactgagaaaataaagaattgtggggagaagctttcggtatgggggttggattatactgggaatttttcaaggaggataaaagattgcaaaaaggaggttaagaagtggaagaggggtagggacgtgatttctatagagaaccatgagattgcttcggctaagcttaatgatgttctgttgcagagagaggttttttggaagcagagaagtaaacaactctggcttcgggaaggggacaataattcgaagtatttccatgcggttgctacagcaagaagaaggaacaattcgattacaaagcttcgaaatgatgctggaaattgggttgattggcagggagatttaccattgattgttactaattatttctcgcaattattctcggctactgctgttgatgtttcgaatgtggttcaatgtacccaaagtactatttctgatgaaaataataggctgctgctagaaccagtttcggaggaggaatttcggcatgctctatttcaaatgcatccagataagtctccgggtccggacggtatgaccccaggcttttaccaaaaaagttggcatattgttggtggagatatagtgaagtttgtccagaattttttcgtcacgggttcttttccaagcgagttgaacaacactaatatagtgcttattccaaagaagaagagtccagagatcatgtctgatattcgaccaatttccttgtgtaacgtgttgtataaaattatttccaaggtcttggcgaatcggttaaaacaagtgttaccctcggtcatttcggataaccaaagcgcttttattccgggccgtttaatttctgataatatcatggtttctttcgaaatcatgcattatttaaaaaggaaaagaagtgggaaagaggggtacatggctattaaacttgatatgagtaaggcatacgatcgggttgaatggatttttattgagagtatgctgaggcgtatggggtttaatgctcattgggtacagcttatcatggtttgtgtatccacggtttcgtacaatgttattcatggagggaatactatgggacctatcactccaggtagaggactgcgtcaaggagatccgctatccccgttcttatttttggtttgtgccgagggactatcttctttgttgaaggattttgaaaggcataattatttgactggttgtcgggtagctaggggagctccaatggtttcacatatgttgttcgcagacgatagttatgtctattgtaaggcgaatgatagagaggcacaaaatgttattcgtctcctgcacatgtatgaacaagcttcgggtcagcaagttaattttgcaagtcttctgtgtttttcagcaagaatacttcaacggaagtgcgaaatcggatgtgcggcttgttgggattgcatgaagcggctgctgatagcttctatttgggtcttccttgtactatgggaagaagtaaaaatgctatcctgggttttttgaaggaaaaaatgaggaaaaggatctttagttgggaaacgaaatttctttctaaagcgggaaaagaagtgttgattaagtcagttgcccaagccttgcctagttatgctatgagcgtcttcctcttgactcaagaaatctgttctagtcttgaaggaatgatggcgaaattttggtggaaatcacaatcgaaaaacacaagcataggtgtaagttgggtgagttggaagcgtctttgtcaacataaggatgttggggggctaggatttcgtgatcttagggattataatctttcatttttggggaaacaaggttggagactacttaccaaggagagttcgcttgttggcagaattttcaaagcccgatactatccaaatggaacttttttaaacgctgaattgggtcaaaatcccagctttatttggcgaagtatatgggctgcccaggggctccttaaaaagagtgtgagactctcaattgctgatggttcttctgtgaacatacttaaggatccgtggcttcctaatgctactaatccttttgttatcactgagaatcaaggactccaaaatcaaaatgttcaaagtctaatggttactggggcaaggtcatgggacttagaaataattgatgatatgtttttggagagagatgctaatcttattttgagtatacagcttagtgattctgttgagaaggactcatggagttggaatctcgagtcttcggggttgtactcggtcaaaagtgcgtacaaatacctccaatcggctagtggtaattggctctttttggaggaaaatagttgctggaaaaagctgtggcaacttgttattcctcctaaagttcgtcattttttatggcgtgcttgct

SEQ ID NO: 2377 - DNA, 1488 bp, Cannabis sativa
cagctcagctccctttgtggaaagataaaagccaggtggacttgattggactcatcctagtccactaggcagcattgtcaagaaaagagagcatacacgcaaaagagagccacaataagttgcaattccatccttaccgtttcatgatttggtatatttggctgggataacgaaaatataagaatagaaataaaaataaaataaagtaaaatttaaaatgcataaaaaattaaaatagaatacccattctactaaaatagtagaaaaatcataatactttagtactttaaaatacaacaaaacaaattaataaaaaaaattgatttatttcttttccattacgtccaattttagtatactatgttaagtactcttataaatcatatattgggaagtcaatcagttgcaatgatatgttttcattttttttatgcaagtgtcaatcaattaataatttcaaatttctatagtgatatattaattttattttattttttattatgagacttttgaagttgagtaatcttacaattttttttttgttcatatattgattattgcattacattaagttaattcaatttgtagaagctttctttgaaaggggtggactctagtggatcgagtttgatagcttgggatgatttgtgcaaaactaagaaagaaggtggattgagatttaggagaactaaagaatgggatgaagcagctataggcaaatatgtttgggctattgagtctaagcaagatactttatgggtcaaatgggtgaatacgatgtatataagagaaggaaattggagggcctatgaggcatctccctccagcagctggtacttgaagcaagtggtagaagtgaagaagagccagttgatggggttgaatgcttttccaaacactacaacatgtatgtattcgataaaggatggatatgctaaactttgtccttcttttcccactgttgattagcaaggaaaggtatggaatagattatctataccaaagcacagttcatgttgtggctggtggtattagatagattgagatttaaatcacaattgtttaagtacaacatatgccaagatgagaaatgtccaatttgtagactgaatagggaaacttttattgccacttgagtgttcatgttgggttgaaatagaactgtggatgcattggaacacgacaaaagtggctagctagagcgaaattgaatagatttcggcgcaaagtatttttagaaacattagcgacgacaatataccacatttggtggaaatgatgctctttggaacatgaaaattgatacaatagatgtaattgttaaaagaattaaatatgatataaaaagtagaatcaaaagtattttgccaaaaaaagtagccacacaggatatagtgtggtttgatcttttataataaagagtaggtctatgataaggatgctgttaggatgtaagtttgtttgtgtcaagacaagtgatcaaccaac

SEQ ID NO: 2378 - DNA, 947 bp, Cannabis sativa
ttagatcacgcttgagataacatgcatgtgagcgtaaggtccatttcattgttgaaatttaaccttaaggtatttccaaatctctgtagcatattaatcatacaaaatactagcatattagcatattaattcaatgtctaattaaggttatgatacaatagagtgggattttattgaaggaatgttggtgtggctttcaaatttcttggaaattttgtcaagcttgttatgaattgtgtcagaactccttgttttagggttatgtttaatgggaacatgcatggattttttgaggcaaagaagggtttgagacagggtgatcccatgtcccctttgttatttgtattggggatggaatacctatctaggataatgaagatggtgggaatgaaagaaggattcaagtattatatgatgggtgtgctcaactataaagctaaattacttgtgttttgctaatggtggttatctcttgttttgtaatagggatttcaaatcgattaattacatgcttcaaggtcttaaacttttttctcaaatatctggtctttagtctagtagtgaagcaaagtcagaggtctatttttgtaagttggcagaaagtgagattcaaagggtcgtggaagcttcgaaatttataagaagtcaacttccatttcggtatttaggctttctgatttgttcaaaacgtctttcagctacataatgtgataaaatgacccaaattaaggattagaatatggagcacaaggaatttattgtctaaagagaaaatttaattaactcaatgttattggaaatacattcgtattgggctcaaattatgatttttcccaaaaagatgttgaacaaggtgaatgcaatctgcaagctgaactttctatgaaaaggaattgctgagacgaattgtgttggctatgtgccttgggaagacatgcatgtttaaa

SEQ ID NO: 2379 - DNA, 1489 bp, Cannabis sativa
tgttgtgctgataggttcttccacttgctagagagcattttagtcctgaaagacagcgggagcttctctaccaaagtttacgtttgatgcccttgaagttgattgagtgtgtgttgccgtggttcacaggattactaagtgaagaagaagcaagttctttccttcaaaatatgcagatggcaggttttgtattagttttcagctcttattactttaaaatatctttaaaacctcatcatgccaccaattttttttttcttttaatagaacccctttctagtgtaatctgacttgcatagtcatccaatgcagctcctgcatcagatttggcgttggttactcttttctctggttgggcatgcaaaggtcatcctacaaatgtttgtatatcttcaagtataattggttttcgctctacaaataagctgaagggaactgatggaggtcttggcgaagcagtttctatgtgcaaccctgtttgtttcaccaaggaggaatcgttaaataatcaagcagataggggatatgacagtgtaaggcctgccaagtgtcgacacttgacatccttagaagatactgtttcttgtttgccaggagaaaccgcaaagctgcctgaattatcttgcagtaaccagtcatgccatgtacctacgctaggtgtaaatgggagtgatctaggagtgagttctctggcttcaggaaaatctatgcgttcattggcttttggactatctgccccatccctaaactcgagtctgtttagctggggaacagatataagctctagtgaggatgggtgtgccaaacgaccaattgataacatatttaaatttcataaagccatctgcaaggacttggagtatttggatgttgaatccggaaaacttgctgattgtgatgagtcttttcttcggcagtttactggaaggttccaattgttatggggtctatacaaggctcatagcaatgcagaggatgacatagtttttccagcattagagtctagagaggcacttcataatgttagccactcatacactctggaccacaagcaagaagaaaagctatttgaggatatttcttctgtacttaataagcttacacaactaaatgaatgtttgaatggggaatatgcatctgtcgatcgtagtgatactcgaagagaatataatgagctagcgacgaagcttcaggctatgtgcaaatctataagagtaacactagatcagcatgttttcagggaagagcttgaattgtggccattatttgataaacatttttcagtggaagaacaagataaaattgttggtcaaatcatcggtacaactggggctgaagttctccaatcaatgttgccatgggtaacttctgctcttactcaggaggagcaaaataaaatgatggacacatggaagcaggctaccaaaaacacgatgttcaatgagtggcttaatgaatggtggaatacaactcctgcttcttcacatac

SEQ ID NO: 2380 - DNA, 3274 bp, Cannabis sativa
aaaataaaaagttatttttgatgttagtcgtcatggtaaaaaaaataatattttttcatatattaaaatattcaatttatcttgataaaaaaaactattcaatttaaatgataggacacaatagtataatatataaacacaaatgactagtttgcattctgttggagaaaaaaaaaacatatatatttttttaaatttctagtatagttatatatgtaaaagaagaaagaggagaaagatttcactcaaaaaaaagaagaagaagaaagagaaataaaaaaccagctgcacaaatttatatatatagaaaaaaaaaaatctttcttacacaagaaaagaaaaaagaaatagttaaaataaaaaagaaaagaataaagtagtgccaaatataatagagattttgacattccactaaatcagtacaaataccgacacttaaacatgtatatcggtattgatagacattaaattaccgaaagttattgctataaataatttaaaattgtaggctcttgcctgttcatggattcagcaacagttcgaaaggttaatcgattcggaaatcttgggatctctacttattttcaactctttgaaacattttgtcacttattacacccttcctcgtctccgggtgcttaggtatccaccgtaagcctttcctcgtttgaacctcgcctttaactttaaggctatgtaattttttcaaaaagtaataatattaagaatcgaaaatggaaaatggcctaggacccgattctgatccatccaagccgaacaagtttaccaagcaggtcgagtttttgggcccaatatgcaaaaatggtaccctagtgtagaatatttctaacaaaactgcctaatttgtagaatcaaaactgctgcctaatttgtagaatcaaaacacactctaactttaactaacaatatttctaacaaaacagcctaatttgtagaatcaaaacacactctttaactttctagacttatgtataacatttaataccaatctaataaagccattgttacaaaaaggaagttcctcccctgattgattccataggttaaacacttgctctgattctgaagtctgaacctgagtgagtactggtaatttgcatatcccgccactactaagagctgataataaaagaaaattgataagttgttttgacttgtatgaaaaatgccggcatcacttgtcaagttacatatccatagtttcaggtccagttgaagactttgatttcttatcctttttcttcctccctccattcttgttctttttctttggcttaggcttctcttctgtaactggttgcgtgctctccaagtgttgagcgagagcagccaagggatccaactggaacgcaggatggttaagaaccgtactcatttgctttgcttcttttagtctgagagccaacatgaatgaaacaaacaagtaagcatgaaaaagctttgaaaaacaatatgaaagggaaagcaaatccttcaaatttaaatactgacattagcttttgcctagatttacagttcagcttaaactcagctggagtttgtttctgagaattcttcaattcaggaaggaactctgtaagagcggagaggtcatatggtttcagcttcttctgacggcttcgaagtttctttttctggtaagaacatgtaacatatctcaatatactgtatagtgaaggtactaaatactaactaatattctcaaataaggatgatggctcctaggtattgttataaaacacaatcatacgatggaaggaagaaaaaatataaaatgcctgaaagaacaaatgagcacaaacagcaaacacaatgtcgcaactccaataaagatccatttaaaaaacaacacgctatttacatttcctgaagaagacaaaatatcaactacatttctcataaatagcttccaaaatcccaaaagtaacataagttctgaagttatccaaacaaaatggggtcataggcttaaactattcggcaccaatggtgcccaacaccttctataggtggcgccccggaattgattaacgatattctttgaaagtaattttcttaagttatatgagacccgatacaccaatagtggtatgacaccgatgagggtgctaaacactagtaccttttagaaattctcattaaatatatatacgtatatgtataaaacaaaattagggtattcaaatgactcctttagaacaaaattctgaccttggcaatagtcttctgggcactcaaggtggcgacagtatccctaacctctgcattaagaatttaggaagagactgctaagtaaggttcaatgaatccaacacaagcaaactataattaatatttgtgtactacatccgacaacacagttcaaactcaacactgaaatctagagcatcaaaactaatccataatgtggaagaagacttgaaaagagggtttgcataaaactacatagaaccaaacttactggaataaaactcaagcttcttttcaaacttgcgatcagccttagtggactccgacctacattccatataaataagtaccttgaaagcccacaattttatttatcataagctaaagaaatttaatgtcataatagtagtaccgtgaacttggcttgcccatcgccgaatcttttgaagatatctaagtgcaaaaatataggtgtctgcttagatagaatatgaaaaacagattagggttagtggaaaaagccaatagaacttataaaattaggagagaaaatatacaaaaacacaagaatgacttttatgattaacaaatctctttcccatgatctattctgattatgcattaataactacaaggatttgatggggatgctagacattgacatggtgtttcattcttaatttgggaaataaagctctggtattgtctttataggagaagtggagtatgtacacaagtgaatattttcaaaaatccttcacaaaactactttaaaacctattacagctcctaacctaatgtgtttacaagtgatacattaagtcacatcaaaactttcttttaaatgcataaagacacaaaatctgattatataaatcaaacactgaaaaactaaatctcaaaaaactgttccattcccaaaaaattcatgatcttccacctcctttcctttataaattgctttcatttttttccacccaactatccaattccctttgatttaatctaataaacaacaataattcgtggaatcaatgttaagaactaaaacacaattgcctca

SEQ ID NO: 2381 - DNA, 674 bp, Cannabis sativa
gctccaagggttgtcaatttacttggcaaaataatagattcaatggggatctcactagggagagattagacagagctttggcatcaggagattgggtaacttcttacccaaatgtgatggttaccaactctccaattacgatttcagaccatggatttatcttggtggacaccaatgaggggaatagcatgggtttcaaaccattctgcttttttgaagcttgggctagagatccttcgtgtttgatgacaattgagaagacttggggtactagtggtcaaattaggaagagactctttgtgacactgagtaacacccaaagagcattgcaaaaatggaggaaggaggtttttggcgactgcgataaaaggattaaagaagtttaatctcgacttgcctggatccaaaatcaaccaatctcttcggatctctcctttgaagaggctacaattcagagaaatattacagaactgtggatccataaagagagcatatggcaccagaaatcgagagaaacatggcttaaatttggagatcggaactccaagtttttccatgcgtccacgattataaggagacgaagaaaaaaaattgtggccatcaaagaaaacaatggtgattgggtacgacatgaaaagaggattggccaagtctttaatgagtttttcattaat

SEQ ID NO: 2382 - DNA, 1544 bp, Cannabis sativa
cttctaatattgaatattaactctttcacttttcttctcatattttgttttcattctttacagtcaaactcttatgacttttaagtaaaaaaaaaaaaacagactttaaaaacaaacaaacagtaacaaaaaaaaaattaagggtgtctcccaacagctttgccacatagaagaacattagaaggaatatcatattcattggcaagactatgaactgagttccaaaccctcatatatagttgttgtcccaaatactgtctttcccaaattgcagacctcagattccacatgccttggttgtctagtgacactaatattgaagtccatgactttggatacaccttcacaaaaccaaaacatatcacaattagaaaaatctcgattaaaaagagaaatggtattttataaaagagaagtatgagagttgatgtaagttacttgagcagtatgtcttgtaagagcatccacaaggttgtaggtgtttctctttgcttcagtccattgtccagagccataactgtttgtagtcaaagagaaagaattatgatcaataccaaccattcttataagaattgaagctaaaacacaaatgggatttgcatttgattgattgattgattgctttcttacttacccaacaacccagaaatcataaccatcaagatgccaagactgcatagtgttctcattgttctggaaaacaacttcaatgaaatcatgtagcgaaagcggtacgacagatgaagctactgttgcaggaccctcggaggggagtatttggatcgaatcaacactaaagactcctggaatgttgaagtgatcagcaagctttagaggggtgtcagggttgacataagacaccctattgactgcaaatctttgctttccattaaccaaaggagctgagttttccaatacaattgtctttgttattggtactcttccataatggtatgatccctgaggatttggccttgcagcatttgctgtcaaattccaccttcaagaaacagaacaactattagattacattacatgataaacaataagctagcccaacaagagagcaatgtgtagactcatatggattgtgtgttattgatatgtgtatacctataggttctggcttgcaacatagaccagtgaatttggtaagtaggaccagcaggcaagggtccagaaactggggtatgcgagtttgagtaatgcagcactgaagaggatgtaagaacagtcttggtaaaccttgtggaagcaacaatgtagtaatcctttggagcctggtttaaggttactaagactgctactgattggccaacatgtacatcaagagagtcgtattcattctgcatagtatgcgatccttcaacttcaattagcttcatcttatgtccttgaattctaaagttgaatgaggtagacaatcccacatttgagaccctgaacttgtatgtttttcctgaaaaaagaaccaaaggaaaacaatggtgaatactaattcttctttcttatctaattcttttgagcaacaaatgaaacttgta

SEQ ID NO: 2383 - DNA, 1494 bp, Cannabis sativa
tatatatatatataataggataatggcggaggaacatgggtaccagaggagtgggaaaaaatgcaaagagaaatttgagaacttgtacaaatattacaagaaaaccaaggaaggtaaagctaggaaacaagatgggaaacactacaggttctttcgtcaactagaagccatttacggtcatgatcaaaattccaatattgatcaatccccactacttgttgatcaaacccatcacattattagaccaaactctcttctttatcaataccccaataagatctctgatcataatagccttaatagtttctccattaataattctagtgaccaatttgaaacttcatcctcagacaacaacatgaacaacaaggatgaagatcagaaaatgaaaggcgtagtagaaattagggggaagaagaaaagcagttggaaagctaaagtagaggaatttgtggattcacagatgaagaaaattatggtgacacaagagagttggatggagaaaatgtttaagaatgttattgataaacaagagaaaagagtagcagaagaagaagaatgccgtaaaaaagaggctgctcgtgttgatgaaaagattaatgagttttgggctaaggagaaagcttggattgaagctcgtgatgctgctgtaatgggagctttcaataaattaacagatggtaaaggatcttcactgctacaattaccatcttttcctgaaagatcatcaaactcatcaaatattgttagatggaataatgaagaggagatttcaagcttaattgaactcgtcagatcatcatcatcatcatcaagtacaagtactaattttaattgcttggaattaggtacaacaagtagtaataatagcactactagtagtgtttgggaggaaatagcttcgaaaatgagttgtttgggatttgagagaagtccaagcgagtgtaaacacaagtgggagagtttaagcatttatactaataatgaaagtcacaaaaagagaagagaagaattcaacactactgggcgttattccggtaataataataataataataatcaagattattataataatcattgtgagctagctctgatgaagcaagatgatcagcgtgatcataggattattacgggacttcgattgatggatgatactactaacacttcaaacgtagctgcaggcacatcccacatgaataatcctactaactgctttaaccttctgtttggtgaggaggaaaacttgtgggaaaaatatggctctttgaagctcggtaataaagataggctaaaccaattatgacaagtaagaaatatatatatatatattattatataattatatataatgtgtgtgtgtttcagataaatatttgtagctatgtgattagaagttgctctctcatctcatgatcattatacataattaattaattgacctgtttttgtttaattagaaagttatatattaatctaagcgtacagatttac

SEQ ID NO: 2384 - DNA, 3549 bp, Cannabis sativa
ttcaattaatcacttacaaaaaataataaacaatacttacatatattgacaattttcaggaatgagtccatatataaatatatatatgatatatttttctttatactctatatatacccaaacaagaacttcttattagttaccttaatggaatatccataatgtacaacaaattccaacgaattttctttaatgtgtatcaaaaattaaaactaaataaggaaattgtatatttagagataatagagatggtttagggagctatttaacactaaatatatacacatatatactttcctcacaaaatatataatgacagcagtaagtgataaataattaaataatatatgttttgttgttataattattttgtggatgtgcgtgcgagaactgagccaaacaaccgtgccatgtctcattattaacaatttttgcagagaatccacagttatccacaccatctatctacattccaaatattccaaaattagggttagaggcacatatcgcaagtagtactacatatgatgacatcaaaacaaccaatatatatatatatatataaatatatattgttctactactactgcttcccctactacttgttgtgactacttgtcacacttgcataacatgaatttctttatatgatatataaatccaaaccacaactcatcattatgtacttgtctcttgtactctgatctgatatattattattaattataataacaataacaatattctctctgcttttctttgctgcccatgaaaaaaataaaatgaaatagctgtctctttctctgagtacgtgccaccacagactaattcccttccacacgtgacttcacctggtcgtcacacaatgcgtctgtctccacacgtgcaagtggtgttgatgttgatgatattggtggtggctccggctgtgcccgtggccttggtgctgatgggcatggtgatggtgatggtgatggtgatggtggttgtggttgttcactacctcctcgtgacaccgccgtaatccttctccgctactcaccggaatcttcatttcctggtcgtcatcatcatcaccatcatctttttcttcttcttcttcttttttctcctccgaaataataacctcttccggaacaacttctttttctttctcttctactttttcatcattgcaatcctcttcttcctctgcatcatcacaatcatcgtcatctcttatgaattgcaatctcaaccgtccattttcacgaaacgctcggagaatctccggccgatgaatcctaacctcagtgagctccaacctcccctcctttctcaccgcctggagataaaaactaggttgaccattctggttaagcgaagaaagtggcggcggaaacttcttcacttcatggttttgatacagatgacgatccctaatactcctcctcctaatcccaccacatttcgcttttgtagcagtcgacgttgaccacggcctcgaggtcaaagtcaactcctcgccgccgacgctatccatgacatgatgatcatcctcttccaccctccgttcatcggagctttcgaaaccaagactctccgtgcaggacgtgagaccgttgacgccggcgccgaaatcgtcgatgaagcccattccacggccgctgctgccgtgatgatgatccttcgtcttcgacggggaaaaatacggcgaagaaggatcagctttgaatgaagaagcagctgttgactccaaatcgttagttgaaccacgtcgaatggtgatgttttcatcctcctcggtagtgactagagtaccaaaacctccggttgtttgggaattaagcgtggtcgtcaatggagaaataatgaggttattagtattattattattactaatctcctcatgatcataatcattattatgatgatgaagaggagtagtggttagacttaaaaaagtgtggacgctttttctacaaaaagtaaccatgattgggaaaaggtagttaagaaagaggaggaagagaaaagaaagaggaagagtagtagtagtggtttgataataataataataatcatgaagaggaaataatgaaaaggtaaagaacatgatttccaaatttatttagtttttgtgaaattataaatagaaaatgatgagaaggaaaaaggggtattgagctgggactaggagatgagggtactattaataatatcctcacgccaaagatagggaaaatggaattggtatatatgatggtgtggaatggttaagagagtgccaacgagacaaaaggaggagctgtagtgatagagagagaggagaaattatgaaaggaaaggaaaacaaaaaataaaaaataaaaaataaaaagggctgggcgggtcccatgccgtgatggcctaagattatactctttatttcattcaatctcttatacccacaaacacacacacaaccgccgggccttcttttatcttccaatattagatttctcaatcatcttgagtttcccaacgcctttttcttcacttaattgtcttctctctctcctctttaattatgtctacttaaatctttattttattttattttattttttttgaaaataacttgggcttcaatagaatagaaaaacagaacaatacaagagcaccaagttacaaagaaggtagagaaccattccaaatcaactcattatctaattctagacctatctttgtcattttatgagctaacacattacaatccctactaatatgacaaacagctaggcccggactaaaagataacaagttcttaatgctacggattacatcatccaaaatactattattcaaattacaagatttaagcttatccactattgatttacaatcactcattagcacatccaccggtaaatgaagcaattgagcccactggatggcctgatgaacaaccttggcttaagcaacagcagggggaacaagcccagaaaatggagtagaaaaacctgctttaacccgattacaacattccatgagaaccactccaataccatgcttcctaccatgagaatcagtggttgcatctgtgaaaattttgaatttacttgatacatatggttgtgcttgtgttggtgctttagaaatagcaggataattcattgccacctgaccttgctgcacatccaaatatttaaaaaaaataggcaagactccaatcataaacttcctttgggggaagagtgaactgtttatgaaagatgttgttcctttgattccaaagagcccacaaaaaacaatataagataccaatattctctttatccaaaccttgaaacaaagatatagagtgaagcagggttatcatgatctgtttcctgagcatcctaaactaccatggtgtaatctggtttgggataggcatattattcccaagcatagatttatattatggttagtgttttgggaaaggttaaacacaaaggagagagtaagtaagtttaatcaaagcatagacacaacttgcattctgtgtggcaaggagaatgaaaccattgatcactttttttttttttt

SEQ ID NO: 2385 - DNA, 811 bp, Cannabis sativa
tccagattgtaggaccatgattttcatgtcttcggttaccttagttttggctgccatttccatcattcattgaatgaagctttttaggttttcttctgcctgttgtttgatgttggtgatggatcttatctccacatcatagacaggggcatctataatttgcttccaaaagatagaatgcaaattattctaggaatggattaatccatgagccaatcttttccaccaatcctcagtagatttggtgcgggttagtgaaaaacataaacacttagcaacgttactcacccttgcccctttcatcatcttgttgtacttggtaaggtaagtctttggatccgtgcacccatatacaacacaatttggggcatttttaagtttcttagtattggagattccgtgatccttttaatgcaaggctttaggtcctcatcttcaaaatctgtgagggccccactttatttttggatcaattttgttaaagcgactatcttctctccaacctttggtgtctctttccaagagatcccttccacggaccttgtcgttcaagtggttcttgaggtcattaccatgtggcctcgccctctcactttttccttctcgtacttggttcctaaatgccttttgtgatccactgtagaccaactgttattggattattgcccgttgtcccaccatcttggtttaccgaattgctagggaattttttccttcccttgggctttagtactttcataccagtcctttttggtgttacagggcttttttgggctgaagggcatctgagcgaagaggcatcagtcgcctt

SEQ ID NO: 2386 - DNA, 966 bp, Cannabis sativa
gctcgccttgttgccaagggctttactcaaaaacctggcattgattacctacaaacatacgctccagttgctaagttcaacacactaaaaatcttacttgccttagcagccatgaataattggaacattcatcaactcgacataaacaatgcgttccttcatggtgacctccatgaagaagtatatatgcaattaccaccaggttatattgccccacccaattccgtatgtaaactcaataaaagcatatacgggctcaaacaagcatcgaggcaatggtatgataaactcagcacgactctcatagctgaaggattcagtcgttccctatctgacaactctctttttaccaaaagaaccacaaccttttttattgttgtcttaatctatgttgacgatatcattgtagccagcaacaatgacatggctatcacacacttcaaacagtctctagataaaagttcaagctcaaagacataggttcccttcgtttctttcttggtctagagataggaagaacaaaacatggtatatccatctctcagcgaccctttactttgcaactcttaacagacacggggtaccttggagcaaaactagcatctactccaatggaacccaacctcaagttaagcaaagacaaaggtaaaatattgactgatcctacagcctataaaagtctcataggcaagctcatatatctcactatctctagaccggatatcacttacgccgtgaaccatttgagtcaatttctcacttgcccccgagtaccacatctccaagctactcatcgaatcttacagtacttaaaaagaactcctggacaaggcttatttttccctgccaacgcttctccaaacatatctgcatacgctgaaacaagtctgtcttcagcaaatgtacagctctctttttttgccgatgcagattggggatcttgtcaagacactagacgctctattt

SEQ ID NO: 2387 - DNA, 2259 bp, Cannabis sativa
tttttttttttgtcggaatattaggaaaatttcaaaataataagacaaaagtcatccagtgtactatgtatttaaaatcagtataaaatgttacattattcatgagggtatgtcatttgggatttcaaaattatttgtgatcaaatttgaattgaaggtatcatcattttattaatacaaattcaaaagtaccttatgattattatttaaaatatatatatacatgataataaagttatatattgttaaaatactacatatcaaatgagtacattcccaaagaacaaacctttaaatgtttggttttattgctctccctacattctctctcagccgatttagaggctaatctatgggtatgttactaaatgctttgcattcttttcaatgcagaggaagttgagaattcaattcaactttcatcaatggagtataaataaatttatgtcacacaactgtttgatttacgtttacagtataattataattatatatatatatatttgtaaatacactttaatgcaatatttttaatgatatatgtctatctacgtatacttattactatatcaaatgtaatcattattataatatttttaaacaagattgaatttatctagctggctggcaggacaggactagtctaatagaactaagataaaattaaatgttagagcctatataaatattttaattattaccaaaagtttaattgagaattgatctaatctctttgtttaaaatcacattttttttatcattatactaaatactattttgttatatttttttattattaaatattttatttatatgctgataattttttttttctataattttagaattttaagtgtgcgcgaatctaaaatgcactcctgactcacttatattagagtcggccatgtaacaggaacatcttattaattagttgaaatttacaacaaatttataaatccacaaaatttttttagttttaacgaaataagttatgctggtgaaagattgaaatttctaaaaagtatttttcaaacattaaaattaaaaagaagaaaggctcgactaatctgtaatttttttttaatttttaattcaaaggatatctataaatatatttatcagtaatatttttagaataaatatataaatctttttttatttttctaattaataaaaaaaaattcccagtaaatacagttcctatcaaaatttgaacaacaatctcttaaaaattaatagagcattagaaagataacaggtgactcaaatatggtacggacaccaaaattttatattttgtagctaaaaggggtgacaatatttatattcgtgattataataattattatatattctgtgttctacgtaaatgcaatgctattaaatgagtacctaataagcatataaatgaagtttcgagaattcatttttttaagggattttgagaattgttctgaatggtgtgacatggaaaaaataaaaatttcaagaaaaagctgctttgccttaaattaccataaattattattttattttttgagggaaagcctcaaatatttaattatttggaattttaccatttgcaatgtcatgtcaaaatcaactttatttgctgcttaattaattttctgaaatttttttatgatggtaaaaaaataataacttagcatactatttaagtgagtgtattaatactagagaattactaagagatactattagtgtctaagcaccctctttaatgtcatagtactattagtgtaattaagtgtcataccctccttattttagggaatatcgctaagcaatcgtagagtaccacctatgaaaggtattgggtactattggtgcccaataacaatattattaatgtcattataccaagtattctcactgagctaaaacatataaaaaaactcttcttcttgaagcttcctacaggctttgctctggttcaatctcggttaggttagctgtgtttcttccttttgtctcttcttctcaagcaggtttgagttttcctttaatttctcgttttctttctggttttcttcttctgcttttcatgctttaattaccccctcttttttcttactccccaagaatcatctctttgttcctgtttggcctcattaattactccttcctgacttttgatttaatagcctaatacgtcaccctaatcattatgcatctccccttaatttctcgagctcagccgttgtttaatgctacttctctctcacacctgcatttaat

SEQ ID NO: 2388 - DNA, 880 bp, Cannabis sativa
aagaatttcaatttcaaacaaagcacaaatttcatcaaataataaccttagataaggtaaatcacgccttaaaagataaactagatactttttataattattgaaagagtaaattaagagccttaaataaggtaaactatgtaggtgacaacataaaaattaatatactaatgcaattaagaagtgacaagcatatcaaacatgatagattaggctaactagtgtaagtgaaaactgagagtacaaaaagattggattaataactctttccattgataaaaatctggggctacgagtaagttctctattcacaatttttatatcaaagtaaactttgtctaaggcaaagttgtatgagcataaatatagtagaaattgtaccacttaattagcagcaaacacttcttatatcgtcgaacattcattcttttcttatatttgttactttattcttaaaactataagatttttaattgagagggacacagttgtgctcactaagaaatgttaaaactagggagttaagaatagctaaaaggagaaataagagcaagcatgagttgaagcatactgtgtctatagtaactaaaagtctttcttgcgatccttcttccaatagacctatacttttgagttttgaaattatggcatttccctgagaaaagtaaaatatagccataaatgaatgcattttataagtttacagttcttaaactcgagaaaataataattaatgaattcaattgccaattgaaccgaccactaatacacaatacatttctctaaaaaatgagtacatccgagaaagttgtaaaatatatatagctttgaaatgcaacataacaaagaaaaagatatacatttgactcatctaaagcca

SEQ ID NO: 2389 - DNA, 1566 bp, Cannabis sativa
gatcatctggattcaggccagatcataatacataataaaaaatgttatgaactcttgtgattgattcaaaattggtagacaatatgagtaattatatccaatatatataaggttgaatacaagtcaatcaatgaaaataaggtttaattagacctgaaaagaatcaagcatagctttgagagtcttctctgaagattgccattgtttatcacttgcgcttgctacaaacaacacaactgtgtttccctttgctgttgctttcgcgagattgtgtgaaccagttagagcaaatggagtctcaagcacatatttgtagtactgttccatacattcaacacaaaaatcaaaaacttgtataaaatatatatcaccatgtttttatgcagagcatgagcaatcaagtatgatacatgacaattttaacagcatgataatctgaattccaaaacatagttcatgttacccaacacttcttaaatattttaccaaagttattgtataagaaaagtatatttgcggcataactacccaacattagtaaaactaaccaaacttaaacaattaacatccattagattgtgactaggatgacatatgtcaccacctaattgggcctcctcgtcaatatttatgacatgacccaattagatggtgacacgtgttatcctaacaccacctaacggaagttaacggacagagactaatagaattacagttttagtaattttgagtagtttcaccactaaaaaaagtcattgagtcccacttacaaatgtagaattttgggtagttatgctacaaatattcctaaacaaaaagggtaaactttactacccagtagttgaaacatgggtttattgtctaatcatattgtgttgtccaagttatgaggaaattttcatatctatagcaaacaaattctcaactcataagccacattaatcagaaaaaacaaagaaagagcactatatactagttaagttttgttagagtttatacaaagtctagtgtgctaatttctatcaaaaattttgttcaaaatcgcagttataagaggttctagcttggctctaattcattagaatttcatgtaaatgtataacatagaaaatgtattaccgtctgatctccaagcttttcgatcgaagactcaagaagctcatcaggatccaaagtatttccagtaacaaagggtccaagagaagcaattaacttttcaggacttccaatatcttcaattgttgcattgggtttattggtcaaccttataagaggtgaagctactatctgaaccttcccttgtttttcatcctcaaatttcacctcaacccatggctctgcacattttggttggcagtaattaccagacaatatgttggcgacacgtgtctgcttccatgttggtggaagtatgaattgatatggctccacatttcctacaaatttactaaattttaagtatcattattagcatatacaaagagcaaccaattccattaccattagtagtgtacatggtagaaaaatggccaaaaaatgtagaataatcaaaaacccaattaccaa

SEQ ID NO: 2390 - DNA, 1839 bp, Cannabis sativa
atgtatgcatatatattgtgtctttgtgcaaaaaatatacaaatttatagatatatagcatgtgactatgtggtggtgagtggagtacttgattaccatcattatataccttttttccttctcccaaacaaagaatggaatatatatatataatcaatataatttagatattttttctcataataatgatcttttaacttgttcatcttgatatagattttaaagtgctaatgaatttatacatatataaatcaaaaccaagtatatcgatcagtgcgactgcggattataattatgttgttgactcaatttgaaaaaaaaaaaaattacattgtcaaaataattgaaaaaaatgaagaaatacatatttttggttgcatataaaaaaccatacacaaattaattggtgacgtacgagtgtttttgtatgaattatatataaaatacatttcttaatttactacaaaattaattaattttaagagattggagagtggtattagcagtactagtgatgttactgggtcttgaaactagaacctgccacaccttagcctgcccatctaagcttccactaaaaacattcaaaacgacaccgtttgaatccttttcttccattacagcaaccaaagatttcaccggtttcgagtgacctcctaaaacacccaaacaacaataccttccttcatctccacgtcgccagatcctcaccgtccgatctgcggacccactcagcaacaaatcagagacgttgaataaacacagaatagctctttcgtgtcccctaagcgcgccactcaccgccatatgattcgcgctgtcttctctctcccaaaccaaaatcgaacggtcacaagaacccgaaaacaacaccgatccgtcgtcgtttagagccagcgcgttaactgacgacttatgcttttccaaactcgctaccagcgcgtgacgcttctctccttcgggtttcgcccatacccgaatccgtcgatcggccgacccggtgtaaacagttccgtctggcgatacggtaacggcgttaattgcgtcatcgtgtgctttaacggactcaacgcaacggagatcggatgtccgccaaatcttcaaacttctatcccaagaaacagaatagatcattccgtttttaacggcgaggcctgtaacggcgtcagagtgttcaatccagagtcgtttcttgtgacgacggacgttaacgtagttcttcgggagagcgaaacgccgtaatctgtcgttaattgtgggaagtgtagtcaacagcttgtacggtttgtttgttttagtcttatcatcagtcatcgttgacatcctccacactcggattttacagttctggtgcgccgtaaatagtttcccgtcggtgaaaataacggccttaattgaaccggaggagctatcattaccgttaaacgaatcgacatgagagtaattcgtgttccgatcgtagacattgatttcgtgtactgaagctacgtacagacggttttggtggacggcgatgcaggtgatcggctgctgaggaagacgcggttcgagagtggcgacgcaggcgtaagagacggttggggtttcggcggagattggtgaatggagtgaaggaacagaagggagtgtttgtagagagaggttgctttggatactgggactcgaagatgatgatgatgatgacgtggccgtatcggagacactgctttgatcggagaccatgtgtttggaagtgtgcgaaaccggcacggcggcgtttgtggccgtagtggtggtgcaagtagagaaccaagacctaactttcatggccggcttaattaatttcgaaaagaggaaaaa

SEQ ID NO: 2391 - DNA, 1106 bp, Cannabis sativa
tttttttaattatgtctttttcaactttttagcaataatagcattatcaaggatacaaatttgtttgcaggtgtggtagtttatgagtatgagttgaagattggatggggcaagtctgttgctttgccttcacaagcacttcctgcccctccaccaggacagatggccatcaggagtaaagaggttggatacgattcttgcccttgatgtttattcctgctagtaccatttgtttttattttttttttattttttccatctagaatgtgatacagctcagcactatgacatgtgtccacacgtagattcatgactaacttgtagtaccccaatattacatattatattggtagggtgccacggtagtactttctggtccatcaggtccaccagtcccttctgttccaaatcaaaattctgaactggtaagttaagtttttcagatatttgtgctcataaccataaccataaatccattccctagaagtcttgtatttcttacccgtattttgttgatccaaggttcttactccaaatgttcctgatataaccgttgttccacctgaggatggtaaactccgccatgttattgatacaatggctttatatgttttggatggaggctgtgcctttgaacaagctattatggagagaggtcgagggaacccacttttcaacttcttatttgagctcggctccaaggaacatacgtactatgtttggaggctttattcatttgctcaggtacaacttatttattagtagctggaccatactctgctggtgtcaggctgttcaaacttcaactgaagatcttactttcttgttttgcgttcttattgtttacattttatagagttattttaactcttattgcgcagttgggaagtttgagaaattttgctaaaatggagtcttttcttttgtgtgtttttgtctttttggttgttgttgttgtatgaccaagtgaggctgaagaatgaagatttgtttgttgtgggcagggtgatactttgcaaaggtggcgaacagaacctttcatcatgataactggcagtggaaggtactgcaaacttgctgttttgatttcaaggccaattaattcg

SEQ ID NO: 2392 - DNA, 1551 bp, Cannabis sativa
tgttgttgttgctgcaactgaggatgacccattggtgattgattctgcacaatttgggataactgttgtgggttcagggccattgaagtttgatgcaactgaggagctgaagccagatgctgctgcaagatagcctgctgctgctgttgccgctgatgctgttgaagacggaatgaaggtgaaccggggccagatattgcaggaatttgttttaaccactgatgcgacaaggggttctgcaaacctgcttgtccattctgagttaatcccgacagctgagagttcataaatgccagtgatgatgacctcggtaagttttgaacctgttctttgtgaaattagattcaatgtgcaaacaaataataatatttacatgcctggaaaaaccgaagcattataatggtgctaagattgtcatatcatacaatgagatttatataaggatatctataacaattctaacaaaagaagagaaaggctatctacagaagaggaatgcaaggcagagcacttgtagaatcatcggaagagaagcagaaagagtttgcaagcatcaaagcaacaaaacaaagtaaaataaaggcagttgtattattgtatacctgaggagaggtaagcgagctttgttgggataattgttgcctcaactgacccggattcaatcgctgctgagcagcataagaagccagagccccattagctctcagttgtgagtaccccatcatccccatagcttgcattccttgtaaagcctgcccagcagaattacttccatggagctgtgatccttgtactaatgcagctttttgcctaggctgcatttttgttaaacggctaaatttaaaaaagtaacatttttttaatgattggctaccaaaaattactaaatataagacaaaatagaatattaaaaatgtatatcactggaacacatgctaagtaaaatgatcattgatgagatattaagtcataccgaggttagcatcggattctgcaaattaaattgtgcggcagctgcgctaggcaacactggtagctgcccactttgaccaatcaaagccgatcgtgacaaattccctgaacccatttgctgctgctgttgttgctgagtctgctgctgaattgaagccgaaccaccgaaattcatctgcccgtataagcttgcttgttgcctcatcaacccaagctgctgttgctgactttgctgctgctgaatttgattcaatcgcgtcatcgacggagaccgttgtaggctttgctggagttgaaaattcgacatggaatttacattctgagcttgctgcggctgaagatgggtttttgactggaaatccaatccaacagagggagagatttgctgttgttgttgtgattgggggagagagacgttggaaagtgggggaagtggaggagacgaaatttgaggggattgtgagagagtagaaggagactggatttgtgggttcatcgaagaatttgataaatttgatgggttttgagaaatcatagtgttagtgacattagcggggctacccatggccatggcagccg

SEQ ID NO: 2393 - DNA, 903 bp, Cannabis sativa
tatataaccatcaatccattatgtagtaggcttacataattgtatagtaccatataatacttaggaacaagagccttctgcgctcatcccaaatgccctgacaaaacaagccatttataagaacaatattatgtttagtaatgttaggaacatgacccctcttccctattcggcaaagtaagttgaaacccttgttcacattaccaatggctgctgtggcatgaataagtgttttaagtaaaccatactgtttggcagaaatacagttcttgcattttcatagagaaaataatctgcaaattttaatctgtaatgcaagcttaattacatgactgcacagaagcacccccaaacttaattccttaatcaatgctcccaaacctattgagactagtgatgattttgtattgaataaagacattaattgggactgactgaaccgaacatatcaaaatacgaaaatactttatttacataaatctcaataagagaaattgtggagattaatcctccaaaccctagatttcagtctcttgtgaacttattcaagaatgtaaacttttctttcaggaaagcggttaagttagttggtaggttacttactatttatgctaagtcctactcctactgcataagtactttatttaaactgaactgttctagaaaggctgttttgttagtaatatagctgaatcagttacatgaagatattacctctgtttctgaaatcaataatacatgattcatttcacccagtttcattttctctgcatttttcccaaaaatcatctctgttaaattgcaacctgaggaaaaggggtttaggtttttgtcgcagtcatatattgtacttgtgagattgagttttgtactttgaattgtttagagaagctatccctttga

SEQ ID NO: 2394 - DNA, 4606 bp, Cannabis sativa
tgtctttttgcagccatcacattagagtagttcctttctctaatcaaattatgttcgagtacttaaagttactaatatatgcattgaatttccttttttttttccacattatttattggatcgtagatagaagccttttatattcaatgcgcttatggggtaacactgacagtcttgaagctctccgtattgcctctggtactatttataatgaggtgcttaatctattcttactgtgaaagctcctccaatataatacttgctcttagatttttaagttttcccactcttctgagtgcattgttttcattgtagcactcctctatgtttcttgtagcttttgacttgttatgtacgcttacatgcttgttgagctcaatgccacaaacatatgtgagcggatatggtggagacccaatactcttagttttaatcttggtaattaatgtttacagtaaattaaagaagtcagcgtatgctcatcccctttggcctatactccctatgctttttttgattaaatttgtaaagggatattgctcttatgttctaattcccctgcaatttttgaaaaaaaaaaatggatgctgaacagataatcgtttggaaaatggttcctcgagatgatggcatgcccagctctcacttttataattatgaagctgttcatatatgtaaactagttggccatgaaggttcaatcttccgtttgacatggtcctctgatggagcgaagctggtctctgtttctgatgatcgtaggtgaattggttgtttaaaattatgcgaagtattcatagcttcttaattataactggtattttttcaattggaaatcctctttttaattgtttatgcttgcagcgctcgtatttgggaaatagaagataaaccatcagaatctgttggcatctccctctttggtcacagtgcaagagtttgggactgctgtgtatctgattctgtgagctcaacctttataccatttatgggcacttaagcttttttttgtttcattttttatttcactcgttttcatatatgtcttggggtcaagtaaagaacaacaatagaaaatatgtactgatgttctgaaacaaaagtaataactataattttctaactcttatttctctcagttgattgtcactgctggcgaagattgcacttgccgtgtttggggactggatggaaaacaactccatatgatcaaggagcacttgtaagtggtttatatggtttttctttttgttaaatattcggaatgatattacataattagtaaattaaactgtgccaggaactgatcattcagattgtggatgtagtattatgacaacttaagctttcatttttattcccatgattggaagaagattattacattatagttttagtcttctatgaccttttggaaaggggtacaaaaccatgattttttattctcttcataatttggtgttatacagaggaaggggaatatggcgatgtttgtatgatccaaaattttctatactcattactgctggatttgactcttcaatcaaagtgcatcagctgcagacttcactctctggaagtccggagggacatgctgaggcaaaggaaattgacagaacaaacaaattctctgtttgtattcctagatcttcggatcatattgggctaacagataggtagttctttcggataggagaatatgagtttgtgtgcctgtaatcattcttgacttccaaaaagtatttatcttacgcccagaattacataagctccttttttgctgtgagtcattacctggttccagtttacatcgcagacaaccattttttttttcttttttaaaaaaagaattacataagctccttttctggaagaaagttttgtatttgtaactattttgaatctttgatcatgaagaatcagttgtgccgtaggatgttgatatgactaatatatttaaataatatatttaacggctattcctgtaatagcctcaattataaactgcaattggtggtgttatgtagtttgaacatgtttccttcttttcttcatcaaattttgttattaacaactgtactttactcgttatgcttacattggtgttacctgctaatctgtcatgttgcagtaaaagtgagtatgttcgttgcttgcgattttcacaccaagacaccctttatgtttccacaaacaatggttatctctaccatgctaaattatctgataatggtgatgtatgttggacaaagattgtgcgggctagtgaaaaggtgcccattgtttgtatggatttgctatcaaaaccatccaagccttgctatgaggacaaggattggattgctgttggagatggtaaagggaacatgacagttgtcagagttagtaatgttgcttctcctaatgcagacatcacccttacttggtcagcggaaaaagagagacagctcttgggtacacattggtgtaagccattaggatacaagtatggctatttattcttctctaaaagtgtcagtgaatttaatttcccttgtgttaagaatatatggtgatatgtaaggtttaatgatttattttttctccatttatcattagctatgttttcacggctgaccccagaggagcattgaagctatggaggctgtgggatacctcacaaccttttccttataattcttcggccagtagcaatgtctctcttatagctgaattcacatcttgttttggaatgcgaataatgtgtttggacgcctcagttgaggatgaggtatcccattgttaacttttcctttgtaattattttggatgtgattcattgtgtgtttcttttcctattaataagatatgtaattggaatgcgtatacaatcactagcacatatatgcttattgtttttctttttaaaggaaattttgttgaatcatgttatgtaaataaataattttagatgatggtgagacgaagtgagatgaaaagcctttatgtttattttgaggaaagaataaatagagcactgttttaaagcacattaactgcttctgaggaccacctacaaacttgtttatcattataaaagagaaatgctcttgctatagataagcttgtaagtcattaagtgaacttggtgagacaaaaagctgattgtatcttgtttctataaagttttctttacgattgttgtctctacttttgtaggtgcttgtatgtggagatatacgtggaaatcttgttttatttcctttattaaaaagtgtgttggagagcacaattgctgtatcagatatgaaaatagctgcattatcttacttcaaaggggcacatggaatatcaagtgtcaccagtgtttctgtttctagcctaaattccaatcagattgaaatgcgatcggtatgattaacttttgtaaagtctgctggatatgtgtattctaatcaaaggaaaagaaaattcatgcgcttcagtatataaacatttctgtggatgcaataaaagaatattttgtagaaatactagcatagactgtagtattttagtaactaagcttctcacatgtttatgtatattgcttcatcttcagactggtggagatgggtgcatatgctatttggaatatggcatagataggcagaatttggaatttatcgggatgaaacaagtgaaggaattgagtttgatccagtctgtttgctccgataataaatcagattgtgattcgtctattgcccactttgcagctggttttgcatctgttgattttatgatatggaatttgaaaaacgaaacaaaggtatacttttgtttatcacttaccctgtttttagagaacaatttcattcattaaggggaaaaccttaaatcaccaagagggtcatacatcatacatttccaaatggcctataagatgcaatctaatcccaagcacaacacatctaggagcctaacttcatcacagtattgggccactttactcttttatatatataattatatatatatatataacaaacataaattacttttacttttacttttattagtgcctgaatgtagttcacatatgagcaggtcttgcaaataccttgtggtggatggcgacgtcctcattcctattatgttggtgatcaaccagaaataaagaactgttttgcatacgtaaaggtttgtttatgtctacttgtttattgacagttttaatagctagaataatcatctttggatgctgacctggagtaggtgaagaacacaattagtcatattatttttattgaaaattattaatcattgacatttctatgatatcttggctgcacaaggaaggatttttgggggtcaagacatattctatgtctcactttaataaaaccaaaatttgcttatcttattgattcttttaatagataattttttgttgcttttatgctgtgtcattaaatgctccatgtatttttacatatctttctcttttcttattccgctccctaaagaaatgtacaagattttacatttttactttttgtttctacattaattgttctgcattctttatagagtggacaatgttggtttttctccttcaattagcaggtttttttttttttttttt

SEQ ID NO: 2395 - DNA, 2224 bp, Cannabis sativa
  modified_base (1849)..(1856): a, c, t, g, unknown or other
ctacttctgcttgcaatatcaggtgtatatttctacatgtgaatacttagaaaaaaaaaaaagaaagacagaaaattactatacccagttttcatttttaattttaatttttacatttcttttaacactctttaatttatatccagttttataggtgatatccctgttaataaattatgtgaggttatatttggtactttaattataaaagaaagtatttatcaattaaaattattttattgttatatttagttaatgtgttataaaaagtggtagttttcatctccaacaccagatgtgaataatttgaattacacataaatattactcattacttttttttttattattttggaaattacagatatggcttcttttgccatttaacgtttacaaatgtatatgtaaatttgttagtatttctacgattttttagaaaaaaaatatccagagataatataggtgcgtaggtaactatttggtatccaatattttgaaaaatatcatttctcaataatagtcacgatcaatattacatgaccactatttgaactagctaacaaaacaatatttgtaaaaccatcttactagtcaaaacgagactagtaaaatctgataattttgataaagttgtcatttgcaagtaaataggaaaattttcatttttatggatttttttgacaaaaatatgttttttagaaaagaaaattatgggaacaatttaaaaaacaaatttaaagtaactagaagaataaccagtgccttatactattttttttttctcacatttttcttttaatttttgagataaaataattttttgtttgaataaaaccatatttttacacattatatagaaacctgtaaaaaaattgactaataaatgaatagttatatacattaattaaaagtgagtggatgatgaatactagtttggaattatgatcagggagcaagccagcaggtatgcaagtggaaagacgtgataacaccagtaggaaacctaaacgtgagttcccaagaaatagaggagtattgcaagccaggacagtgtgcagaccacataaggactaatgttcttacttgtatctatttggtcatgaggaacctcaacatagctgtcttcaaaaatggtgcatccattcaattactcaatgataccattaatacaggatgctccactaatacaagtaactataactaactactcttctcatctcttactactattatatatataataagtttttggtgattattgtgaatatatttcaggtataatactaggggataagatagacaagaaaagtagcagtggatcaacaaaggtgtaccagaagacgtacatgacagtagctgtgacaggattattggtgttttttttccattctcaaataatgtgacgaccatgcatgtatcttaattagtatacataccatatatggaagatgttcaacaagtcaataatttaccatatttaataagtgggaaatgatcaaattctacttatactcttaaattaattaaaatgagattataaatgaccaaaaatatctatttggctatttagtactattactttatgacgggaaagtacccctttcttttctccaatcatatttttaaaagggcattgttacaaaacacaagccgtatctagtatcacttaaaggtagccttataaatgattaatgatattatcatgtagtagttattaaattagtttatatagaattatatacttaattatatatcaatgagaaatgctaaagggcaccagtagcaccttcttatctgtcaatatcgttattgttctaactaagtatcgaatcccatataatttaatatnnnnnnnnttagggagtatcgctaaccaatcgtaatgcgacatgtcaaaagagtcttagacactactggtgcctcaatgctcatatatatcaatagtggtatgatactttaagtatactaattaagtaccactagagctctggtgattactaaaatttaataaacaattgaatcagaatcaatatccatcattcaaatgattcaaacgagtcctaaactagcaatagatcgggaatgaattgaataagttactaaattatgactgtctaaaatattaagttatgctctaaaaaaaattaataataagaaatgaacaacggtaattttctttttcgaaaatatgaacaaatattggtaattacagtaaggaacttat

SEQ ID NO: 2396 - DNA, 832 bp, Cannabis sativa
ctgccgctgttttcaggcgataatcccgatggatggataaaccgagcagaacgatatttcctcatctcaaagcttcctgaaccgatgatgttagaaatggcaatcgttgggttagaaggtgatgcattgacctggttccaatgggagaatcagaggagacccatcacctcatgggccactttgaaacatcttatgctacatcgatttcgcactgccccaatcggatcattatcggaggaattcctctccgttgttcaaacgtccactgtccgagagtaccgcctgagatgggaggcttcagcttctcgtgttcccggcgtaccggagcacatcttggaagggagcttcgtgaaaggattgaaggaagacattaagggtactctccacattctcaacccattgggcctggcccaaataatggagacggcccaacgtattgaagaaggccaccaactgtgtaccacaggccaaagtgggaggcccaatcgacccaatctcagtccaatcacacccatacgacaaaacgtttcctcctaccaacctcggtcgcttactgccactgcaatgtcgaacccaaactcttcttcatcagccacggccagcaacaaaacccccaccatgcgccggatgtcggagacggagtatcaagagagacgagctcgaggggtatgttttaaatgtgagaagaaatatcatcgtgggcatgtttgtgagcagaaactgttacaggtccttctctttgccgatgaggacgaaccgtcacctgcggtggaatctccacccccttccccagcatcggaggagcaagcggaggtggaggaaacagtggcta

SEQ ID NO: 2397 - DNA, 3806 bp, Cannabis sativa
  modified_base (2666)..(2669): a, c, t, g, unknown or other
caagttacaagcccaaactgcaattgaactaaaattgttgcaagtacatacatatatggggctttacaagagacataagaacttagtttcctcaaattcgaagtctctttctttatgatcccttagccaagcatagcattgtcttcttatgtgaccctccttaccacagtggtagcatttcctttcatctttcgcttgtgatctgctctgaaatttcattccactacttggacttctacctattttttttctctactatctgaccttgatcctccactggatgagcccaaagctgcaattttcctcctagtatcttcctcaaacagtttgcttttgaccaaatacaaacaaagctcaccattatcactaggaacacaattacatactgactttattagctcatctggcaaagaagccaaacgcatatgggcttttagatcatcatctagtgccacattcatagcacaatataccctttttgtatttcatgttgaataagattttaactaaaaaagtcttagtagccgcggttctcttcttgaacaaagaatttaatttcagccagagttctagcatttgtttctagagctacatgatgaattaaactctcatccatacacagcctaatctttccaaccgcctttcgattcagaacataccattcttcatctgacatctctttgggcctagcatcatccccttcgatgggttttttgtgcaaatcttcacagtaaagataatcctccattctcattttccaagacacccaatttggattattaagtttaatcatgatattaccaacactataaccaaatattttctagacaactgaaaaaacaaaagaaaaaggaaaggataaaagatcagtactttgtttcgacgttacctcttacgaatttgaaaccaaaccccaccaccgtactggaacgcttccaaaagagatcatagaatttccagccccagaaatagtgagagcaaattacaaaatgttaaatatgaatgggccgggctgaaacttttaattgggcccaggcccaaaataccatctaatggcaatgcaaaatcgtggtctgtcagttattctcttcgtcgtctccatccactctccactactcttccctctaccttaactagttacttatgaccattgtcagaatttgtaagagatttctcattgttatggcttgattcgaccttgcagagaatgggaacgaattctagaaactgaatcaacaggtattcaatttcttttacggcatttctgttaaaaatttcgagtattctgtttcaaatacgataatatttatatatgatcaaagttaagtagcatatgaaacaaacaaaacaaaaatagtgtcgcatactgtgttttaagtagcatgtttgttatgagattacttttctggatattttgatcattttttttttgtattatttgagatgtttatctacatgaacagaatggatcctgctgagcaatctataaaaattggaggaaagaaacatcaatggactgcatttgaggattctaagttagtagagtgtttattgtgtctaatcaataatgggaattggaaatccaacaatggtagtaccttcaagaatggctacctacagcaattagagaaattgttgcatgagaagattcctcgatgtgaacttaaagcacatccacatattgattctcgcatcaagatattgaaaaaacaatgtcatgcaatttctgacatgttgggggattctgctaatagatttgaatggaatgcagaggaaaagtgtattgtgtctgacaaaaatgtgtttgatgaatgggttaaggttaataatattttattttgttgaattctttgtttaagtactttgacttctcatgtagttgttcaatttttttttgtctttctatctatctttctattttcagagtcatccaagtgccaaaggtttaagatacaagtcctttcctcattatgatgagttaatagttgtatttgcaattgcaaagaatggagctactgaagaaggtgccactgcaaagggattgcctaacatggttgaagaaattgctaaagatattgagaatgataacattgaaattacttccaatccattggacgcgttggatggtgttgccagcgctagtcagactagctcacgttcagactcatcaatatcaggtaaaatgaataggaagagatttaggagtgaagatgcattagtttgcttgttgattgatgcagtaaaacaatggagtaagatccatgcggcttcttgtgagagcattgccagacttgccaattgttttcaacatcacgctgacgctgctgacaggaggatgagattatttagtgaacttaaaaagatcaatggattgacaaatacacaacgagtaagagttgggaaacttcttgttcaaaatcaagctattactgactatttctttagtttggatgatgagttcaaacatgcattacttgtgcaattattggagtgacttagtttgagttttaggattcagttttagaagtaactttgactattaggatgaagcctttgtatttccaaactcaactgcactatgttatatataatgtctatacatgcatattatgttttcagtaaatgatgtttgatttggaaaagtttttatttatttatatatatannnntatatatatatatatattactctggactatttaatttaaattttttttgttaatcacaattaatgtacagtgagattgtttataatttcttttgttactatgttggttctcatcggactttttttgcactacttactattcaatatgaattaaataaaaatagagatttaaatgtattaaagtgtaaattttttaaactaaatgaaagaagaggatatattagagaatttatttattgtaaagaacatttcttgattctagaagctagtaacactagccaacacacattcatataaatagaaagggaaaacagggaagaatgatcatttgaaaatagagtgtagactttttgtgtattgaagattagatatgacaaatataataataaatgatgtatgttggaaatttttcaaaagaaaacaattgccaacatgaaaagtgttaataatattcaacgttcaaaatttatatgtgactaatattaattttattataataagcagaataatagtttttcctaatttcctacacaccacgttataaaaacatgagacaaaattaaaaagacaatagacaaagcatatggttgggcatttggtctagtggtatgattctcgcttagggtgcgagaggtcccgagttcaattctcggaatgcccctatcattttacagttttttattttaataccttatcaaaggtgacactacattcaaagttaaaacggtgggcgtgaaacttagccatcattttgaccatacattatacacaattgacaattaccatttcaaaggtaacaaaatgaagtgtgacgccagtgtacgaattcccaaattcaacaagaactaccgtgttggcatttcacatccaaattattcatcattatcttttgatgtttcaacaaaaaatttctttcattgacttttttttaacaccttaaaattttttcaaaaagggattgttcgttccaatgtacagcagagatagcctaatgcatatactaaattttcaaacattacactataatacgaaacctcatcattcacggcgcctaacataagactagaaatctatatattcatcattaccgtaattatttatattccttctccacatcgacatacatttacaaatgtat

SEQ ID NO: 2398 - DNA, 2859 bp, Cannabis sativa
cccttaacatagtgtacttaagtgtagaaatgggtcacttatatagatatacttccttttaggaaatttcattgagcaacattttgtgggttgcgtgatgagagatatatgtattattatgaatttgtatattaagttggtatatatctaaaaacagtaacatatggtaggtttcttgtaaagttttttcaaaagagctacgagaatttgatagtttatattttcggataaatacataaaatattaatttttataaaatatttatatttttacgttattttataaaaacacaaaaaaaataacatcaaaataacatcaaaataaaatacaaaagtaaaaaatcaacaacaaaataacaagagtgtaacataaaaatatacaactgtataaaccgtattttatgtaaataaaattaaaataacccgtaaaaaatattgaaaattccatataatttttttttattatttttctcataaagttaacaattaaaattaatatctttaaattaatcaattaattatttttttttttgaaaaaaaaaataattttaaatatctaaatttaatttatttattaaaatatgacttaaataattatttaaaagtatcaataaaattacataattattttttataataaagtatcttaatttgaatttgaattagacgttaatttaattaattaattatattttataaaaagtttattagttatattatttaaaattagttagatatattttttgataaataaatttaaaattaaataaaattttatatatttaaaaaaatataattaaattaaattagatttaatttttattattattatctaaattaataattaagtaacaacatctttaattatatacataattaattatatgtacatcatgatctatcttctgttagaaaaattaacatccattaattaaaaagaaaaatgttatttgataagttttgacggttgactactataaaattaaaattcaaccagaaatctaatttaatttgcatataactaatgttatgacttcaattttcagatccataaaatacagatctcaaaaagttgaactggagttcccaaataattcaactcaagtataatctcaaaaaattacatcaatattatagtaaaatgtttatcctagtatattttcgttgttttccaaatttctaatagtgaatttattcatattaaattacgaagagacatgtagatagagttacgtacatggaaatactgtcctgatttttaatttctgtgggttcagcctcacttgtgtgagtactacttgatacgtgcacttccgtagcgtaattttcgtaacgaattctgacatatttgatcaatcttttggataacatctttaggtaagatgacaatttgagatcagagaggactgaattaatgagagtaaccctgccaacataagagagatttctactactccaaatacggatccattttttaactaaacaatcagagtcagacttactaatcatcccataacagattttaattcccaaatatttaaatggaagtttgctacaagaaaagccaaaaaaattagctattatgtaaagagtaagaagatccatacctgctccaaaaactgttgatttgcccacatttgcttgcaagcgcgaagtgcttgaaaaaagctcaaaaccccttagtaaaagggtggctgctttgtaatcaccattacaaaagagtaagaggtcatccgcaaaaatcaagtgagggagttttaaatgcttacacctaggataaaactaaaaatcaacatttaaagcaaccttggcaaggatatgagaaatatactccatccctattacaaaaagaagaggagacatcaggtcgtcttgccttagacctcgctagaattgaagaaaaccatgtaaagatccattcatcataaaggaaaatttaggtgttgtaacacacaccattattaacttcacaaacttttccaagaaattcaaagcttcaagcaatactcacatttggaccagtttgaacaattcttttatggacctacttcctcaccaccattttcgaacacaagagcttcccataaaaatcaaggaaagcttttataacatcttgcgtaccatctccattttgaataaaataaatggtgttctgcaatcttctttgtttgatactagcataaagaaaatttagtattttcatcaccaagtgttatccaagacatctttgctttttgactaaaaaattgaaaatagttcccatggagatccatctacctctatcgagccatttttgcttgttcaataaaatcttcatttcccgggtgatctctaagagagatctaagcttcaatcagagttttataagcttcattttcctgaagagtcaagtcacctttgctcattatattcaactccctgaaactagcctttaaattctttagatttgacataagatggtacataggcatctcttgtttattaatttttcctccaaccagccaaaattatctcttgaaaagtaatcaagtttccccaatagttaaaatacctaaaaggctctttagtatttttgatacttggataaatagaaagaatagttggggtgaacaaaatcacttttaaggtgacttcggttgtggtacaagtctctagccaatcttcaatttgccaaaatctttccttcttgtttgttattccatgtgaaaaaattatcattatacacatcttcaagaccacataaagcaacacaattctaaaacgacactgtttcatttgcattccctttataatacagccactcctccatagaaagcacttaattgaaatcactacaaaacaatttagggccattagcaat

SEQ ID NO: 2399 - DNA, 1884 bp, Cannabis sativa
atggttaaatttttatgtatagttaatttggtcttgatgagtcttgaatctacaatatataaaaatcattatttatatacacttatacatataaaccatatttttatgtagttttatttttcaagcatgggaaaatgtggaattcttcttcagctttacaatttcttctacattttcattctcatcattcttattagctttttctgcaaagccaataatgaagataaaaaggtaagatttttatttatttatttatttattttttacaaaaatctatttaaattgagtgagaatttatatgatacagatttatattgtgtacatgggagcacttcaagataaattatactcaccagtctcacatcactataacattttacaaagtgttattaataataaaaggtagtatttttcatagctatatttcatcgtgtaattttttcatggtacattttattttttataacttgatttttttagcagtagttctgttgaagattctttagttagaagctacacaaggagtttcaatggattcgcggcaaaactaaccgaagaacaaagattgaagatcgaaagtaagtactcaaaacaaaaattatgtaaatttttgccctattaattttaatatgtactaaatcatacctctaaaactgttaaaaattccttttgaactattgatattgttggatttaataatttttttttttttaattttagtaaggaaaatctaacatagataaaagtttaggaagattgaattgatacatgtcaaaattcgaagggtaatcaaagtctaaggaatataatttagtagatgaccaatcatagaattagtaaaattaaatccaacaatctcaataattcaggcagaatttttaacgactaatttttttaaaaaaaacataatttaagttcaacaacaaaaatactaattagcctaaacaaaaagaagataattaataagacaatgaagtgtcaaaattaattaagcatggtttttggcaggtatgaaggaagtaatctctgttttcccagataaattactttataaacaaacaacaatgtcttgggatttcatgggatttgacaaaaaagttagaagaaatccaagtgtggagagtgacactataattggtgttattgactctggaatttggcctgagtctcagagttttagtgatgaaggttttggtccacctcccaacaaatggaaaggtgcttgcaatggtggtcaaaatttcacttgcaacaagtaattttcttttttctttttttcaattcaatgccatttaataacatataatttgtttttatttcttgataatttttaagtagggtatttgatgcaatccaatattttttatttctagttagattttgaaaattaaattcgatcggtttgaattgaattttaatttgatatccaaagttttaatattaacgtaaaaatatacattaaaaaaaaaaaacacataaaaactaaatatgaatgatcgcgaattcttagggtttttcagtagggatttctttaatcacgtataataagatccattgaaaatcaataaacatcaggtgaaaataaaataaagatttcaatttgatactcaaaattttaatattaacttaaaaatatacataaaatcttaatatcaatatactcgagttcttaaggtttttagtaaggatttctttaatagaaaatgatatttaaatattttttttattatctacaaataaataattaaattagttccattttttattaaattttgagagtgtaatccaatccattacaattaaaattcaactattcacgtccaatccaattataattagatttctaattttctgtaactctggattgaattagattggttcggt

SEQ ID NO: 2400 - DNA, 753 bp, Cannabis sativa
tgtcagtatgcaccatcaatgcgatttcgagccatgcctcgccgatcatctcgacctcgttccacgaagacatcccggcggtactcttttggcggcaagccaccccttactggtgaccgacttctctccctaatgtcacgcccccaacggccacgactaagaggaggtggtggcggaggtggaagtggagattgagctcgcctttcaaatcctttcctatcattaaagaagctctcccttcctcgatccctatgtccccaatccaaaggcattggtctgtcaaacttggtcctccctctgtagatgtcatctggaaaatccagtcgatccctccgcaagtgatgatcaggaaacctgtcgttgtgtctgggaagtggcagatctccaccaataaactctctagggccatttctagcccaagcacgaggaggggacctgtagccattcataatccttcctggggaaggatccagtggaggaccagcaaatcgtctaggaatagcatctgggggtggcggaacagggtaaccccttcgaggactttccccaggtccaggtcgagccctattgcacttgttacagtagtctcgtcttgcaaaattcaggttgccacatctaagacagtacagaaccaaaaaaaaaaacattaatagataaaagaaataagagcaatgatgcaaaggcaaatatagaaagcaagacaggaaaaaaaaacaacttacccaacatccggacaaaaccagtctccatctc

SEQ ID NO: 2401 - DNA, 2418 bp, Cannabis sativa
aaaaaaaagagaaaagaaaataagacaaaagagtataactaaatgcaaaccaatctataatgaaggattaatgattgtttgtgcaacaagcagagtaatgtaaagaaagggaagctaaactccaactaggtagcttgttaactaactagtacatccagagcaaagctgaagttcaacaatcaacttcagcttttttttttttattgttaaaaaatgtctatacataaacaaataaaatgtgaaaatattacttccaaagtcacagacatattagattgtttatataattgtaaacttttaaacttatttttttcttcagttgcattcaacacatggatttggagagagggagagattgagaagtcaattactcagtgtttttggtggtgtgctcattaagccacaagatgatgtcattgaagactgtatctatcatttcatctgtctcaccctcaagaagggaatgatacgcatccttatagaggttaagcttcttgtccgaactgctagccttctcatacagtgccttgctaacagatggatcggtaatagtgtcagcctcgccgtgcaaaattaataatggcagggaaacctgcggcagcatccatcaacagaaaaatattaggggaattgtccagaaggtgttcgggaagtgagcaaaaaggtcgattcgtgagaatttaggtatattacttgtcctcttcaatcatgaatgtatgctcaaattccattgggattatagtaaataaaaattaagcatatttagatgaatcttaaacatggatctcttaagcttacaatatccatattctatcttagccaccttaggtaggttcacaaataacataccctagtgaaaaaaagagagattgaattgaataagctcaatgcaagcaaagaaaccggatcaaagcaatgattcaggtgatccaaaatttataaacgtttatacagaaagtagagaacaacgtacttctcccagtcgatgttctatctcttgtgtagtgttaagcatttctaaggcagtacgtaaccgtggtttatctttataagcaatgacattgtaagctgcctgcattttttgaaaaaaagaaccaaatgagaaaaccttgatcaatatagtatgaagcatgtcaaaaaacaaagtataaataacatgaaggagatcagagttacttaaatatagagaattagcattaaaaaatccagacagtaatttcactttcatacatttttctttaagcctagatattaccactgcagttttcatcctgttctaagagaaaagacgtaccaattttctcttattcaagtctctaaatgcagcctcagccaaatccttctgtggaactaatttcatctttggaagaactttggccaacccaatcaggatctgagttaccagcactggtggatacatgtcatctgcaatctataaacggttttctgttaattaaaggtttaaccataaaagtggcagcagttagacgttcattgattcaaaacatactttgcacataggtgctacaagaactgcaccactccatgcgtgtggttgctttagatgcatcttaagagctacagctccacccattgattggccaaagaggaagcttggaagagcattgaactgcgggttctctgccatcagcattcagcatgtacaaacaaaaccatgagatgctatacagcagatcattactcattaatgactcattgtgtttactttctgtcatcatagaaaagagagacgcaaacagacaccagaaacgtaaaaggcacatgaaagaatgaaagaaagaccagacaaacaacttctgctaatatccacaattaatcatttcagaaaatatcttttcgtcgtcgcattaattgttcatgatgcaggagaacaaagcaaagattttatttcatgttaaaaatccttcacagtgtaaaggtctctaattacaatcgtagattaaacataatggggagaataaatggaaaccacgtacattttgaaggaaaaaaaaaaacaaaaaggcagctcccttcccaagaggaagatttatgcaattcatataactccaaacaaaattatacacaacatctcggcaaaatgtacacagcaacaaaatccgcaattatggcctttgggttccttcccacttcatcacggaatttcaaagcaatgctaaagcttttgttaaaagtcattctacttcaaaagatttacgtcactacttgaatgattcagattttcagctttctacaatcaaattacttactcctaggtggactctacagatttatcatataaggtacggtgcaacttccacaagaaatatagacgtggacaattgtgacagtcagacttctgtgatctgcaaggaaaaagacccagtaagctgtgcaatcccacataatttgggaaat

SEQ ID NO: 2402 - DNA, 4962 bp, Cannabis sativa
  modified_base (3197)..(3207): a, c, t, g, unknown or other
taaggtaagtgggccgaaatacataggccagaaataacagggtctacataacctaatagcaccactggtacctaatagtaatgctcatatatatagtatactggtatgatatacatttattaggagtttttgaaaagaataaaaagttacacttacttttaccatgcattgtactaaagttatttttgataatcgtgtatttttttttatatttatttaaaatatcttgcaaatttttttgagaaatttgaaataattaataatatagaattcaatgtttaaactatctatttcatgcgcatataaaataaaataaaaaaaaaagtcatgtgtgtagcagagtctttgaactatattttcgacgtgttaaattttttcgaatttcttaaaattttgcagaataccttaaataactataacacatacaatcataaaaagattcaaactagataccgaaataaataaatgtgtatcggtacacccctttcaagagatacagtgtagaattttccaaaagttacaattagaattactatatgaatgtataaatatgtttgagatatatatatatatatatacatgtggtaaagtttctccaaataaaaagctcttcgcaatcgttatttctggaaagctgttcactcactattatcgatgctgaaaggtgtcttgtagaatgatagtcgagtttggaagggagttcccggatgagtatcatgtccactctgggtccaatcttcaagatagctaactcttccctgaaaaggagttccaactggctagttatccctcctagcttgatagtttcagatagtcgactttagtagactaattatatcccatccgaaagcgtcttcagctagggtccgtgatcctcgagcccggaagctcattcatattctcagaggccctggtgcttatgctaaacatggagacttcactaaatgaggagttggttaagttagttatttctaactaacttaacaatctcatttcttgcagccgccaactttaagatcttgatcctaagcctataaataccacattgactcaacattttagagacaacttgagagacgagatttcgtgcttagattagaggagattgagagtttgagagagacaagattgaaaggtaaagagaaagatgcagagaaaacaaagaaattgggttcaggttttataagaagaatctcctatagatgaagaagattcttaagtgaaagtgtgagatcttgaaacactttgtgagaactcatcagagaatctcatctcgactgtattgtacatattttcgctcaatcaataaagaaggatcacagtggtattctagaactggattagaaccatagatcacatcgatctattagacttgaaccaatatatatcttggtgttgatttctttattattttctgcatttagtattttctagttttttttaacactgttttattttcgattattgtttttgttgttagtcatgtcattgctaattgtttaattatttaaagtttcattaatttgattttgcaccattagtcttaattttcttacaatgtttaaaaaaaattattaaattaatattagctgaatgaaataaattaaaatcatatatcccttgattatatatatatggatcatttcttaatgagtattacccatgaatggttactaaacaattttaactataaatattaattttaaaaatattaaatcatcaaatttttatctaataacaaataataaaaaagaaatttgaattttcatgcttagtttaactacttaattataaaaaaatatcgaaaaaatatctctttttatactgtatatcaaaaatttgttcatataaaaatatctaagtgaaactcaacttttacttatcttttttattttttgctaatttttttttaacccatagaacaatctcagcccatataatgtgaaagtgagagatttttctaattagatagaaaaattaagcataaaaactcaattttttctaattttaactatttatgagtaatacctattaagagtgcacccacatgtatatatatatatattaattaactaatttataaggagctctcttacttttgaaattattattccctagctctatttgaataattcttgttttgattttgtcaattcgtgattgatcatcatattgctgccgtagatttattgatattaataatctaccaagtcaagacattaattttttgcaccaaatataggataaaacaataattaatctctgtataatgagcaagttataagtttcttgtctatttttaataattaattataaattttagcatatattctatatataaaccttcctgcaggcatacaactacgaagtacaaattactaatttctagataaaattcataaccatatatatacacacaatcatataataaaatataacctttaaaatttatttgtatgcatatagaatagatgaatagttgagtgagcaatcatttttgtagtaatatcacatgaatcaaaatgttctgctcaatcgaaatgataatatattttagaaaagtacatcataattttataatgatcaagatcgtgcgagttattgtattaacttaagtatatatatgtgtggattaaaaggtaattagttagaatttagaactgaagtctatgttagtgccaagctttcactgcattgataataatatgaaaagatatgttaagtggtatctgcaggtatcaagcgagtgacacattattattactagtagtgctgtaaattcgtgcgtgttatattgctcggtttgtactttttcatacttttcaaaaattaattgaatcgtgttatgtcacaaaaaaatatattaagtgtgaagcacaataccatatcattattgataaattgtcgtattagtattgcattgaatactttaaaatacaaaacaacaatgctatatagtaaaaacatctctaataaagagctaaaaatgtagtgtatagttatattttagctcacttaataaaaattattattccaatagtattttaaaaagtatgttaaatttgatacatattaaaagttgtgtcaaatttagtataagatataatattggagcattgttattaggcactagtggtgcctagcaccttctcgatatgtcgcgttgcgattagctagcgatactctctaaaagctannnnnnnnnnntatatgagacccgatacttaattgcactaatagtgataatgacacatatgagggtggtaggcaccactggtgccctttaacatttctcataatatagtatcaaatttaacccacgataaatactactctattatttattattataatgccactaattattataatttattgacttttactaaattttatattctttatttactatattataattatttaaaaataagcaataaagaataataatttttgtattttctaaataaaatatcaaatgactattaatataattaattaattatttacttattttatatctcgtacattgaagctagggccggcccaagctttgggtagcttgggccattgcacaaggctcctcatttgtaaaggccaatttttttataggaattgtttttgtttattattataaatacattaaaaaatttatatttaaatgtttagaaacatatatttgaaaaagaaaagaagtaaaaaactagcaataaaggtcttaatgagcaatttctttttttatataaaaggtccaattttaattttttgcacaaggccccaaaatgtttgggtcgaccctgattaaagcgcaattataaatagtacatattcatttttttagaaaaatactaaatgtcactagtggtgccttgtactcttgttataggtccacctaaatatcaaaatctatatagtttaatataataacttttaggaagtattgatagtcaatcacaaaatgacatgtaagtgttagacactaatagttctcaattttaataaaatttagcacaaattttaattggaaatgtgtaagaagtaggcagggccgacctgcgcctagggcccactcattttaggagccagaataaaaaataaatgttaaaaaatatacatatttttttaataattttcaaaaataccatttatctttatagtaagggtccaaaatttttttttttgcctatagtccatttcaactcagggccgcccctagaagtaggggtgtacatcagtcagtttggttagtttatggtacattttattcaacctgatgtaaagattgagttacaaaaatttaagtgcaacctgcccaattaaaaaaaaagaagaaaatagtaacgcgcctaatgaaattggtcgatttgatcaggttaacccgtccgaacggagtattaatatttttttatttttatattcaattgttatattttagttaattataataataaaataaatatatatatttattaaatttaaaattccaatcacctataataaaaaaaatatattagttttttttttttttttgaaaattttcactgatattattgattataatcgtcgataataacagagaaaataggactgggaataacacccgtccaacagacatcttcatccaactccaaagcaatattttgcgctaaaaacccacatggcagcatggttagcatttctcttaacatgagaaacaataactccggagaaagaggacaaaagataacgaacatccattattaaatcactaaaacaggataaatcaatggatgaagagtttagagccatagaaactctaagtgcatcggtttcaatatgtgtaattggaagctgttgttgcataacccaattgatgctgtgaaaaagtgctttagcttccatttcgtcagaccgaaaacaaccttgaaccggttttgagaaggcagcaatgacttgcccttgatgattcctcaccacagctcc

SEQ ID NO: 2403 - DNA, 1680 bp, Cannabis sativa
caacaataaccctgacagcgagttgtagcttttctcctaactttctgaggttaataatgtaaatcctgtcgtttctacgctgtcataacgctccatctgacaattgtaattcttagtgacaagatgaacttcagcatccaacatcatttgaatgtcagcttctttctgagagagctgatgcgacggagcagtggagctcattgaaagatgtctggagctgattagtgaaggtactaggagcatgccttcatatggcgagatggatgtctcgctattctttatccatgcccttgaagttgctacacttagttggtataatgtatatcacacgctaagtattctaacagccagttcgtctcgccaacatctctctacatatggcgaggttgatacctcgctatgtattatggatatcatccttgcgattatgtcttctgacatgaaatagtttctcgtcaatacgcgagtcaataggtcgtacatccttgtctcgctaaggacttgtgcagtctgggagttataaatataccctattgatttctgcatttaaagagttattccatttaatatttataaataaaattgtcattattttttccggttaatataccctaaaatgaacacgtgtcatcttctgaagtactagttaaatttcgggtataacacttttagagaagccttttgcaaagggtttaaggttgacttggtttttatattttttttttctatggtagcctttttgatgttactttctcgggccacacccaccacagtagcatgcgccgaattgtccctgcccatacccttttccttctaaccttcaaccaagccttctttagactgttggataaggctttgcagcttaccaacccccgtcaaaggagtctccgacgtaactttgggctctttgtccttctagtactgacgagtattttgcgcccctttaatggcctcaaagaaattattcaacctactatcttccttaagctagtttcaatacaatggagttaagacccctgatgtatatttaaccataccacaactttccttgcaatcactttgttcatggccaaaaaatccacactgaaaacataacataggaaatatctcaaatttgaattggatccaaatctctttcccctcacttgggatatatcttctctcgaacacatgtttatttatgggaaatctgatcttgactctaataacatctttcacaatcaattacattagtattagttcaaactgattctaacacctcccctgccatggctcctaaatgaagcacattattttttgttaaagcattgggagggaaaccttttattttaatccaacactcaaccatgttcaatcttgcatcttttcaacaccctgtgaaaggccatttttcacctattaaaatgcctccatgaaaaaatcaagtagcttttttatacacgttattagccaactctttttcctcaaagaataaacccaccaaggtgtgtaacctttcccttttgctaaaacctcaacagaccaacctacatctctttcccatatacacactgttgaaaaaattgtacagtacaatgccttttagctaagacccttcccaccatagatccttctttaaacttcacactcacctgatcattagtctcacactcttcttcttcctccaccataaggcgatca

SEQ ID NO: 2404 - DNA, 1648 bp, Cannabis sativa
ttcccctccccagtcagcttggacagatttgataggtaaattgaattgtttttccactaatgccttccatttgagaaaaacctcaaaagcttgtgatcttagggttaagggaaagatccaagtgtacctgctatagtcatcaaggaaatgaacatagtatttatacccatcaatggagagatcatgggaaggaccccaaagatcagtgtggatgagtgcgagaggttgagtggctctactttgtgaaataggaaatgggagagtatgacttttacctaactgacaagaattgcaaaattttaaatctttcaatgtgccagtgtgtggtaagtggggtaatagacggcttaaggtttgagcattggggtgcccaagcttgcaatgccaattgttcacatctttattgagagatgaatgaaaaatagcatggttacaaccatctgtagtatgagaaaaagaacaatttttattgcttgttggagaattacaagaactgacactatggtcagtattacaagagttgggaatggactcattagacatatcagaagccatatatgcaagattgcattgcaataaagatttggagatggaagaaccttctcctagtaagtaaagaccatctttaagccgccccctcagtagaacttggccagtgttcttgtccttgacaaaacaagaatttttatgaaattcaagaaaaacatgattgtcattagtcaattgagaaacacttatcaaactttttgtaatagagggaacagtgaggacagagttgagattaagacatttatgagaggaagaaggtaaagaagtagagccaatatgggaaatagctaatttcttaccattaccgacagccaatgtgtcatttccattgtagactatagcattgtcaagattgtcattggtgttggtgacatgatttgtggctctagtgtcaataaaccacccaaaatcatcaccaaaatcagggacaacttgaggagagtagttggtgggatcttggtcaatgtccatttcagcaaggtaagcccgagggttggtggggttgggtttgggggtgacccaatttttgtcgaatcgatagtgacatacagccgctgtatggccacttttgagacacaattgacaaatcagcctagtattggtgttgagtccccttccataacctctgatatgagtccgagagggatgttcttgagtggaatttcgaacaccctgctgaaatgggcgaggctggccatttctttgtgttccatatgcaatgttagcctgcatctttaagttcagatcagtaagggagttatgatggtcaagccgactctcatgagccatgagaagagcctgcacttcttcaagggtcagatcatcacttcgagatgtaatgcccgatacaactgagtcatactcaggacccaacccatttagcaattgaagaattaaatcttggtcagagattgtggaaccagcagtaacaatggagtcagagatagattgaactttatcgatatagtcagaaattgataaagaacccttacgaatatgagaaaattggcctttgagctgaagtaatcgggcgcgagagtggctagtgaagcgttgttcaagagctcgccataactgagcggaggtattgtatgtagca

SEQ ID NO: 2405 - DNA, 1459 bp, Cannabis sativa
atgacaaaaggtaggaatgatgatataaaatagtaaacaaataacgcagtataatgaaaagtgtgattgggggccattaatttggtgggttcctccttgccttgattcttttcgattttattctctaaattacatagaacttatgttgagtttattatactgaaatcggaatttgaataaaataataattatatttagtaaattttcaaaaatacttttttttatattttagttataatttacagtaaggattttatttataaaatttcactaataaagttttaaaattataaaaatacattttatttagcaaaaagttaaaaaaacaactaagaaaacaaaaaattaacctcacgacaacttaaattaactataaataaattataaaacaactaaaaatcatcagattaacaatctcatgaccactataatacaactataaataaattataagacaaccaaaaaacgatctattatttttactgaagatgtatttttataaataaaaaaaaaatcaaaacgtaaaaataaaaattatccatgttgatgtattgttatgattttttttcaaattttttggtctattatataaatttttcaataaaaatattattttgtttacatgattgaaattataaatgtaaaatgcctaaattaactaaattgttattttaaaaagaataattcatttcttttcttgaacaaattcatcttcaaaataactaaactaatgaagaacaattcatttttatttaagaggtaaacatgtttttaaatttttaaatataaaaaataaataaaagcattaagcatcaaatgagaaacaaagaaaaaattgcactttattcaaatgggtttggtcaagcatccagcaatggactgcctcagttacaaatctgaggagtaaacagacaacaaaaattgtcaagccttaacttttgacaacaatttctatttttgagtagttttcctcacaacacttccacttagttttttaaaatagagaagagaatacataaaatattgcttacaatttgacaaaaaaaaaatatagcatatatcaaataatgtattttatataatttttttaaaagcaatgaatggtttttctccatgtagaaaaatactttcatttttaaatttatttttattacttttcagtttgttttatggttattgtgtgcattattaaattactagttatatttataaaccctttctgaacttgcacttaaaatatgcactcaaacattatatgtgatactacttttgaaaactatatgtcctattggttaaaaaaactatcatatcaatgtaatgtttaagcatattttgtgcattttcttttgggaagagaaaaagatcaaaacttgtgtcatctattatacatacaatgatacaatagacactcaattctgctagtgttctactcttaagcctcactctcaatcaatacaaa

SEQ ID NO: 2406 - DNA, 1803 bp, Cannabis sativa
caccgtattcgtgcataactatttttggattctatatacgttcagatcgcactgatacaccttcgtcttgcatatataactcaaattctaatgttcttttttttttccttgggtgttcctgctatttgcattaataattgcaagttttgctggaaatggattagatataattcgatctcgttaatagtaacatttttcttacccttttctccgattctatattcagaaaagatttttggacgacataaccatctgggtatatcattttttgtattttctagcgtgatattgtttgaagaagtagttttcacctttctgaaccttcatggtttttataatcttcacactaagtctaattttcagttgttcttagtatgattctgtatcagaaaaaatgtacttcgcttagaaggtagcattgctttagaatgaagaaatgtctcaaacccagaagatgtttcttcatttttgggattcatttgaaatatttagattttacctaaaaaaaaataatattaatgaaaagaacagggaaataaaataaagtaaaaacatttctctaaattttttaatagatattttcaaaaatatctattccttttccagtaaaattaatttcttttttaaatgttttttttaaaaaaaaaaattcattttcttttcgtcctaaaatatgagggttaagctttagggatatcttttgtcatatggctgaatgaaccaataggatttatcttttacacatgtagtcacgggtcagctttggttgttgctaatatatggatttgaagtttcattttagcgatctttaccttgtgtctgactagctaatgaagaatacaagatgatacattatttaagatagctcaatattgtatgtagtatatgcccttaaccatgtttgtagggagatttaaattgttgaatgatttgaatcaatttggccgatgtactctacatagtatttgaaaatggttcttgacatgtttaggttggttaatacattaaagtcaccattctatcacaattgtatgagtttaattttgttgttttcactttcctacattttttaagatcatttaatgccatatcttctctaaagatatcttaacttctcgtatcaatgaaaatcttttagctttccattcggatgaagtgaggcaactaccctgatggcagatttaccaggctatgttagggcctgcttgcatactggtcaacttgcttttttggcaattttggtctccggagggatcgtgttacaaatattggttagtaatgctgtttcttgttgattagtttaatgatcaagttcggtgttattgaagatgtataactttcatttactgcaaagtcttcctgtttctcaattatcatttccttggcaggcatgtgctttgtacaataactggtggccaatgctatctcgtaagtaacaaaaccctttgaagcttgttgaatatgcatatctgcacctatttggttcatggaaatgtctcaaattaaatgcataaactctaattggaacatccatgtgtttccttgtcaatgtgtctgaactgaaaaattattaacttcttggatgttgataagtagtttataataaggttgatacctgtattttatcgaaatactgacttagtaacttatgttttgaataatactcacctttagtccctgaactcaaatttgatccaaaatatttattaatatggctagactgtcctcaattatacggataccaaatgaatatttacccgagttttttaaaagtattttgagaatattgggaattaggaaaat

SEQ ID NO: 2407 - DNA, 844 bp, Cannabis sativa
gggggggggaaggagttggttgtgtgttgaaaatattgatgaactttatttttctgagcatgaaccataagacttatgatggtgggaaggtgatcttattttaatattaattcatacaaattgggttattcttatcatcaattgagatgtggacaaagaatcttaggttcaacagtccaatacatttagactattattaaatgaccaattaattagtctttcttggcataataatatcactaatgtggtgagtctttcttgagaaaacaaaaggtatgaagaaagagagaaggagttggttgtgttgaaagtagtgatgaactttatgaataataattcatgcaaatagagttattcttatcatcaattgagatatggacaaagattcatataggtccaaccgtccaacacacttaaactattattaaatgaccaattagtctttcttttggcatattaataataataagatgaaggttccaagaaataagtaatttgtttggttgttttttccttttgctttgttgctaacaaatagtggttgttcagagagaaagaagaaattagtaagtattgtttcaccaattagttgccaagaataagttatcctttaacttactttagtatatcatatatcaattaaaaaaattacccaacaaagacacattataatgcgttacaacacgattcaattataatattattaattaaagagcaattgtatctagaaattgcactcaaattactctaggtaatgccacattttgcttccacgtctagctagttaaatcaaattattttaaacaagagaataacctacatctaataatgaaagaactgattc

SEQ ID NO: 2408 - DNA, 1166 bp, Cannabis sativa
agaaaataaaaacaccattacttccaacactcaagtgtcctattcgatgacataaatccaaaaacaatgccgtgaagtcataagctttactatatgaaagacaatttgttacgtgccaaactatacaatcatatttttaacttccagaaacaatacagatgacagtgtttacatccaaagatacgaaagatattagaaggaatttgggttggtagttagtgcaactgcaaaactaattacaacatcagataaaaggattctaaaatgaagtaatcacctcagcatctgcatacgttgattgtcgtctaagactacaccgagggtatttcacaacgcttttagaaccataccaccgaagcttcaactattcgaaaattaaataaaataaaaataaaaatcacgtaagaaacaaataccaaaaagacgaaacaaacaaatgagtgtgttaaggcaaacctctactctatcaaacatgtcgtccactatcaaaggctttccgctgtaataagaatcccttgcctgtaaacacccaatactcagaaaaaagttaaattgcttccaagaccccataattcagaaaaacgaaaggaaacccaataaggattttatgcatacttgacgataaagggcttccaaagtttctttactggcggtctcgataggaccaacgaagatacaagaagggccttggacaaggtcatcacgagtggcggtggggaagttatgaccgttagcggatatccgaaccgaaaacggggctccaggtctggagctccgggaaagctccagaaatgaagatgaagaggaggaggaggaagaaccgatcgcgtgaggtgcaaaggaagaagggcttgtgccacaggccatacagcgtggtggagatggaggcattgaaaagcagagccagaagatgataagcggttcagattaaataaaaaagaaaagtgttctttcatttattttttactcttttggcaaaatatcaaacaggagattttgaaccacgcaattttggcaaaatccagggccttaattgaaatgtgggttggaattttgtcgaattgtcgtaattgccctcgaagctctcgttgtttttttggctgcggaagtataatttctggcacccctgagatactattccatttcctaggctgcttcgcttggct

SEQ ID NO: 2409 - DNA, 2128 bp, Cannabis sativa
caacttcttggggttaatgtcagctacaacgacgataagttacttcgcttaattccgctcaggagcgtccccaatagtacgcctggcgctaagattcccgacatatgaccatactttatccaaatcagaatttttcttcagagcaagagatgtccttccgggacttccatcaagtggcgtcgaagagaacatagatggggtagcgaggggcgatgcaaaaggtgtatgatgtatggagaaaggactgggagatatcttcttctggagaggaagaccgcctagtccaccagatctcccaaagagatccggtgctgactgtgaatcagcatttttcttgatggcatcgtcaacgtagaggatgtcatcaatcctcgccattatgttaaaggctagactctccatgactctcgagtagctctcgagaatcgactgccccacatcctgcaatgagaatggaaatggaaatggaaattcttttagcaaccgaaaaagaatcgaggaaaaactaatttaagaagatagtatgttaaataaactactttattgtattgaattttgctcatgtccaatgcagtctgtggaagggtagggaaacgatttctcaggctgtttaagagagattctgctcgttgggctaacaagaggtttttgtcaatgtcggaaacaaggcctttgactttgccaccccaagaagaacgctttcccttcttaccagatgattgtttcctacaatccttctttttccaaatatacactgctgcctcaaccctgttaactatctcaatagtcagatgttcagatgagaggtccagacaatcaagtaagcattctggggagaattgttcggctgttatgtaacgataaacaatatcaccaaggcatgcctttccagtctgttgtttttgaattggacaggagataatgtcagttacaattcttaatgcaaattaaactttaatttacaatttcctaacattgaagttaatgagaatcaacgtacagaattaatactcttaaacgaatgctttttaaataccgatttaataacattgaacaaccaaatgagttactaagacagtgcaattaattgtctataatgaactgatcacataccttgggtaatgagtccaagtatgctctgggaatctccatctctgcaagcatattactgttaatagtcattgcagccttgagtatctgattggtacagtccttacattgctgcaacctcttccgggcatcatctgagagtccattcggaggaacttttggatatggaagccaccacttatcttcctgcctaattgaaggtcttccaccaatcatgtatccctttccatcattagaatcgtcaagagctacatttcgatcgacataggagaattccgtgttggaaaacccatcaagcatagccagaagcattgcatcaagctttcttaatgcagggaggttaatgtataagtctgcacgaggccgactctccataacttcaaacgctcccccacctgggaacggctgtgtcgtaggtacaagctgaacaatagaatcacaaacagataataaccactccatttctctacgccacatttcctttttctgctgagcaagaggctctaatctccatagctcaccaaaaacagttgctgcatcaaagatcaaaacaaaatttaaaataagtaaaaacattacagatgctagaatccatagaaatacaattatataaacctttgtaatcattaagtatggagattaacccgaaagattggttatggcattagatatggctagggcagtacagactccttttccacctccagacatatcttctccaagcagaagcttagcaaatctctccttcatcaactcaacctctgcagatttataataacaacaaaaattatcaaatactcagcaaaagaaatgacacacaggatctctcccaattctacataaataaataaaaatacctacacattcctaagaaattggtatgattaaagctcattaattttattttatttttttcccgggaaacaaacaagaaaaatgcaaattacacaaaaaaaaaaatacaagatctcaaaaaacgttcaagattaatttcattatatatatatgtatgtatatg

SEQ ID NO: 2410 - DNA, 691 bp, Cannabis sativa
aactgtaaatttaaattacacaaacggtactctgtaatgtaatctgtactaaacccccaaaaagccctaacctaccgcaggctaaagacagtaatcgccatggaaatggagatcgattctactctgcaaccagaacgccaattcaaagccgaagatctcttcaaggcagccgaaaccggcgattcctctacgtttcaagcactttccaaggagcagctttcgaaatctttttcgctgcggaacgaggacggcaggtccctcctccacatcgcagcctcttcaagtcaagtcgaggtccgtccatttttttttttttgtttcctttcaatttttcatttcctgtttaattgcttataaatgagtggtaaaactagcgaaaatctcgtatctattgttttgtttccgtgaagcctcagattacaagtgtaaatgttttggttgatttgtccaacattattattattgtatgatttagtttcgaattagataatcggaggttcgttccgacatcaaattcaaatgtgtttgaattattctttattaggtggtgaagatactatcagctgttgatgaagccgcgagtgtggtaaacagtgctgatgaagaaggctgggcaccactacattctgcagctagcattggaaattcagaaattgtggacattttgctaagtataggcaagataagttct

SEQ ID NO: 2411 - DNA, 1260 bp, Cannabis sativa
cctgaagcaaccaatcaaattacaacagaaatgaaataacaacagaagccattaatatgcgcaaatcatcgagttttctacactttgcatcatcataaaaaactttcaatcataaaacttgaaatgagttgaactggagaatatgttaatttcagaaaacgacttccaatcataaaacttacaatcaaaaggctaataagttgtattaggaatcaatgaaaagtcattgcgaacttagaaaaaaatgcaatcttgatcaatcaatctttatgatgcagctttcactatcgtcgaagaaaaagaaaattatgtttaataaacaaccaatgcaacaactgagatataaagtaataagaagaaaaagagattccagattgggaacaaacaagttcagtaataagcatatcataccactgcaagcgtgttttaaaatatttttttaaaaacttcttaattgatttttacataggtatataccctaactagatgtctatcttagagcttcatgaaataactgatggctaattgagaattgagagtttcggtatctcctaaccagtagtaagattaaggtgttttaaagaagcaccgaaaaaccaaatgcagcatataaatatgatgaagttctcaacctcaaaaagaaaagaaataatcatgagatgtgccagatattcagaattcaacttgcaaaagtaagccttcaaaggttaataattttcataagacaggaatgaaaagtcaatgcaaaagggtctctttatctaaattaaatagttcaaaaaagagagaacaagacaagaacttcatgaaagtaatagattagatacatgtaagtgttacaaaatagtgattgctcgtgtttatatggatcaaagtttagtttccaaaaatcacttgcaaaagtaagacttaaaccggaaaaggctaataatttgcataagagatcaatgaaaagtcaaagcaaacttatatgaaataaactaaacacaaatggcatttagaagcatctctagcaatcttaatggaaatttcatcaacgtaaagggagaaaatgagacaaacaattacactctgcgatcataaacaaccataacaatggttgcaaaacgaccatcatgatcacatagaataaattaagtgagactatttagcaaattttagtatttaacatttctagtttgacaaaattcactgagatacatgtaagttttcatggaaagtaacagtaaaaagtgctgcaaaagagtgattgctcgtgtt

SEQ ID NO: 2412 - DNA, 2661 bp, Cannabis sativa
cgacagcaagatcgaaaggctccaagcactgtcatccaacaacaaactcactcacaatttatctgatccgcaagccaactttgttcaaaaaccacatggaggaggtcaaggcagagggacaaaccagtattctcagcagtatgggagtcatggaggcagacacaccagcagaggtggtggaaatcgtgctcgaggcaggggcagatttggtggcaggtctaacaactcaaagcctacttgttaagtttgtggcaagtatggccgctcagctgcaattttttacaaccgattcgatgaacactacatggggacagatccgaacaatacaactcagaacaagaacaacaatccctcggcctttgtcgctgcaccagaaatcttggagagtgatgcttggtttgccgatagtggagctagcaaccacatcacaaccgatccaacttcaatgacacacaaacaagagtatggtggtaaggagaaagtcaccattggtaatggctcacaactttttatttctcatcttggcaatggaaatttaattaccaatactggaaaatctcttctgttaaaagaaatgctccttgttccagaaatttctaaaaatttgctaagtgtgtcaaaactcactcatgacaacaatattctcattgaatttcactctgattattgtgttgtgaaggacaagcaaacaaggagggttcttcttcgagggatgcttaaggatggtctctaccaacttcaaacaccaagctacaagtcagcctctcagtcacaaagttcagtcgagtcaaataaaaccagaaattaagtgtttagtggtgttgctgtcaaatctagtgttaatcgtcctaagtctgctagttcttctatttccaaaagtgatgtttggcacatgagattaggccatccatcacaaaaagtactgagtcaagtgttgagtctttgtcaagttaaaattcctaaaaatgaaatgaatcatttttgcgatgcttgccaatttggtaaatcccatgcactcccatttaaagtttcaaacagtaaggctgcaaatattcttgatttagtgcacagtgatctatggggaccttccccaatcatgtcacacaatggctataagtattacatacacttcattgatgattgcactaggttcacatggatttatacattaaaaaccaaggcagaagccagtaatgccttcctacagtttaaagtgtatgctgaaaatcaatttgagagaaaaataaaacggcttaggacagatgggggaggagagtatcaagccttacatgacacagccatcacatttggaattgatttccatcatccatgtccacacacctcagcccaaaatgggagagccgagcgaaagcacagacacattgtggaaatgggtcttacgcttcttgctcaagcaaaaatgccattaaaattctggtgggaggcattccaaacctctgtctatctcatcaatagactcccaacacctattctagatcacaagtctccatttgaagccttatactctagaaaaccagattataccttcctcaaaatatttggtgttgcgtgtttcccgtgcataagaccatatcaagctcacaaattctaatttcactcacttaagtgtgttaatttgggatatagtgagtcacataaaggctacaaatgccttacccccacgggaaaaatctacatctctcgaaatgtggttttcaatgaactagaatttccctttaggctcgggtttctcaacaattacacaccagaaaaatctgtcatcatacaaagttcctcatggtctgttcttccctcttttactctgtctacaggcaccacgcaaccagcagcaccatcaaatccctctccttccttaagcataccaggagaagatccctctacaccaacacatactcaggtaaattctcatgctcctctaaatgttgcacactcaccagcagcttctcctagtgtttcagcttctatcagtgagaggggaaacacacctgctactgctacatctataggtgctgatattggtccattattcatcacacccacggatcatgaacaacacacttcactatctgactccactgctgccccagttgcttcacctactgttggtcaccccatgatcactcgagccaaagccggcatcttcaaacctcaagttttcatgggtactgcaacttggcaaccacattactctgttcccagcagtgtcgaagaagcccttgcacacccggagtggaacaaagcaatggctaatgagaacacaaccctcaaagccaacaaaacatgggtcctggttttgccttctccacatcagaacttaattggaaacaaatggatttttcgccacaagttcaatgcagacagtactcatcaaaggtgcaaagcacgccttgttgccaaaggcttccaccaaagaccaggtatcgactttggagaaacctttagtcccgttataaaaccctctactgtcagaattattttgacaattgcagcaacacacggctgggacattaggcaattagacatcaataatgcattcctagatggaactctcgaagaagatgtctatatgctacaaccgcaaggtttcgaagagaaaggaaaagagcactatgtgtgcaagttaaacaagtccttgtatgg

SEQ ID NO: 2413 - DNA, 1114 bp, Cannabis sativa
ttcataattttatgacttttttgtgaatttcattcaaaacctacacatccatacaattgaaaacgtggtttgattcaattgaggaaattaatttgagtcctgacatagttttgacagaaatatagtcatcataagtgggtagcagccatttaaagggctgaaatcaaacatgaaacaatcaaaagagcgaacaataccttatttaaaagtggatcaactttgttttcaagctgatcagttgcatcgttcagctctgacagcaaaccaactaactctggagcagagctggaggaaacaactgttatttaagcatggaaacatagaattcacaaataaacagctaattttatactacatagtttaacagaatgaatgaagagatgaaacatcttatatttctaaagacacctacaaatgagataaagactttcccttgtgatataagaaaatataaaataattgcagaagaaacttcaagaaaatgaagttataactctacctaaacaaaacatccatcagctcctcctttgaaagggcactcaaatctttcttaacctcttcataatctgtacccgtgttctctgccccttttgttttcaaactggactttttggtggtttttcctttaactgatatctcctgtacaaattgaatatgtggaatacaacaatctataatgtcaatctttaatcatatcacaagaaaagaaaatcagaaaaataatggcctgctgacatcaatatagtattgtgctattccatactcacctctaaagttaattctctatcactgtcatcttcacttgaatcttcaacgccaaagtctgccatagacatagattttgcattttctttctgcaaccttatcacctctgcctcctcctcagcaggggactcatcatcacttgatcgtatctaaaacaaaaatgaaagaataataacatttaaaaggcattgccatatcaccagggaataaaattatgtgtaagaatgtaattacgcattttacacaataataacccaagcaacaaagaaaattatacacagaacactcctgacaaaataataagagtgactgctggaataaaaatcctcacctcaaaatcaacgttatc

SEQ ID NO: 2414 - DNA, 1659 bp, Cannabis sativa
ataataataattcttttaatagtattggcatttatgcaaattgtagttatgatatatttatacacaaccccccactcaaatcaaatttcattagagggattcgctttttttggtcactttctcatttttctaattgaagccatgtgtatcagtttttttattatcaattcttcaaaactttcacttttttatttgttaactttttccttttccacaagagtgaaacaaaaagtttgtgcttaataaagttctatatatattaataccataaacggtcttcattcattaattaagaggtagctgaaatagttccaccaaaaaaaaaaagcactcataatcatatggtataatgcctctactcacatgtgtaaacaatatatacaagcacatgatttgaacatttattttcctttttttctcaaaatggttctctctcgtgatttgattcttcctttacatttctttggtcagtattcttggtcatcctagtttttcatagatggtagtcctcttttatttttatttttttggtcactttcagttgagtttatttaagactagagcatatataattgtgtggctttaagtgtagaacaaaaaagattgtcaattgtttcaattttctgttctggattctgaaaatgggttttttagataagatttgtgtgaaggataaggatctcgtgtcttactttcttgctttttcgtgaacaaatatagaagatttaccaatagttggaatctggttctgaaatacctattttaaaaagctattaaaaaagaagcttgtgatccttttgtactattctctcaactgtctaagtttcaaccgtttttaactgtcacattttagcatcattggacatattgttagatgaaatacactacaaaatatatatttttaatatcaatatgataacacctgcaggtagatatagctggatttttctttttgaatccgaaaatgggatatcaacaaaacccggaatccatgtgtaaatcaaaattcgatgatgttggtgagactattttaggctcttatacatcatggctggtaaatacactcttttttttttgttgaaccatgtcattttttttagcatattatttggtgaatatttaagcttgaagattttgtctaatttttctcaggccaaacatccatctgctttggaaaattttgatgagatgatgagcaaggctaagggaaaagttatagtagtgtttttggactatgatggaactctctccccaattgtaaaggaacctgatcaagctttcatgtcagaagctgtatggaaaagcctttttactctgttctttgagaaaaacaaattgatatattattcttaattttcatgttcaaatgtgcagatgcgttcagcagtacatgaagtttctctatgttttcctactgcaatcgtttcaggaaggcgtcgagataaggtaattttatacattacattatacattaaaatatcatcaagaaataaaaggaaaaattaaaaatactaataatgttgttaatatttttatataaatacaggtgtttgaatttgttcaattggagaatgtttactatgctggaagtcatgggatggatatttcaaccccatcagcctccaaaatgtgtagtgatcacaaatgtcaaactagaac

SEQ ID NO: 2415 - DNA, 784 bp, Cannabis sativa
ctcaaatatcaaaaccataccgactaccgagccgagccgagccgagccgaatagagcagccaagaagggtgacctgttaagccggttgcaattgaccgtacggccatacccacatggtaaatggtaggtcgtttatctggcagttggtaagcatttagtgtgccctttctcctctctttctctctcattcccattatcattctcatttcattgctttttctctctccattttcattatctttgattgaagcttttgtttcgggctcacatgcattcattcatacaggtataatacgagccttcttcaattcttaccctcaaatgccactgttttctttatccgcaagagaaaatatttgattttgcgaaatgggtttgattagtttcgtgaaattacagtgaaaagctattcgattttctcttttctttcaaattttcccgggaaccaaacaatggtttttccgttttgggtattatgtgtttatattatttatataataatataatacttttttaatgtgtgtgttttgtatttcaggtaatggaatagcatatgaataatgatgtcatctcaaagaagaagaagcatatcttagtgattggtgtgagtgagtgagtgaggttcatttattgggatcaattggagcccgtgaacctgttattggataccttcttctaagctcttttgcattcaacacttcaccaaaaaattcgtgtcagactcaaatccctctcttcttatttatgaggaacaaaaccaggtctatctctctctctctctctc

SEQ ID NO: 2416 - DNA, 1325 bp, Cannabis sativa
aacgatgttgaatttatataatataagtaacttgtacacttgtttattttcatatttattatctgattctgcttagtaaatttttgttattaaataatgtaagaaagaaaagtagtaaggcatagaaattagaattgtgatagaattttttcaaaaattagagctctctagctttgatcaatttttagagcatcttcttccatgttataataatataacaaaaagaaaagaactaaaggggcaggaaagacaattaataatagaagcaatttatttatttatttatttatttttgttttggacaagattgaatagagttagaaataaaagaaaaagaactgtggagacgatttgcatggatgacatgccaagttcatgtccttaatttgtgtaggagttaaagtacaaaggaagagaattgcagtacaactaagaaagattttagcggagaaaacgacaagtcttggcaaggcatcaaacatgtgtagtacatcaatcaagaaaccacttattcacacatcataatcatattacgttactctcttcatcttatcctttcaactatttctctttctataaaattttattgaaccaaaggaggaaagaaatcgtcacccttttgttgttatttcttaatcaaacattttatatcctatattattttatattaaaagagaaaatgcaaatttttgcaaatcatacattaagatattgcttatctagtagaattaatataggttaacaaaactgttaaaaaaaacaatgggaagaatggtagattttcaatttaaataaatatgtgataattgatcattaatcaaataaaaattaaaaacaacttataccgactacaataaaagagaataactataagaatattttatataaagtaaatgaaatatattatttgatttaatttagaatatataattaattatttgttaattaattttaaatattctaatatagttagattttgattactaaatatttaaattgtttgagttaattttctgaagtatatatgatatatattttttttaaacaatgaacaaacattttattgaaaaatcataaaagagtagtacatcatgaaaaaaagataaataaattcatccaaactagtttactatcattctgagtgcatgcctctgctaattcatgaatacgaacatgcattaaggatgcctcaagaaaattggtaagtaaacgtgtaaaaatctctaataaagatcttaattaatttaatacaaataaaagatcgcgtagagagacaaagaactacatccaaactgtcaatgttttgtgacataaactgtcaatct

SEQ ID NO: 2417 - DNA, 2416 bp, Cannabis sativa
ggcggcgccgatgataaataataaggccgtgagtggcgcggggtataatagtaattatgcttatgaatgcaagacttgtaaccgaagtttcccttcttttcaagcgctgggaggacaccgcgctagccacaagaagccgaagcaagccatggctgataatcatcataatcagacggtggagattaaaaggaataataatcatcaattgtttggcggattaccatccgacgatgaggatcaaacgcaattcattaagaaggtcaataattcgtcaacggcgctttctcttcaactgagcaataataataacaataataacaggagtagtactaatttgtacggtagtggcactaattttgtgaccaaggcgagtaaggttcacgagtgctctatttgtggcgctgagttcacgtccggccaagctttaggcggccacatgagacgccaccgtgcacccgcggtttctgggtcgactacaacgacaagtacggccttgtcgttgactactaatactcctcctactactcaattcatgtcgttggatcataatcatcaacagcagcaacaacaacagcatcagagtactaatcttgaacaggaacaacgacaacgacaacaacaacaacgtcgtccattcaacgacaacaacaacaacaacacgaagaagaagaagctaataacaaaacacgaaacgtgttgtcgttggatttggatctcaatcttccggcgccagaagatgatcaacgagaattgaaattgggattcgtaaagcaaccaggcagcaacaacaacaacaacagcaacaatcgtctacacttgtcttttcatccccaactttggtggattgtcattactaagaagaagaaggagaaaaaggttattacgaatttctttttatgtttaaattttttttttcatcaacgttttatgtcccacgattgatctctctccctctcgatctctaaatcatatattgtgaattactataccgtaaattctttttttttttggttgacactttttagcaaattcaaagttacaaagattcatttattaattcttttaagttgatgagcaaaaattgttgttactttggagaacttattaattaattctccactttcttattttgttcatatatatagcaaaaattcaatctgtgtattatataagaaaggctcaattggccaattcatgaaaagtgtatgatgggcatctttttagttttcttttattttttttttaaatgcttctcaattagtttttctttttctttttctcccaattgggttttttcataaataattttcaataatgaaaaaattaaaagttccattgtttcaattacaagaaagccagctgctttctttttctctctctctgatgtaagtgacaagaatacaataaaaagtacagtgaaaggcagtgagtttactgcaattcccacatgaatccacctcttgtcctttttctctttttaataacaaagatagtcactttttttatatataaaattttagaaaacaaatgcatctaacttacttggctttggctatatatttttgtcattttctttgctttggtccactccttttgttagttctactagcctactgatcagtacacctaagcaatatctgtaaattatccactacttgatggcccacaaaccttagaatgcatcatagaatattcttaaatcattgactctactgttatatgccccccttataatctctagtgctgattatatcagttatatatattggctagcttacgttaaatattagtataagtgttgaatatagatttggcaattggcatattataacgttcatatatatttattaattgatttattgtacttaatatatttatatgagtagtgcaaaattagttgctcacatatactagacatgtcctggggttttccaaccattatttgttaagtccaatttgccaatctggcacaaagtttagtgaagtattaatctaaagaaatggtatgtagtgtatttattttcttaatataaaattaaaattaaaaagaaaaaaaagggtattataattaagtaattaagattattaacgtatgatcaacactgcatcatgtgtcagatcatgcagcacagagttggcgataataatcacatgcataataagtcacgatattaataaattaagaaatcaaagtgagcatttgtattgtatataccaaaatctctggtcccttgtacaatgtcattagctgttttcaagtaaagatactaggtgtctaatgtctatctatcacctcaaattaaaagagagaagatagataattaagtatatacatacgttttcaagatagcaaatttacttttattacatatattaaaaatatttttttttgatactgctggatcattataattat

SEQ ID NO: 2418 - DNA, 2568 bp, Cannabis sativa
ggaacaatgtctacagagttcaactcccggtgtaacatcatcggcatattttcattggttcgggactcctggtaagaaacactagatatttcggcatttccaaggatccgttcagatttttcagttaaaggaaccccaaacaaactactgcctctgtcaagctcaataaacaactcattgacctgaaaacccaaaaattgaagaggaaccataggtaccatagttgatataaataaaaagtattagtggcttttgggattatgtatcagaaggggtcataaaatcattctggagtgagcactctgcaagttctatcatttagtattcaagcatcaaaatgtaaaatatttttcctgaaatccaactcttcaaattttgtaaggtttcaaggcttcgggtggaggaaaacttttaccttctcaacaagctctgcattttctgttactaatttctcaaccaacgaacatgctgcttctacctgagagtttaactcctcccgttcagaagaaagctgtattgttcattcaaaactttagattatatagctctttcttccattattttctttgcaaaaataattcagatgaaagaacattaaacaaacaaaacagtattaaaccagtaaattcatcattaaataaaataattgctatacacaccattgaatccttcagcacaacaaaaacaaaaaccaaaaaaaaaaaggaccaagaaaacaaaaggagaaaaacgttgaaagccgattagattaagctcaatggtaatcaaatactctgattatactgtagatttgttttctagaaaatacaaaagcatcttcaaatgcatgttccaattatgcaaatgaaacataacctccacggaaagtacattttctccaattacactgctgataaatgatggccaaaatagtcagatgtatccataaacttgctctgaattataaatataactaaaactacaacttggtcgttctatgcgcagttcaggacacaaacctttgtaaattcttcagatgacttagaggcaatgttctgaagatccttaatttgcaactgcagactagcaatgttttccatcagctgttccttttcttgtaagacattcttttgggattcttcaaactccaccacctgccaagctttgtttttaatcccatatcagaaatttctaatgaataaaaaaaaatacaagttaccctgtacactcgtcgtaatcaaatgataggacatgagccagtgagaacgcttatttgattgaccaaaaataattaagtgttaaagaaaagagtacaagataaggagggggctgaatctgaagacacagctagctgatatctcatctacctcggtagaaagacttcatggtaataatggaaacaaatgactggttgaatccaaaggatcatagccaacatggaacattattttaggctgatagaagaaagaagttatataacattgcagttcaagctacttgttggacactgccttgaaacaaacatttttagattatctctaatggtgtaaattttggagaactttacataaatatacttgtaggatataataataccatatatattgctaaaaaaaatacacccatttataaaattaaggaatatttaccgtgaaacctctttaacatttgcaattgttacacacataatcctaataaaaaaaagtagcggaaaaagtattttagtttacgattttgttgcagtcgtacccttttttgattatcaaacgccaaataaggttgttaagcgcaagctcaaaaacacgtggcgatatatttctttagcttatttaatacgttgattcaataatatacagccacatgtttctgagttgacacttaacggccaaaaaaagatacgactgcaataaaatcgtaagataaggtacttttgtcgccaccttttttgattaaggtcatgtgtgtaacaattgtaaatattaaagaaattttgccgcaaatatccctaaaatttattattatatacaacttaccaaccataatcacatcctatacttaatacaaacgttacattatgttaaaagaaagattgtgattagatatgtactatttggtagttataaatctaaattagacactaattagtattttttttttataacaagcagtagctaaactaaacatttagatactaattaatagttatttttggataacaattattagttaaaccaaatgattagatactaattagtataatttttctcataaaaaaaattgataggttaattttttggataccaattattataaaattccatatgatatcattgaatatcaaattgcatataatttataataataaaatactacatatcataacaaattagtttggatgcatgttaataccaaattatatattaaatcaattatcataatataacaccaataactagttaaatataggattaaatagtattaaatacatatatataactatacaataaaagagtgtgcggaatagtactaattatgaaggaaaaaaatatattttgatactattttgtaacttttatgatttttccaaag

SEQ ID NO: 2419 - DNA, 1711 bp, Cannabis sativa
cagtaacaaaacaaacatggcaagataaaatgaaagttgaggaaatcaaccttcaatatataagtgggactctgaaatccagtaaaaggattaaacttatttgtaatctttatatgagctgtttggagatctggctcaatgaaggccttgtacattggatatacctgttgaatgccaagacatcaaggatttaatattaattaatcaccacgtattaaaaaatagtgcattaaatggaaaagtcatactgtctcagatatctgatgaataatttcttgaggttcttgcccagctcgttgtatatcccgtattactcttttgacaaggtcaaagtgaaccccacctgtgactgatactcgaagatccagtaaaggtctcaacctttcactcaaagcatagattccctcaatgataacaatacgagagctagggacttcaactgtcctgtcatcggaacatgctttaattagcaattcagagtatgaagagcaagcaatggacataacaaacatagaagaatagttctcaagcaacacaaattacccacaaataacttcaaaaaaacatagtcataaatctattgatataaaaaggataggaaatgggggaacgggtgttttcttatcatatacatgacaaggtgccttcacttgggtgagatggggaaacattaattacaatttacatggagatgagtaagaggatagtaaacctgtatcctatacgggagctagacttgaaatcatatactgggacctggatttcttttccttccttcagatcgctgacattctgaagcaacgtgtcatagtctgtcaaccgcggatctgtttagcaaaccaaaaaaggaggcattatgctttttttttagcctcattccaatctaattgcaatggaaaaatttgttcaagatcatattttggaaattggactccttgtctaaccttacaatatttgaaatagtaaacaataaacattgttatgtagggcatagaggagggatgcaaacctcattgagctactcttgttgttaagatcatttttagaatttgtctacctcacttttttttctaggaaacaaaaactcacctcactttgatttattaaaacttgcaaataaagtgaatctagtaaaaggtaacttaccatcaaaatttccatcaacaattcgactggcatcattgtagttgtccattgaaatgactgcaatgctgggcataaagttgagtatcttctctgtgaatacagttttcccagctcccgaaggacctgccagccctattaatattatgccctcattgtgttgagccaataattgacaagcacggatgacaataaaaaaacccttttcaaaggatagagaatctttaatgggaacaatttcataacgagttgaatcctttctcttcaccaactggatttgatcttttaacaagccgggctttctttcatttgaatcaccagcagagatatctttacccattatagataagttgaactcttctgaatagaaattagaaaaaagacaagcatcaaaataggctaaggaaattaggaaaagaaaacgttaactcaaaaaacatactcgtattctacataaaatggatagagagagtataaaaacaaaactcaaccccaaaaaaaacaagcctaaatcttttctggctttacataaaaggtctctatcaaaaagtggattggaagtttcact

SEQ ID NO: 2420 - DNA, 1558 bp, Cannabis sativa
tggtatagtaaaaatataaaaaaaatcgtgtcagagtgtatattttgtaaaattttccccactttttcagtatttttgtaagttctccaaaaaagaatcactatgtttttttactgtctgaacttacagaccacgtctccttccttcttcgttctcgtcaggagcctcattttctcctccttgtttgttctcaattgaggcatgattttcttctccaaaaaatcgtccaagctttgcaaaactaaggttgcaatgtagatcagaacaaaaaagtgatctgatctcctaaaaaatcaaaaatcaaaagatataccagaaaaaaaaaagatttgtaacttttgcctacattaatttgaaaaaataacaatctaaaaattataattctaattatattgtacagaaaatttgttaacaacaaaatgaaaggggaattgaagcttatccaaactggaaaaatctgaagaaaaaaaaatttgaaggtacggagattttagtgattttctatataattagattattatttagtgttttaaatcaaattaaacataattcattgtgtaaattaattgatttgaaaaaacaatgcaattaatttacaattgaacaattactgaataaatttgtatgattaaaaatgcatttaaggttataacctgtttgttgtcatggacattttaatagattaaaatatggttgttttaaattattaacacaaaatactgagaacaaatgccataatttaatgatatgaacctctacaaatattaatggttattgggatgacaacaaatactatgttgattacggtcaagtcgagaattaatatcaagtgattgcacttatactgaaatagtgcagataatgttgcaggaactacactgcataatcttgaaacaactcacttaatacaactgaaatatagctgaaggaagactgccaaccactctaaattaagaatgacaaaagtttacaattttacataaagttgttataaaaaaaaccttatttcacacgatatatatcatgtgcgaacacattcaacaacacaaaaacaataagaacacaatccttttggtagctagagaagaaatggtatgtaacaatgtgataatgaattgaagtgagcatcactcaagacactcaactctacaacagcctaaaagagcataacaacaacaacaaaacaactttcatctgctcttaggtgggaaccaagagcagaaaaaggaagtgaatattttgacattgtaagaacttgctccaggagccttgaaaatccatcacacagagtcacaacatatccacaagtatctaaattatcctctcgaattgtctgtcagtctgaggatggaaaactgactgaacttcagcttggtacccatggctcgctggagactttgccaaaactttcaggtaatctttggatctctatctgatataatggactccggagccccatgtaacctcactatttcttaacatataagtctccatattgatccactgtaaatgctgtttcactactagaaaatgtttggacttagtaaatctatctacc

SEQ ID NO: 2421 - DNA, 2887 bp, Cannabis sativa
ctttcttctataattcagttcctgcctgccacacacacataatatgagtaatgcttttgttgttgaactgttttccagatcgtttcattcctttatgttaatttcattgtcactcagtttgtatctcatcatccttaaacacatatactgcagtttcctgtcggtagaatccaccgtcttctgaagacaagggtttcagcaaatgggagagttggggcaacggccgctgtatactctgctgctatcttggagtatctgactgcagaagttctggagctggctggcaatgcaagcaaggatttgaaagtaaagcgtatcacacccaggcatctgcaactcgctattcgtggtgacgaagaacttgacaccctgatcaaaggaacaatagctggtggtggtgtgattccgcacatccacaagtctctcatcaacaagtcctccaaggagtgatactgttatctgttttatggattgttaaccttgggagtggatttatgtgtacattttgctgatatcttattgattgtttatggtccttttttgggcttgcaataagtaactgcccatttcctgcgatgaagtttcttttcctagttgaaaaaaaaaagatggtagagacattggggtcggatatggttgtgctacattattaaaacaaattgatgttatgtctggaagattggttttttgcattgccttattaatgtttaagttttccaattcaagtgttgaaccatggtatcggtaattagtaccctttatcattcctatatcatttatcatttttgtgaattgccttattgacgtcttatttagtcattgagttggccgatgaattaaattcattgtctaattgttttagtttgtcaatagtcacataattattatttagtcatatcctataccaaaagaaatataaatgaaaaattaaccagagaataaggtcaattgaatcttcatctactgttgactcgactactccacaaaagattaacaccttgattgaatcccatacaaactagtgtgagtgtgtgtactacaacaacacttactaacttgactacacaagtcctaagtttcttcaaacagagcagagcatcaaattaagattggagggcagagaccttcggaacatccactgggaagtggtggatctcatccatccacgggttcttatcttttgccggattcatggtccttaaagccttccacactgcactgttacacttgaaaccagaaccaaatgctatctgccatgttctgtctcctttccttatccttcccttagcttctgtataagctagttcataccaaagtgagctgcttgaagtgtttccaaacctgtgaagtgtcatccttgaaggttccatatgccaatccgaaaggtgcagattcttctctagttcatccagcacagctcttcctccagcatgaatgcagaaatggtcgaaagccaatttgaagtctgggatgtaaggcttgagcttcatcttgaagaattttttcccgactaatgtggcgaaaaagagcaattgttcggacatgggcaacacaagcgggcctaaagtcgtgatgttagtcttgagggcatccccagcaaccgccatgagatcctttgacaatgaaactccaatcttccccatgtcatcctctttttgagtaacacaagagaagcacttgtcatcagcccctttgttggttcgcaccgtatgcaccaatcgatacttagatcgccttttatcagaggtgttgttggagagcaagattgcagctcctcccattctaaacaaacaattagaaactagcatggatctatcatttccaaaataccaattcaaagtaatgttctccatgctaacaaccaaggcataagaattgggatgcacttgaagaagatctttagcaagatcaatagagatcaacccagcactgcaccccatcccgcctagattataactaatgacattccccctaagcttgtagtgattgataatcatggaagacaaggatggtgtgggattaaacaaactgcagttgacaatcaaaatcccaacatctttgggtttcaaacatgttttctcaaagagatgatcaattgccccaaacataaccatctcagcttctttcctagcctctgccatacatggatttggtgggactctcaaaacggcttcagggagatatgttgattccccaagtcccgatctctcaagaattttcctttgaaactcgaggttttgttcagtgaatgtcccaatcaaacgagacctgtccatgaatatctgcctgctgcatttccgggcatcatggggtttataacacgagaaatcaacaaggtaaacagggttgggacgagtaagaaaataaagggtcaacaggaaaactaaaagcgtggagcaaaggattacagagatgagattgaatctaaggtggtcccaaaggtcatggaggtcttggagggagaatgttgagatttgagcagcgataacaacgaggagtggcgatacaaataggtacatagcatgagttatgaggtaatgatacccaagtttcacgtatttgagcttaacagattgcttaaaatctggaagctttcgattagagtctgacattctatattttcttttaggagataaatgaagagactttggaggaggatgtgaatggaaggaattattatgatgattattatcaaaagaaagtgaaaataaataatcaagaaatttacagacctgcaaaatgaatgacccatatcatcagtaacacaaactttatgtgcactttgatggtgagatctaatataaacaaaaagaaaaaaccaatgaacataagaaaatctaaattcatatatagaagaagcaaacagacctgtattgttattttgtta

SEQ ID NO: 2422 - DNA, 1370 bp, Cannabis sativa
gtaagaatggctttttgacaaaacggttgaagaattattctactgacaggaataatccattgaagcctggagcgctttccggtctttctccctatttacattttggccaaatttctgcacaaaggtgtgccttagaagcacgtgctgttaggaaagcttctcctgaggttagtgatgttcagttaatagcaattgttctggtactttaaggctacttatatgtttttccttcatctgcttgctatttaaggcagtcgattcatttttggaggagctgatagtgcggagggaacttgctgataacttctgcttctaccagccccattatgattcgctacaaggagcatgggattgggcacggaagactctgatggatcatgcttccgataagcgagaacttctttacacgtaagcaatctttagttgttgtttcttgtttttgtttgccactaatatttgttccaagactagtattttttcaaagtcattgagcaacttttactttgcaggagagagcaactagagaaggcacaaactgctgatcctgtaagtcattattattactatttttattttacttattagcctcctgttttcaggttttgaccattgtataatgagattcaccattggcgttatggtggtaaattacttttttaatcatattgttacttgtttgacctgaatatgccctctaccattcagctctggaatgcttctcagctggagatggtccactatggaaagatgcatgggtttatgaggcaagttaactttggatagagatatatatttcatagttttctgccttgtaagctattgccttgccattgtgatcgtagctttaatagtagtcaatcaactatataatagatttatattgcagtgcattcgttgttttggaaagagaatcagatatttgagcatcctaaaattcttgggtgattttttctctcttgaaggatgcttttatcatcttctatcttatctaactttggagtttttcttttgtgcaggatgtattgggcaaagaagattcttgagtggacaaaaggacctgaagaagcccttgagatatctatctttttgaatgacaaggtagttcaactattattctgcaatgttatttccatggtggttgtgacatggttacttattagcttagctttctatggcggccaataattgaaccatttcgttatggaagggccaagttaagagagaatactaggaaaactctctatattagggatcacagcatgaaaatgttgttgtttttgtaacaagaaagttcaagccgagcaggactatgagttttgaagcagtcaaataaagaactgtaaatagtgaaattaagagattacattatt

SEQ ID NO: 2423 - DNA, 1969 bp, Cannabis sativa
aatggttgataaggctcttcgagtaagaagtgcagtaaaattattgcaagagacccaagagacttctagtgttggtagaaccactacctttcctacttctagtcctggtaaggagagtggtgactctagcatcgagcagaagaaaataacttttccgactactggtagttcgggtcagagtgaaaagtttcgtgggaaccagggcaaagggggacaatagacttactcctaccctgcgttgtaaaaagcatcatcctagagaatgtaatcgaagaacttgttttcagtgcgagatgtttaggcatatcaggaaagattgccctctgttgaagaaagaagaacctaagcaagaagtcaatcccactccaacacgggtatttgttatcacccaagctgaagctgcagctagcccttcagtagttacaagtcagcttcttatcaacaactctaattatactattttgtttgactctggggctacacgctcttatgtagcatcgagggtacttagtcagttgagtaggcctagtgacacctttgaggtggggtttggaaccctgctacctaatggagagctgatcatctccagcaaatgggttagatccgagccaattaaaattgaggacagagaactaagtgtcaagttagtggagttatctttggtcgagtttgacattatactcggaatggattttctgtctaaatactcggctagtattgattgcaaatgaaaaatggtgacttttcaactagagggtgaggaaccatttgtttatgtcgggacagtttaaggttctcgcgtcccaagaattacagctctgaaggctagagatttactacgcggtggatgtgtgggatttctagcggttgtgcttgattctgataggcccaagacacttgggctcgaggaggtcagttatttgtttatggggtttgatcctttgagtaataacttaagagataatgataagattaattcaacttaaaactaattaattaacatgggatttactacaaaatccactcaccactaaaaattaaactaaggcaaaattactatttcgtcatttttcttcaccataaagtaacttaaaacttaggggtattatggtccaaattcataactccgaatactctcgacattttaaaatatctaactatattgtcctgccaaaaccaagatactaaatcttatctaaatctctataggccaaccaccgcattatacagttacctggcataagaatatgaaaaacataaaattcatgtatatcataattaatacacctagaatttaaatatatctccaccctaattatctgctaattctcaaaataaagctaagcgatcattacatactctgtaacagtaaggaacaagggttagaaaattgaacgaaaggagacatttaatttcgctgcaaccactgtaagattttcttaaacttttatgtgtttaatttaaattgttttaaggttccatgtttagaatgttagattagtaataattaacatacttgtttagtaaaagtaagatcctggttatatatgctttccaacagaggcctctttttctaaccagaaccctctaacacatcagattcactggaccatcccttttttgcaatacctttcaaacccattgcgggataaactttcatcttatccttgttgctcttcaaaggaacttttttagttttcttagcaagtcttttggcaagagatggggaattagaacatgagtttgtagtggccatttatacaatggaaaaaggaaaatcagttaaataatagtagaggaaaaaatagacatcagagaaagggaggttaaccacgaaatggaatcgtgattgaatgggtagtggggaaatgtaatggttagggcttcagagagcttcagctagaggaaaaaaaattgtgggaagaaagagaaagaaagtctgggaagaaaaagaaagcaagagaaatag

SEQ ID NO: 2424 - DNA, 2959 bp, Cannabis sativa
cggtggtgggttttttggtttctcaatgggttcgccgccaccgcagcagcagcagggtccgccgccggtggtggctccgccttccccaccgagagtttcaacttgggattaccttaatttctttgatacttatgataacagtaattattcgggtatgagatacgggtacgggtcgaatacgagtagtcctgattcgaaagaagtgagggagagagaaggaatacctgagttggaagatgaaacagatgtagaaagaatgaaggtgagagcagctactaagacaaagatgaatcctgataataataataacaatttgggagtgaagaagaagaagaagatgatggatgaagatgttttgaagaggaataagaattcaggtgaagggacttctagagctgctgctgctcatcatcctcctcatgtaccttcttcttcatcaagttcttggccaactaggagcaatgatagtccagaatctattccagagtctattcgagagactgagattagttcagaaacagttgatactagtgtgttgtcttctaagagtcctcaagaagaagaagaagggtattctactaggaagaaaggagtgagttttgagattgatgaatcacctaatactgaagttgagtcttctaagatgagtagcttgactacattgtctgttcatggtacaagagatcttcaggaagttgttaaggaaattaaagatgaattcgaaactgcttcgggttttggtaaggaggtggctgtgttacttgaagttggcaagttgccttatcagcctagagccacttcacttaaaggtataatttaattttgtattattttgtttcttatgatcttgtttgttattgctttttgaaaaatgtctttacttaaaattaaaagtactatttaagattactttcaagattaaagtagagattaatatatgaactattaaatttgtgttgttataggtgaataaagttgaaagagttgtggtcccaaatcagtctcaagtttattacttcattgcttaagctaacttccaaatatgcatttattagcttgatcaattgaaacttatgatcttctactgtgtagtgattatttccaggattctgtacattatagccccttcaaggcccccacccaggcggcgtgtaaggatatcatcaaaaacgttgaaactagcaaaagcatacggtggaggtcctggaaaagagtctgaaatgaggtctggaaacctttcttccactctggagaaactttatgcttgggagaagaagctttataaagaagttaaggtatgcgctttcatttaaaaaaagaaaaaaaaaagaacaatgaaatatgtaattcttgtttggatcttgattcctaatttgtgtggttgtgcatcaggaggaagaaaggttacgcgttatttatgagaagatgtgcaagagactaaagtacctagatgagcatggagctgagcccgtgaagattgatgctacccaagcttcaatccgaaaattactgacaaaacttaatatttgtataaaggctgtcgatgccattgcatctaggatacacaagttgagggatgaagagttgttgcctcaaatcacggaattaattcatgggtatgtatttgcacgactttgctgtccttttttcatatttggttgtgcttgattatgctataagaatgaggcttgtgctaaattgtagttttctaaagtatcggttagtcaaactaggttttcagttgcaccttttggttaatatctttggattgtttacttatgttgaattctttgttttgaatgtgtagattgataagaatgtggaagtccatgtttaagtgtcatcagaaacaattccaagctatcatggagagtaaaatgcgctctcttagggtgcacgccactcgaagagagacgggtctgaaagctactgttgaacttgaaatggagcttttgaattggtgcaactgctttaacaattgggttactatgcaaaaatcttatgttgagtccttaaatggatggcttttaaggtgtcttctccacgaacccgaagaaacagcagatggtatagctcctttttcaccaagccgtatgggagcaccagcaatcttcgtaatatgtaatgattggtttcaagcaatggaaagaatttcagaacaaaaggtatcaaaagcaatgaatgaattcgccggaacactgcgccaattatgggaaagacaagacgaggaacaacgacagagaattaaagcagagtttctctccaaagatgtcgataagcgacttagacacttgcgcatggagaatggaaaactagagcacgatcatcgcgatgcatcctcagacaaaacaacaactctgtcaaaagtccattccggtagtggaatttctccattagatgatttaaaagttgatttagattcaatgcgaaagaaattagccgaagaaaaggcaagacataagcaggctgtcaaacttgttcacgatgcagcttcaaatagtttacaagcgggattgaccccgattttcgaggctcttggtagcttcagttcagaggttcttaaggctcatgagcaagttcggcttcgaaattgtgaaggatcataaggatgaagctaaacttcatcatgtatatgtatttaggagatgatggttaggtatttaggtatagaatgaagaagaaagatttgagggaagttatttattgagcataggcttgtttatcttgaaatttccttccaagaaaataggtaggaatttttgtacaggaattcatttattggttgattggtttggaagtggctgtagtgatgggaagatgtagtactttaagttttgtagaaggaattatatatcaacaattttggctcatcatttttcaaatatatatttcttatatgaaattgttgatttaagggttttttttttttttttttttttttttttttaatttttttttt

SEQ ID NO: 2425 - DNA, 1212 bp, Cannabis sativa
tatgtatataaatgtaccctgtatccttggatgccgtggagacttgtaggagataaatcagaacgataccaaatgcctttgtttagctcaattagaggccacatgattccccatgaaattatagctccaataagcaaagatgcatttaccatgtatgggcagattaatccaacaccaacataagtcaatgaaaaatcaaagtagaacctacactccataagatatacatacagatcattagtataatttatattataattaggtcattatttagtatgatattacaattatatacctttgagcataggcttggaggccgaatgttggaaaattggaaaatccacagccatcaccagctgaaaaaaaccactggaaaaatgcagatgcaaagctacaaccgaacagcttaaaaagaacccaaacttgcttcctgcattgcattacatgcattaatttcaatcatatatgtttgtttagatatatgtgtttgataatgacagtaatatttattatttactttgcaagcttagctcctttgggggtgtgaaagctgttgatgagatacgccgttgcagttccacttgggtacgttaacttgtacttcataatcatcacctgttaatatataattattaattataattctaattatagattcagcaaattattaagtcagtgagattaggtatgtatttatatatgtgtatatatacggtataggtacctttctgaggggcacgatagagaacaaaccaataaagctgacaacaaacagaaatccaatcatccacccaagtgagagattcttgacattatttggagtactgttaccttcatctccttgggcagctatgctcttactcatagccagtagatagctagcagtgccacctgtatatacatatatgtatatatacgcataattaaagttctgacaaagaaaatagtagtatatgtataacctttcttgaaaactcggtaattatatgtcccagagctataggaattatagttgatggcataattttacatgaaacatttactaactatagtgtagaattacgtatataataacatgaaacagtaccatcaagactcagtttgtcacatgcgaaatttcatatgtatataataatatatttacatatatacattgagtctaattatgtagctcaaagaattatcaagaaacacaacaaccaatcctatata

SEQ ID NO: 2426 - DNA, 1238 bp, Cannabis sativa
aaaaaaaaaaaaaactttcttgagctccttaaaaatttgaatcatatatgtatgatagaaatttattataaataatattctatttatgtatattgtctatgtgttaaaaacttattattttaataatgtagaaaatacaaatagtattaatttaatgttacagagaaaaatatatatataaaaaaaaatagatgtatcatataatgtgaaagtgtgttgtaaaataaagaaagtaaaattttattatggttacgtattttaaagaatagagtagagtttcaattgggagtgttctactcacctcatattctctactctatttttcaaagtacctcaccaagatatcattttttttatattacttcacactttttacattacattatacatcattttttctattttttatctataccatttaaatattatatatttttaatatattttattataaataaacaaaattaaataaattaaatgaaaaaaaagaattaaaatagaagtgagagattattaaaataatatttgaagaatgaatagtgcagaagtactgtttatttatttttttacgtgtaaagaagcactactcataagctaaaattttaaattattttagctcacttgagatatgagtgttcacggttgacttttttcattaaggaccacttttgtgagctgattgagggcttttttttaaaaaaaaaaatttcaaattttgttgctgcttttagtgtgaaggaagggttgagttggatcaaaaatgtgtcacccaatgatgattctagagtatgattgtttagtgatagtattgaagagtatagtccttttggcctcgtttgatgtataagattggattgaattcgactatttactataattcaattgaattagattggattactatgtttggtgtgctgcagactaaataaagtataaagattttttctaataaacatataattttataattatttttttgataaaaataatattaaatgattttgaacacgagattgatcttttttatttatgtatttattggaatatttttattccaacatgtagaattagtttctataaataacaagcctcataattagttatgtcaattagttaagttgtaactaatttaactactcagatataaaaatcaatcaaaactactccgataccaacagcctataagtacatcattcctcatttcatttcaacaagaattaagagagagagagagagag

SEQ ID NO: 2427 - DNA, 2549 bp, Cannabis sativa
tacagttgttgaaccggtatctcctactgcttcaccacagctgcctccaactacatcaagtgagtctcttcctgctactgttgttcctgataccacagttgcttccacttccacagcaactcagcatgcccctattaccaacagtcaccctatggtaactcgggctaaagctggcacatacaagcccaaagttttactggcctctcaaactcctcttacagttgctgctgctcttaagtctccaaagtggaatgcagctatgggaaatgaaattgttgctctaaaaaggaacaaaacatgagttttagttcatctgcctcatggcaggcaacccattggttccaaatgggtgtttagagagaaagagaactcagatggtaataactctacacctaaagcaagactagtggctaaaggtttcctgcaacaatatggttttgattttacagaaacctttagcccggttataaaaccaaccacaattcgagtgatcttaaccattgctctctccaatggttggaccataagacaactcgatgtcaacaacgctttctaaatggaaacttaattgaggaagtttacatgactcaaccccccggatttattgatcctgacaatccagacatagtgtgcaagttaaacaaagcaatctatagactaaaacaagccccaagggcttagtttgacaaactcaggacagctttgcacactcttggctttagttcagccaaagctaaccaatcattgtttctgaaagttacagcaagctccatcattttcatccttgtctatgtggatgacattcttgttactggtatctctctcaattaattaaatagccttattatagctcttaatgcaacttttgcacttaaagatttgggagaaattgattacttcttaggcattcaagtcactcatctctctgatggacttcacttatgccaaaagaagtatataagtgacttattgcatagagccaaaatggattgtgctaactctcttcccaatccaatggtcaactctgaaaaactttctggtctcattggtgatcctgttcctgatccccacctatacagaagtcttataggggctttacaatatgctgtaattactcgaccagaaatagcatatgctgtcaacaaagtgtcccaatttatgcacaatccacttgagcctcacttcaaagttgtcaaaaagattcttcgatatcttaaaaggactattgatcacgagctacacctcaaaacctgctccaaacttgttttgacaggtttttgtgatgcagattgggcatccgatcctgatgatcgaagatcaatttcgggtttctgcattttcttaggatcaaatctggtttcgtggagttcaaagaagcagaaaactgtgtctcgttcgagcacagaagcttgatataggagtcttgcaaatgccactgctgaaatggtctggctgcaatcgttgctcactgagattggctttacacagcttcctattcccatgatttggtgtgacaatcaaagcactgttttaatgtctgccaaccctgttcttcactcaagtaaaaagcatattgagcttgatctttattttgtccgtgaacgaatttctaataatcgacttctagtgaagcatactccagctcagtatcaactcgcagacattcttacaaagcctctgtccacctccagatttcagcttttgagagacaaattgagccttgcatctctatcccacctcaatttgccgggggtgttaagaagttagttactactgttaatagttagttagcttctccttttgtacatctgtatctttatctactttctgttagtaagttagttaatgtattctcctttgtatcatgtatatatagagttcttttgctaatacaagattcatttctcagattttccctttcgttctctttctttactcttaacagttgtatgtctgtttaacatacaaaagttaataatattacactttcgcaagtttactaatcttttcttttctcgaaggtttctggcatacttaaaagaagttttggttatatagaaatggtttataaattttgagacgtgacttcattctgtgttgttgtcaatgtaaccaacatacatttcaaagttgtcatgtttagtaatttgttattcactcaaaattatgaaactgagaagaaattataataaattgtagtatgattttaaacttctgaaattaccacatattttaaattaaatttattttgatgtgtgtggcacgtttttgtcactgagtatttctcaaaaaagaaataatctcattttatcatcaattaataatctgtagaacctgttatcagctgccctttagaatttctctagttttcatatgactattttctcctttcttctaaaacaaacaatttttcaggcattttttcatgtgtgcatgtaaatttattcccataaccaataagatatcaccaaagtctttttataagaagaacaataccacttcagtaaattttgtggcaaaacaacaaacaataaaaatcctttgtatac

SEQ ID NO: 2428 - DNA, 2008 bp, Cannabis sativa
atactaaaaaataaaaaataaaaatccgtaaaaacatttaaaaaaaaaaaggggtacgattttaagtactttatttaaatttctttttttttttagcaggtaagagtagaaacgagttggagatgttgtttgttgcattaatggcttaatatcttttactaattaatgttgatttagcttgagctcttgataatgatatatgaaagagacagttgtgtaagttttacaagattaatattcaactgctttaattggacttttaaccaataaaaataatgaatgtatacatttctaaagcagcacccaaattgatatatggcataattataatttatatagatgcctctcgatagtaaattgatttcaaagttcaaacaatttaattggagaggatgtttgatatacattaatatgttgattagatcttctaataggatatttatatatttagcttctttattgtgcctttcttaacatgttataattaagctaactagttatcatcaattatccttggaggggtactagttaccaattaatgaccatgtgaggggcaatctaataccttgggaagggtaactagttacccctgagaggtaacatttttcctacattaatataaatatatgtgactagtaactcattttactgcaaatataaataatttgttaccatgcaattcgaaaataaaaaaagaagtaactgatttggttggaccactatatcaattttgggtaactagttacttatatagtaagacatgacaactagactaacacacattacaaatttttttacatttagtcacaataaaatttttgactaagcataaatcatctcctaattaagctaaaaaaaacaaagtataaatcatctttatgatatcactaaaaaagtttaatttaaagaattagtcacaaaaattataatttgttgtcactaaatgtatttttcgccacaacacttgttgtgactaaaactaaattagttacaattgttatcaaaatactactttttaatgacaagtaatttttgttgtgactaaaaatgatatttagttacaaaaaatttatgttgcaattaaaaatttatcactgaaggtaatatttttgatagtaacaactggtaactagttaccccctaagactacttacacttattgttactgggatactcatagtaagtaattggttatccctaagattcttacaagtatcttgatagtacagtagaatttctatttaagaatactctattcaaaaataatctctaatttattataaaaaaaaattcaatttggaccagttataaatagaaataacctttaatttgtaattattaatacattttttaagtctcctattaagaaaatatacctctatataagaataattatattttaataaaatatacacatatattttataaatttagtaaagttaataattttattccaaattataatacatgtataaatattatatttatttaaaaataattttattggattgtttatggttgttaaattgatattttgtggtattttaatatttttaatataattctatttagttataacctaacaaataaaatataatttacctcattctaaatgtatttttgaatagaatttctactgtatatgtaacttgttactttgatagtgaagtaaattattgcttataagatttaccctttggatgataacttattattacataaaaataaaaaaattgagagttttttggattagggctcctattgctccctttcaatcagcattgtgctagtaacaaatttaggatttaagttgagagcacaagaaaagcgtactttatttaatggcatactttatttaataacataatataatacttttataatattaaatatataatagtaaaaatataacaataataagttttattagtgtggaggttcaaatactaaaaccatcttttttttaaaagtgctttatgatcttgttgggatttaaactctttgttat

SEQ ID NO: 2429 - DNA, 1286 bp, Cannabis sativa
cacggttttcctccgccacaagtggggttttcattatttatccggtaggggccagtctaagacaatggcctctgtctccttttcaaaaaaaactaatctgagcacaatttggtttcaagttttttcaccataactatatggtgtactcctaacagaattgattggtaaatcatgcccccgtttggttagagttggtgaaaggaaaagaaatggcattggaattttcgtacataattttcatatcagtcaaagaggatcatgaatgtataatcatccatcgttggtggactcttcataagaacttctcaattatgaccccatttaggaaaggatttaaaaatgggcagattatattggcttgacagaaagcacaaatcatattgttgaataccaaaaagaaataataaaaattcaacactggagttcagcgatggtcgccattttttgggcagtttggagtgagaggaactctagaatctgggttgttacatggctttataaaacaaaacactttgaggatctctacatggttttaacttttttgtttttttttcttttactacggttttcctcagtcacaagtgaggttcttcagtaaaaaataaatttgagtggagatagacctcttactctttttcaaatcattatgataataattcatatttatgtatttttgctgacacaaaccatatttcgttaagtgagttcatgaatagggctcttgactagttagttattaacatagaaacaaaaatatcacatgccatttttagttggaaaaaaattaccattctgatatatcttaactttgataaatatagttgaaattcatgatgctgcaggctgcaatcattggatcataaatcctttcaatgagatgcattagatcctggaatgttataagcactaagcatggaagactcatgttcagttagtagtcctagaagaattgtcagtctatcgaagaggaggcaggcaagcgtgtcctttgatgaccctgatgataaatcgtccaggtttgggcagcctggtgaacacggtccaaaaccttccgaagtttatggatttgtaggttccatcacaaccgttgtagctacaggtataacttgttcattacagttttttttttttgcacaacttagactttgtcttagtctaatccaagtaatctacctatttggcttcattacatcctacactgttttgacaaacttttgaggtatggaaatgttttgtttaattctatatcctgctggtaatgttgaaaaatgtggatcgtatacatg

SEQ ID NO: 2430 - DNA, 1415 bp, Cannabis sativa
tgctaagagcctctctggtggagactggtgagggatgtaaaagtgatatatcttttaatacattttaaaaaaatgaagctccaatattgttgtaagaggtgtaccaaatattgcacattctaagttgggccaaatttaacacaaaatatagcatgagtcaaatttgcatataaatgtcatcttttttatttactcatttaccaataattaatgatttttattaattaattttttttttgaacattttatctatttaaataatttttttatatagtttaaataaaaatttaatgactatgttttctttggagtcaatttgaacctgttgcattggagtacaactataacctttgggccaaatatgacactcagtcattttttgagctaaattttccacaaaatcatattatttcaggaaatattggttgatagaactgttcatgctgccattggtagatttctgtcttgccattcttctttggaccaatgtgaaaagcccactttactaagggatgatttttctcgggcaatgcacgatttccttccagtagcaatgagggaggttactaaatctgctccagaaagtggtcggtctgggtgggatgatgttggtggtcttcttgagattcagaagggtattaaagaggtgtctatttcttattactctgtaacatcatttgtattttatattcatttggattataatcggaatatgtttatttatttttccttaatataagatgtgatatttctcaaattgtgactaacttaaaggtaatatcagatgattgaattgccgtccaagttcccagacatatttgcacatgcaccattaagattacgatcaaatgttcttttatatggacctccgggttgtgggaagacacacatagttggtgctgccgctgctgcctgttcactgcgatttatatctgtcaaagggcctgagttgctgaacaagtatattggtgcttctgagcaagctgtaagaggacgatttattttattttcattactgagatgcttacagtttttgctacgccctccaaaatcctttttttttcacataaaagaaaacaatggaattagaatggtaacataatattgctacacaattacataccagcatgctagaaataaaatctgaatattaaagttaccttgagaattatatctgttccaagattaaaagtggcaagcaaaataagcacttcctttacaaaatattacttatgattggaacgcatattctgcagctgatacttatatgttggcttgtaggttcgtgacatattctccaaagctgctgctgcagccccatgccttctattttttgatgaatttgattctattgcccccaaaagaggacatgacaatactggagtaacagaccgcgttgttaatcaagttagtgt

SEQ ID NO: 2431 - DNA, 1695 bp, Cannabis sativa
gtcctactgttaaacaaacaaacattgagttttgattaaaaaccgaacaaaaactaagctgcaatgctgcagtgatcctcaaagtcctactgttaaacaaacaaacaccgagctttgattaaaaaccgaacaaaaactaggctgcaatgctgcagtgatcctcaaagtcttactgttaaacaaacaaacaccgagctttgattaaaaaccgaacaaaaactaggctgcaatgctgcagtgatcctaagtcctactgttaaacaaacaaacaccgagttttgattaaaaaccgaacaaaaactaagctgcaatgctgcagtgatcctcaaagtcctactgttaaacaaacaaacaccgagttttaattaaaaaccgaacaaaagctatgctgcaatgctgcagcgatcctcaaagtcctactgttaaacaaacaaacaccgagttttggatgaatgtaacaagcatactgaatactgatcaaattccatcaacagtttctaaccatatcaatatctaaactaagtaaattaaacttaaagactgaataaaacttcaaaaaatcagtacaattacacttaagaataaagtacatagtaaatatgaaatacaagagatcctaaaagttcttatccacacaattggatatggtttgaaagagtttaatttgcactaacaatccccacatgaacaccaaattcttactatcactaaaaaaattactcttcattaaaaaatatatgtaatacccaatcaaatgatagatagaattttaaatgggaataacttcatatttagttaatttcaaacttagggttctataatatatatatatatatatatgtaacatcatccaatacctaatgtttgatgactataacaatattataaaataaattttgaaacttactataaagtcccaattcaggcctcagaacattaagatctgaaacaaagaaaagaactgattttggatctcaacaaaatgaggcaaagaaaatgctactatatatataaatatatgtatacaagaattttctccagatccaaccaaaaggcataaacaataaaaacccagtaattaaaaaagcaaaatttcccacttaaaaattagttttctgacaaaccaaacacaataaagagtagaaaatatcatcaaaaatcacatcttttttctttactattattctttctccctatatagaaaggtagtaagtcgtacaataataccctaaatcaaaaactaaatgatactcaaagatttcttttttaaaaataaaaaagagaactttagtcatacccagatcaacattttgaaaatgagagtgaagatcgaaagagattaggaaaaggggttaatgggaattaataattttgaataaataatatatatatataccttaatgaagtgttgtttagaagagggaagtgagaatggatcaaagagagtggttggaagtgatgataagaaaagaagagattattgaggagtttagagagtgtaaagatcccatctccatagttgaagaagcagaagaagtaagagtagggaaagtcacttcttcttcttcttcttcttgttggttcttctgtttctctctctaaaggatttagccgcaacaactggtggattgtctgatctgcgaaacccaccaaactgggaaaaaaatggtgttttgtactctctatccttttttc

SEQ ID NO: 2432 - DNA, 2377 bp, Cannabis sativa
  modified_base (521)..(522): a, c, t, g, unknown or other
agaaactttgagagatgaaaattagaagtagaaaacagctttggagactatcatcattaaatttttgacgagttctttcttcttctttacttttcatgttcttaatgagttatttttatcattagatttaaaaagtagtttagatattctctcaaatgattgagagattttctcaaatggttgagagattccctcaatcggttagaagatataaatatctataaccgaatttgatagtattatttattcaaataattaaatatgatttaattaattaaataaaacttttattagatttatttattataccatataataaagttctggataacagtttttggaataagtttttcacgtaatttttctaaaagcctagaaaggttttatcagaaaaacttttttctctctattacaaaagaaattgttcttactcatgtgttgagattaaaacaagaacttcatatacactttgtcctagtagcccacactactctttttgtgtggtggatcgatttggaagnntacggtgtgagtttctaatcaacccaaaagaatacaacatacgaaaacaagcaaggataccctgataggcatcaagaggtaaatattcttttcgtctatttactttttgtttaatatatatacatatggtgatttaggcatatggtacaatgataatcagaaatatttctttgcgtacgtcatttagtaccataaaaccaataattgtgagaagtcaaattctaactttgatatttcaccctttcaacaaggtggaatatcgacaaaatcgagaagttttgagtctacctaatttcacaaaaaaaaaaaaagcgacatctctgagaactggtgaacaacttcatcaaaactgaaaaattgactaagtgatgtcaacatattacttaggcatcaaaaaatacaagtctaggatgtattttcactcacccagcatctaggttgaatgtcaacctaagcgttgggtcctaaacaaccttcagtaaaacggtcataactccctcaatattaatctgattaacgttatccaatttgcattttaaatctctttcaaatatcttttaagtcatgtatcacacccagattttaagtccaaaattcgttcccaagacaagtacaatttttttcacaaatcatctaaaaatgatccaacaaatgaaattcaagtttcgaaaattgataatttttatcaagagtcaatcttagccattagatcattatcaatggctaaaatcaacccaaaatatatatattttcatatttttgtattattttaataggacttcattctttataaaggaagagctccactagtttattttttatattcttctaagttctcataaggtcaaaacatatctctctaaaaattagagttcctgtcttagtcaattttcttgttattcttgtgagcaataaaaatttgaaatagacgtagcttcattatggtcgcaatacgcactacaagaaatgtcacttttgccagcacaaaaatggtattgcgctggtaaaataaaatatacttgtgatgtgttggcaaatcaatgttggtattagaacttttgccagtataaaatgaaaaacgctgacaaaaataatttttccagcgcgtaaatgtgctggtaaaagttaaattttagccactataaatatacgcttaccagcgcattagcgaactgtgctaataaaagtgacatttcttatagtgacgggaagtgaattactataaatcttttgtgtgtgtctatttacttaatttctatttcttctcaccattccagcaaacgattatcagtaatagagttttgcttccacataactttttgggttcttttacttctgggtatatatgttttttttctctctcctccaaaaaaatattttggagcttcaattgaacgtatacaacaacaaagtagatattgttctgagtataaggaaaagtattaggatgtaagaggcgtttagagagaatcccttgtttagtgtagttttgtttaaattttaagtagctcatatgaatacctttgtgtacataagtttcatatttctccacaaataatttttttcccatcacatgcaaaccaaaacttataacaaatacctttaaatgctaccaaacctaaacctaaaatgttcgtaattgaataaatatagtttcatttaatctatcaaaaaatatatagaaatgttcttttttctttttatgacagaatatatagaaatgttttcgaaaactaaaatataaaaatgttgtgccgatagtcaaccataaacatgaaaagcataataagaaaataatttgggtgattgttttctataatcagagattaatataggagataggaaaaagggaaag

SEQ ID NO: 2433 - DNA, 2039 bp, Cannabis sativa
cttatacataagataaccaagcaaaaatctacaaatgaatctttttctattaggacaccactacatagtggaattttggcaaattgacttgaaaaaaaaataaacaaatacatgcatatataattttcgcatgtttatatgtacgaaatacctaagtaatatatataatatatgtatgatattatatatatatatatattaagtcatatatgtggaaatctgatgatacagcaactagataaacaatagcacgataataaataaaaaaagaagagaattttgacacgctgtgattagaaatatatattaaaaactaatgaccacttccatgttagttcattgctagaaacaaatatgaggaacttaaataaatatatctaaggtttagtgggctcgaataatggtatttacacttgaaatttatattaatatatacttataacgtcgtcaataacccactgatcactaaatatcgactaaattatccttatcgtggtcagtagttgatgagtaataagaataattcttcatactaaatcatctataaatacatcttttctcctgctataatttctcatcccaatcatattaattagacaagtttgctatatacacatacattaaaagatatgaaaggaattagttttcttctcactctggctatattggctttagcaatctcttttgcttctgcctatgatccaagccctctccaagacttttgcgtagcaatagatgatccagccaaagcttgtaagtaattgttttaatttttaccaaataaataattccatgcatgcatatgatacgtacactactgagaaaaaaaaacaaaaacctaagagtaataatacatgtgcacctaaaatatgatttaagatcctcagttaaaaagtaatcacatttatttaaacttcaaccttacgttattttaataaaaaacagtatattttaatacatatattttacatatattatatatatatatatgtactcaccgcatggtgtccttctttaaaaattaaaatattgatgcatggctacatactaataacattatatgatatgttgggttactttttatgtgcatgcagtgtttgtgaatggaaaattttgcaagaacccaaagctggcgaatgcagatgatttcttcttatcagggctgaacattcctgggaatactaacaatccagttgggtcaagtgtgaatgctgtggacgtgaccaaaattccaggactcaacactcttggaatatctttcgttcgtattgactacgcaccgtacggccaaaatgcacctcacactcatccacgtggcacagaaattcttactgtagttgagggaacactttatgtgggttttgttacgtccaaccaagatggaaacagacttattagtaaggttctaaacaagggagatgtgtttgttttcccaattggattgattcattttcaggccaatataggacacattccagctgtggcatttgctgcacttagtagccaaaacgctggaactattaccattgctaacgccgtgtttggatcaaccccacctattaatcctgatgttctggcacaggccttcaaattggaaaagaacattgttgaatatcttcagaaacagttctgatcatcgatcatccatattactacaattaattaatgttttaaattaaatatatatactatcgtcacttcttagttttcaatgtgataaataaaaatggtcatcatcatatgtgcgtgtgtgatgatctcatcatatatttgatcaattacgtactctttaatttgtgttattatgggaataaagtatattctgtttgaaaagtttgcttaaatttacatttatgggtcattttggtacactcaaagaaatacaatgttacattgtattttataatattatattaaattatatatagtatatgattcattattcaatagttactttttattgtaacaattacattttttattcacctataataacaaattaaataggtataaatttgttttataaaattaaataaggg

SEQ ID NO: 2434 - DNA, 2931 bp, Cannabis sativa
aaaaaaaaaaaaaagaaactacaacaatccaagttgcactagcgctagcagaaacaaactgcagctcaatatcaatcaacatatttgaatttctaagcaaatgaagaatagcatatatctacttcaacttcaaaataaacttctagtcaattcaggccaaccaaacaaagagacccaaaatccaaaaaatgtatgtggtagtcaaataaaaaataaaaagttccaccaaattatcaatgttgtgggtggctttttctaccccctcctcctgcgtgccacaaacatgacatcccaaccttctaaataacttagagaaatatagtatttagatctactctgcaaagtaatctacgacaaatgaagttagcaaagtagaagatgattcactccctaacaaataaatgtctaagcattattatctttttaaataatacagtacatagcatagaaataattgtacaaaattattacagtgatcatatagaaacaacaaaagaattcaattctatcaacaatctgtgtgagtggacatcataaatttaagggaggaaactgaactgagacaatgaaaaataattccatgacagatgagcacagggcttaaacagtgacaaaaggataatgtttagccacatgaaacaacaaataaatatgcatacattgggagtagaaagcacatcatcataaggatcaggaatcggcccatcaagttgaggaatctttgaggatgacctaagcatgcgctctaccatctcattattcccacctctactatgaaaagtggttccacccattacctggaaggttaaaattaaataattagttggtaaatagcaaaatagatatgcaagttaatatgaaagcgtgaatcaagcttaaagtgatacaaataaaggtaaaggtaaaaggtttatacttaaagctattgtacttaaaaaaatgcaccgtataacaaggacgaactgctactaaaaaatacataaactgcaacataaattgaatcctcaaccaaaaaatgcttttaacacaacaagctactcagaagatgtctcttttctgtcaaaatttctcctacagactaaaacctgtcattgcctgaaccacctgctgccacatattcacctatctacagacaacccttctgtaggataccaatttcaacttaattgtcgcactcaagaaacaaataaaggacaacaaaaacaatggacataataagtagaatataatacaaggactccaaaaatgcaaagtgacaacagtagttgcaccacaaaatattcaagagggccaaactgatcgtgttaaattaaaataacagaacttccaataatgataatgtacgtgaaatggcataatagaacttccaaaaagggaaacatgaaaaaaaaactacaaacctcaatctcaaaaagctcaggggtatccccagctccatcttgctgggggacaaagccaccagcctggtactgtggaggaagatcttcacgtttccgcttaccagaattcatagtgaagaagtcctggaatttcccccacataagacacaaattaaccataaagatgacatgttgattgcattgctatacaacgttatacctcctacaacaacaacaacaacaattatagaataaacattaaaacttagaaaaaagaatcatataaaccataattatctacagctctttaaccatgaattttcttcaaatcagaaaccagcatctttttttcaagtttctaagaaagcaaaacaaacaagacttacttgtgtggaagattgattagcagttcctctgtccacttcatcccgcccttcaacataagctacatccatacagcaataattactataaaatcataaagaacagaagcttcgtaacgtcagcagtatccaaccatgcttaccaatgttaacatctagtggaggccgctggctcatccaagatgaaggaggttgctacaacaatgaatacagaaagttattatttattattttatatttatttattgaaatcgttcttacatattatctctaaacacacacactcacagagtggggtttaccatgtatggactgggtcttccagtagcagatttcagctcagtgttgccactgctaggtgtgccagcaccaccgccaccattatcatttccagatgcagaatagtcactaggaccggtgggaatattataaatgtcagcagttcctggtaaaggtgtttgaatcggagtctgcaacggagtctaccatttcaaagaacccaagtcaactatgataaatcaagactaacgaaaccgatgaattgacatacatcaatatatatatttataataaaatactcaccggagggaacagtatctcagctgtaggggtttcatactcctcagtcccctcatatggtacgttgagatcatgaactggagtaattggacctccaggcgtgggcttcgcagcaccggacctctctatgggggcatttactacacccgcttgcatcattttcgtttcccacatctgaaattttcccgaaacaacattggatcagttaaaccataacttaacctcaaatctcagccaaatctcaaaaccctaaaacgaagatcggatcgaacccccgtaacaccactctagcaagaaccgcaataaatcagtggaaatacccaaaaagtgaatctagaactataaaattcaaaatggaagactattatataacaagaaagatgaaattttggctaaaattactccttgaagctcttttagaacgtcttctccgggaccgttgttcaagaactcttcgcggaccttgctgacaacatcttcgataacactaacatacacactgctcgttgcagtcgccatttatctctcgatgattccttcctccaccgcctcctcctactactccgacgatgtttcggaaaataacgaat

SEQ ID NO: 2435 - DNA, 1845 bp, Cannabis sativa
gtttcttatctgaaagaatggggacatatgaagaggaagattgtcgagcttggaccatggtccaagctgtcagacaatctgcagggaaatccatgtgacggtcagcttcaactcatctcgagagaaaacaatcttttaattataacaaagaaaacctcaaccatcgttctaattctcaacctaatttcaaccctactttttctcaaacttaaaaaacttaatcatttcattttgattaatcgtatctatacaataaaatatactttttttttctacttcaccgtaccatttgtgtacaggaacgttttctttctttctttctttcgccttattttcctttattttagatccaatcaagcatgtggatgtgggtatggccgtgagatgaaattaatcgtacacataacatgtatgcacaattctattgggaccattttcatagagcatgaatcatcatcaaactgtatctttattccaaaattctaatgcgaatcatatcatttatctttattctaacgcaacatctatataccaaaatacctggcttttccaatatggtttatttatgtctaaaataattccaaataacgagatgacactataggcgaacctaaagcaactttatgtgtgtaactgcattatatatatctaaaataaaagaaagtaacaaatttaatgatgattgattgcccctctaatctatcagaatttaacattttgaggaatcaggacaccaaagtaacaaaaaaacaaataattttaagatgccaaatcctgcactgaaggtcaagaaaaatgctgtcatgagataagtgaactttggctcattttggccctgtttatgtcccaaactgacgatgttcatataattataaacggtagttctaccaaaactttaaacgaacaccataaaaatctaataatccaataataatagacaaaataaatgcataggcgaccaagatagttagagctgttaacgatgatgcaaaaagggtattcacagacaaatttaccagaccagtgagcacgttcgcctgaagaggagggaaaaaacatacatcattttgaataagaggggaaaaaaacttaagtgaaatagtgatataggaggatttgaggtttaccaaaagaaaggtagccagtaagttttgattataagctagttcgagcacagacatttttcttccagggataaaatcagagagcattagtattcctaacacctgaaaaacacatgataattcaagttaatgagtgaaataatacaaatgtttttacagaaagataagacaaaataatatgaataatcgagaatatgatgagtaacagtataacagttagttgagccattgaccactagacattctggcatgagtctgaattacagagcacaaaacaaaaaagaagcaattgaaactctggacaatacctggtccattgtgcataccattgtcaaacatggtgaattgtaatgtaataagatttttaagataactatcagcagagaatctgttgagtactttttatagaatgattagtcaaagattcaaagtgtgttcatcaagatacattcaaatgaactcgaaggataaaaacgacaataacttatttttctgtaaaacataaacataaattaacaagtttataaaagtatacaatgacaaaaggtaattaatataaataaaaatgtacgaatctcaaactccaacaaaagacttctattggtcaaactatgttcttatcttgcattaatagattcacatcccttcagaattaaaattagttgaatgagaatctgtttaaaacacttctttttgtaattaacaaccaaatcactataag

SEQ ID NO: 2436 - DNA, 3052 bp, Cannabis sativa
gtctctaattcctcatcacactgaaactcccaagtcagaaatcttcatgatccgtttgtttaggtcggttctctgccttcttaaatgcgacaacatagacgcaacctaattcaaaaagaagaagaaaaaagttacaccacccttacaaactcattcacaactagaaggaaaacgaagataaagctcgacttgcctctgctcgaagtcttaaagcctccctaccaggagtttcccgcaggccatccattaaatctaccgaaaggataacatggttgcattaatcactatacggcagagtgtaacatattgtattcggatacattactacatacctgcagcttgagtctcaaccttgtaaacagatttcgctagacgttgaatatgatttccagcattcctacattattaacaacaaggattttaatcagatataattaaatcttacaataggatatagctacaaaagtaaaaggagttctcgagtcaaatctacgtaagctcggtgtgcccatatttcatgtccttctcagcaagagccgctctctcaagtagtttcctactttcatttttcatcacatcgaccgaaaggctcaattccttcacattcttctcagctttaacaaatttcgcctgagtgaattttttttgcgggaatgagagcaaagttgaagacatattaatataaatgatttcatttcttagctttccataattgtttcagtatgcaaaatcacatcttcttttctccaaagtaaatgaatagacttacaaatggttttacagtcagttaataacatcaagatgtttcaaaatcatatagaactactacctcctcacttcgcagtcggcccaatgtatgacgaaacaagaaccttctaggtcctgccaagcgttgacaacaaaaacattttagccagtagcaaaatggtacaagtatgaagaagaagaagggataagaattttccatcccaactcagaataaacttgtatggaaggttaaacttatagttagccggtatgatgcttaacacaatgatctaagaaacaagaatagaataaaagcttcaaatggacactgaaattgaacaaaaagagaaaatggccggaccactcttctatttctgaaatcgtttagcttagtaacaatgagtcaaagaacgttgtgatgggcgttgaaggatcatttttagtttcataagatcttttcttatagttagcatattcataggttttccctcgaaataaaactcaaacatcaaaagtacaaaacaaaacaacaccaagtattcaagagatttgttggttctctaccaaagaccgagaactctaacgttacaaaattctccgttaccttttccctagacaattcctatgcttatatgccccttaggatcatattctatagaccttgttaaccaactctaacaatctgaaaattacccatattgtcttggtgccaaatgagcactcactgtctatcatcctcagccaaatatcgaaagagaatgcactaactaagactagtgttttcacatttgcaaattaaaattcactctacattgatatgatattcttagagaataaaagtatctatccaaattggtacacggaattataaaatccctcaaagaaaatctctttattaatgatgaaataaaagaataatctagttttcgagatgctagtagctccaattacaacctttcgagagggctgctctctccaagagtctattctcttctatttccaacctccccacaaatgaattcctcccccttatttataggcactagataacataaaatagtgttaactaggaagtactaaaaataagacaaaacaaccctttaaaataaaagccaactaaataaaaataaaagccatctatcctagcgtgtccttctattatatccaaaatgtataggaggaggcttatcatacattccttatgcagattgtaataagaaaatgaatttccatgctttccattgcaatttcttaccattagaacttaaacatagaaaagaaatttactgtgtatttataataaatttacaaagaaatatatgtagttaaatctatgcaaacaaacaatgtgatactaaagaatagtttttccatcaatgcattgtgtaagtctagctaccctaccccaaaggaggcagctcaaatgctcaatcaaccatgaaatgtttcttaatccccaaatagtgttgcctagtttagttgttaagtcaaaaatctaatagttttcccaaccaatctattgcataagaagttgagcatcataataagtgtacaagtgactgcaagaaaaatcacaaaaggattgaattttgaagagagaacacatagatatatatacctgggagaagaaagagggcagctgcaaggccaaccccaacagtagcagctgggtattccctagtactcttcaactcttctggaaaaaacaaacaaagaaagacccaattggccctaatttccagaaattgaagaaatgaatgaatcatgaagagttaataataaaaactgcaaacgttgaattgtgttgaagaacttgtcttcataagctgtgtagttggatttggcatcagctactaattcctgctaatcaatcaaagaatgaataaaaattacaaaaagaaaacaactttgagagtaaaaagaaagagttagtgcctggagattggtccaatgagaagaagagttatgttggagataacgaatagctgaatgggtggagctcagaaccattgatggtattgaggttgaagatgaaccattattcttcttctccatggattgaccttcgccggcggctatagggggagacgaggattccgattccgattccatcgccatttttgattttccttgtttactctttcccctcttatcaattattattattattatttatttccccttaaaatattatatatttaagcctaattgtgaatctttcccctaaactttttattaaaattgttgggttcaatcatttttgtaccaaattatctctttcgaatttttgtatacatcacacgct

SEQ ID NO: 2437 - DNA, 2651 bp, Cannabis sativa
agttagactaaaccattaagtaatcacaaaatttattagtttcaatttagaacataccgcctcccagtctcggttaataaacacatcaacagtgactgcagcctccagcatgataagcaagaacacaaacaacatatactgtacaaatttaaggtcagcaataaactcacaagagcgagccaattatattcagggtagcaatatgaaagcaaaagaatacactgcaactttgaataaacttctgtgatcaaaagcttcaattgttaaaagaagtaaaagtcaatcttcaacaatactagttagtgatgtagcaaggacattaataacatatttatctcattgccatgattattctcttttcgattttcaggtggcttattggttttcaagcagaagctcttgttttctgaagtgaattttttgggcccaagttctcaattattctaattgtcttatccctcaaatgtaatattttttagtctaattttctgagggcagttctgttttctttttactcaaatagtaaaagatgtatggatgatataacatacatttcctatgttgtggtacgactcatcacttggtaaaaagagccataaaacaaattgttcaatgaggaatagcaatgaagctaaggatttgagcctactttattccacagagagaaaaccttatattgtaaaaggataccaaataaaggcaacaaccattcgtagtttctgcagcaacatgaccagagcatgttatcacacacagcacaatcccaaggccaagggaagtgtaaatgaacctgaagtatatataacaaaaccagctgctttaaaaggaactcaaatacaaaatttgagagcaaaataaatactacaaatgttgcataaagtaacatgttgacaaactacaatcagtatgaagaagtagtaaacaatcaaagaaacataaattaaccaaaggaaatatcaacccaaatttattttcctattaattcctccattaaacagcacacagttcaacttagtagacaaaaaagaaaaaaaattagcaatgggtcctggataaaacctcctaacactgcataatattctaagttatagagtttacaactctatttaatttgaagtctctcatttcaacattaaaatttccatatgtacataatcgctaaaaatatattgatcaaacctatttcggaaaataagcaatttcaaatagtacagactcaagcacataattaattatgattcttaactgtatttctattcaatttgcaggcaaccagacagagcaagaatgaaaacaacacatgcaaacatacaaatagtatcaataataattaagaaaaataaaagggtgataccatggaacaggattatcagaatctccaaaggggaactcatccatttgcctctgccaaaccctaataagccacaaggagtacaaaatcatggctatgccaagcattcccatgacagagttcaccaatttcagaatcgattgcaagcaactcctcaccattctcgccattttttttttacctccaaaaccacagctcacaaaaatactaagttcgaaatattggactgagaaggaaggagggccctccgatactaagtcgtccaaactggtttctattttaatgttatttctgtgctaagaaacaaaaatccaggtggcctcaatcaaattagttttttgtccttatcttagaaaaaaagaaagttttccaaattcgcacatttctctgtcattttaataaaattattcaagggcagcaaatcagatgctgtggtgtagtggttatcacgtcagtcttacacactgaaggtctccagttcgatcctgggcagcatcattttctactattacattaaaattttactttttggacaattagaacgtgaatgtgattatgtgatcataattttgttatgtttccatatggaacaaaattagtctgttattacaagaccaaattcaattgttatagtaacattatttttgacaatgctcgtagcaaacatagcttaattaaatcaaccaactgagaagctgtattgtttcttaagcagagcttgatctgttgagttgaatttgtagctgcacactattgggggtggaaatccaagtacattctataggcatttcgatcagatgaatagtaaccttcaatgagactatcaactttgaaacccagtttcttgtaaagattaacagcaggatttctcaatgggtcaacatgaagagatattcgttgcacatgtctcgttctgcttttctcaatcgctgcttttagcagtgcctctccatatcctcgcctccgaaaattctccttaactaacaaatcaagcagtccaaacaaaagtcgaaattagagaattaaagaataagctttcattcataaaaactgttaaacactattgggaactttcgtcgagcatgttgtgcgcacgagtagagttacacactggtagtttactaaatcagtttcccatcatgaaaaaatttgattttttttcggaaaactggtgggaatttgaaggcaatggataaagatcataaggagacaataatcgaaagcgaaagagggtttcaaaacctgcgagctttgagatagaagcggaaagagaagaaggccatgagtacattacatagcc

SEQ ID NO: 2438 - DNA, 2308 bp, Cannabis sativa
gtaaaaatgtatgtgatgatcatactcataaccaaggtgaatgaaatatatatctagtttcaaaggtaaccatattgtttcaggtgaggcaaatggtagtggcaacattgttcgaatcacatatacaagtatcagatgaaactgttgaagctatccttgataaggcaattatatataatgaccaacatagtttttctttattctttctatgaatgttgtggatttatttaaattagctgtatttctgtgctgcacagacatttgcagatgttgatattgataatgatggtaaaataaacaaggatgaatggcaagcatttgttattagtcaaccaaaactcctcaataacatgacactatatcaattaaagtaagtatattcttatatacaaatacatagctataatgattatgaatgtagtttcatcactgttttagcacgacttattttgattccaacttcatgtgttacagagatattaccactgtgtttccaagcttcgttttcaacactcaagttgatgataactgaaaaagtataaatatagttcatacttttaaattaatttctatatgattgtaatagtttacaaataatttagttaattttttaatattaattttataaaatcactacaaaacagaaacttattaaaagggtaatgtatgaatatttttactctcaaaaagaatatgggatcacgcaatttttttcttccagcaagttaaattgataaatcgaatgggacttttttagtttctcattaagaaagaattcttgaaaaatgtcatcattagatggggctcaaatgaatgcaaatcattgtaaatgtccactaaactaatcaaaagttgttacttaagaatataaatttaataatatataacaataataattcaaaaagtagctcctttggtgccttttattacatttgtacaagcaaagtaaattaaaggaaggacaaaaaagaattaactaagaccagagtgaacatagggattttaattgaaaggtcccataagagttgtacaaagttgtctaatatgactatatgatgcagtaatcattataaaagtccaattggatgacacttgtgtttagcttctgtgggtgccacccacacgtgtgcaccatgggaatattttttttccttgtcttttcatgtgggcagctctttttttttagtatcattgtatgaagttacttagaagctttttctttaatggccacaaaaggcttataaacgaccctcttttcttttaacccaaatgggcaaccttctcttcattcttacagtggggaagttgactattgtatcctcctcagcaacccatctgcaattttttaacaattaaaactttttatataaaatatatcttatatgtataattgtaaaacacagtcaccttattataaacaaagtgtggtcaagcaagatctctaagaaatcttataaaggtataatgcacttgcaggccttgttagatccttattaattacaataggttttctttttaaattagttaggatatatcctatgcctagtttgaccatgtaacatggcattcattctttgaaattatatatttaatgaactcaacaataattggtggattgcagcatgtaaaacaagagaccagttagtttattcttaaataaatcattgtttataaacagacaaattgtctttagggaaagtttgtcaaaaggggccaatggtagatacacactaatttcagatttgttattatttggatggtaaaatgctacttatagccactacctatagcacccaacctaattgaaattgtagaaaatattcatagccattaagttaagggcattaaattatattagagacattagaatcattaaaactcatacataatatacaacaagtaagagactaaattccaaaagttaggtaagatgtcttaaaaagagattccttataaggctttctttctcatttttgtgtcgtatgtggtggtgaccatgctctactcacatggataccccataaaaggatccaattggataaatgtttggaatgtatgacacaagttattaaaaatgactaataacaaaaaatagttgcaagaatctaatctaccaatattaattatatgatatggtttttgatctaataaaaagcacatatagttggtacaaaaaggttgtatattttaatagaaactggtactagttgcaaaatctcttttgtctttctcctgaggaaattattattatagaaactgaaaggacttggttcaaatttatccaaatattgtgcaaattttaatggga

SEQ ID NO: 2439 - DNA, 2271 bp, Cannabis sativa
tcaaataccctatcttcttgttgcagatcagttggacttgttgctgaagaacattctgtacaaggaggtaaacaaataccatcgcaattgttatcaacaatgttggcagagtcagcagaatcaactgcttccttttctacttcaactgtttcatgtgccacagtactcgagtttacaaaatcatcacttagatatccagatggatgatcccgagaaacaacaccggttccaactgcatctccagaggcctctgttccagaaatctcgtcagcatctggcatttccttggaatatggaactgactcagcagaaatgtgctcacaagaagataaattgtcactagaagttgagaactgcaactcctttgagccaagggtctgaggagaattcacagtggaaggtatctcttcgatatggctctttccagtatccatattgggaggtgaatcctccaagttggttccatttgctgtaacaacatcaccttttttcaaaaccacattttcagcttctaacacatcagaatgatcactagacaaagtaaaattgttaggcaatacagatgtagcagaatcagtttctaagtagagctgcttttctgtaattgaattacttggagactcaacttcaccactaaccaaacacttatttgaatcttcaacttcattcagtgcttcaaatacatcatttactgaagtctctccgctttcctttccagaatctagctctgaaatgtttgacaactgcaacgcatcatcagaaatgacttttggattatcttccaattcattgacggtatatctttcagaagtctttgtcataccattattttcttgggaggaaacttgggtatcaactgatgataactcaaccataattgtcccattttcaacagtgtctggtactttagaattgcggttgatacattcaggggacgtttcaactatttgagctccatccgacaagtctgtactcaatgaactagctccagggtctgactgcagtggactaggataagatgcattttcgtgatccggaatgctttctttcttgatgcatatatcatgggacacaaactcatcatccttggatcctgtaggctctgcaattacagagctctcattggttgatttatctacaatttcagtaccacaaatttcagaaggagacactttagcatctccatcaaaatctgagggtgtattctcaacaacactgcttggagtgtcagagtaagagaaactcgatctgtttttcttgaaagaattattcccatcatctgatgtagaaaagtttccaactgactgagtatctgagagctgagctacacactcaagttgttcttcatttgcatcagaattagccgtatgtgttgcagcactcaaaaagcgagtattagtattatgcctataatcattgtcggtttccaattctgactccatgctagcaagggcatccacgtaattgtctatctcactagtcatatcatcagagtcatatccattgacaccccccttacttttgctgtctcggacacttgccttctcatattgcattacacgaagagaggaagatcttttagcagtctcatcattaaaagttgtatcaggcaccttgataatttctctaccaatcacctccttgtcataaccatttattggttgtcttaatgcaacctcatggacattaggcaatgaacagtcatttctattcctaggtgacctttctgcaggacttactgtactaatttcaagtattctaatccctggttcactagtatagtctgatgttaagagtgctggagtaaaagaagtttcacaagccagttcacgctcaggtggaatctctacaaacttctccatgtaacttttccctgttttagaatcaactgcagatccatttatctgtttcctcttcaatttaaccagacgtgcagggtcactatgaccgttctcaatacgctcctccaggaacaactgatgcagtctgcactattcaaaacaatgagttaccaatctttacaagtgcataaacactacaatacaatgcaattgattaaatgaaccaatacgaaataagatccctcactttgcatgtgatgaaggtgcaacttccggggttgtttccccattcctccaacgcattcctttcctctgctaaaagcaaaagcaaaaaaatcaacatcttactaaagaaatatgtacagtacaagggaagctgatttccaaatactctggccatgaggaagcaaccacagtattggtatgcatg

SEQ ID NO: 2440 - DNA, 1524 bp, Cannabis sativa
gccggagcccgcctcctccgtctaggtcttctttagcaccggaggacgggacggagtcccacgcacgagagtaggacgaggtcgttgacgaccaaggcctggagcgactccgatttcatggcggcgccgccgtacttgacgacaatagtctttcccctaaacttctggatgaaggggagggactcggagagaacatctacacgaagctgacctggggtggtggctgtgttggcgacggagagagtggcggagattggttttcgacgaagggaagaaagattagggcttttggagtttgggaatttggggtattttgaatctgatgatgaaagaaacgagagatttgggggtactttcactagcgttttagcagctaacatttttcttctttttctcgggaaagtgatggaaagatgtatgagaaaagtgagctgagtgagcggaaagatgtgtgaaactgaactgaagagtagtgaagagcatcagttcgtacttgtgaataaactctaactattgaaaacacagctgtcctaaatgaaatgactcaaataccctctatttagcccatcctaaatgaaattttcactttttttttttattttttttttatttttacggtggtgggagagaatttttttaaaaaataatgtgtaaattttatattgtgtattgtgttaagttttcactgtcattttacggttgtttttcagttgctccactgttgttttaattgttctgttttgttgttttacaattattttataaaaagacagtacttttgtaaaatattctgtttgacagtaaaattgtaaatttttggtcaaaatctactatttttttaaaaacccttattttttataggaaaattttatttaccatatttaaaaaccacccaattattaaaaaatacccacttaatactctatatcactaaacttggaaaagtgtaatttttctctcttcatgagttttcctctagtggagaagggtggtttttagggtcaattggtcgccggtaatttctagcttccatttttggttgctggtgcttctctcatttcggtatggatgatttctcaagcctatatgattccctcatgagaaaggatgattatgtggatgaattttgtgacgatattgaccctaaattgcttgaggacggtgtggaaaaaattacactttctcatgttagaaaaattataagtacgaaaaaggtttcttgtaatgctattatatgaatgttaagttttattggcagcttcaagggactcttgaggtggaagcccatgagcggaacatcttcctgttctgttttcaattgcttaccgaccaaaaattctttcttgaaagtggtctgtgggttttcgatgatcacattttggttcttaaggaggtagaggcttttttagatccaggtgataggaatttcgactttgcttgtttttggattcaaatacacaagatcccaatggtttctatgagtcaagcatgggggtatgatcttggtcgttcggtggggggggg

SEQ ID NO: 2441 - DNA, 1001 bp, Cannabis sativa
gtccagccctggtgcattggtgcagcactctgccccaggggccccaaatattgacactatctaggggaccacacatcccaagtacaccaagcaaaccccttgacgatactaaacaatctcagattattgtagatgatacctgatatttgagcttcgcaaattctttaatatccgaccacaaagtttcagagcacacattcatatacaaagattgattttttcttccagatgctccacctttccattttccatgccccttggaaacttttccaaaagattgactacctacttggtcctgtacatagtagaaaatgttctaaattctctaaaaaaaattatacacttttcactaagatcattggggatatgaattttataataaaaataaataaaaaactatgtaagtaaaccactaatacagtttcccagtagaacaaaaagtaattacatttttttgtttgagtgtatcattaaataagctcttgaaggagtcaagaactaaatctgaaatctctaaaacataaaaatgaaaaatcatttccgaatgagaaacttcagaaaaattcatcatttaaggtcaacttggacttctcaattcaactacagcataaagttaaaacacaagaaaacaaatctccaattgccacgagagtaatggcatgtgcacccaaaatatgcacaaagacattacacacaaagaagtggtactttattctcaaacccaatcacatttattttagatggcccactgtttttaaaaatcagtaatgttttggtgcatattttggatgcacatatcattactcttgccaaaactactaatctattttgaacgtaccttttttggtgtcctagactgcgtattactagcagtgcttttcgtcccaattgcttgacaacttccaaatagacaattgaagaaatgagttactgctggcccaagatcatgatcctcagtttctcttaaaacatcctgataaaagaaaaattaaaagtcaaac

SEQ ID NO: 2442 - DNA, 7372 bp, Cannabis sativa
tagtaattacacgaaaaaataataatttttattagtaattatatcatttaattacactcaattcccatggagaccatgagaattggagagtgcaattggaactcctcaattgcctccaattgcacagatatacaatgtaatacgtggtcagacaaacatgtcaaattgtgtaattatctccaattacacacaaatttaattacatcctgactttctaaacgtgcccttaatttttctcactacaataaatatatgtattaagagcgacaaaagtcgctcccaaaactatagaaaattgcctctaatgactattagaagcgacaagtctcccttaaaaaatcatctctaataattcttacctaaatgtactattagatgcgataaaaaaattcgcctctaattagggacgctaatgtcggccctaaaagtaatctatgaaattctaaactttatttgtaagggcgacaatattgcctctaatacctataaagtggcccctagaaagccttgtcagaaaagtacttttgacttttaaaggtttgtaaattaaaaaaataataataaatcatatataaatctatatatttacataaatagggacacgattttgtctcgttagtgtactttcacggaatgtattccgtcatgtacttaagctattaggtgatgtacaacagcctttagatgggtctcagggtacataataatgggtctcagggtacgttaccattttttaaccttaattacccctaaatcaacccccctcagaccaaataactaccccatctaacggctgtcgtacatcacggaatacagtccatgaaattacactaacgggacaaaatcgtctccctacataaatatatatatactcagacagaccaaatacatattcatatatatatatatatatatcttaatatctttatatatatactcaaacacacaatatatacataaatatatatacacacaagcatatattcatatatatacataaatatatatactcaaacacacaatatatacatattgatatacatatatatactcaaacaccagggccggtcctaaggtatatggggcttaaggtaaaatcaaatttcggggcccctataatatagtctaattattatcaaaatgatagttctaatattttagtgtaatggtaaaatctttaaaaaactcttaagagctttaacgttcaatcctccatagctacacaataaatattttttttaaaaaaaataaaaaagtagagattagggattgatcccttgaccttttagcttaaagtaaaacctttttaccaaacaccaaataatacttgttatattttcttcttatttaatactaggtaacgataccgcgctttacgcggttgtttacaaactttttatgtatgttgtaaaaataaaatttatatttaatatattaaaaaaattgttagttaattaatatattaatgcactataaaaaaaatactaaaaattataatcttaatatgttaaaatattaaatcacattatttaattgaattattattgttattatcgtaaatttgttatataaattacacgtataattatttgttaaaatatgtaaaagattaatatttttttaaaaaaaatacttcaaactaaatcaaccacaaaataaataatctaaaataaaaaaaaaaattaaagagtttcatcatctttatagcttgcaataataaggagcattaaaaacagaaaacacaaaatctaataaggaaaaaattagcgaataagcatatctttattattattattattattaagataccaaatttacaatgttacaaaattaatgtaaactattaaatattttgtttatgttttttttttattattaaaaaattaaggggtgttttcatttatactttttgaactgactttctattcatttatacgttcatgtgaaatttaattcacaaatacacttcttttgcaattatactcctattcctctacttccgcccctggtagccgccaccgccacaagtgctgctttctttcctcttctttctcttcgtgtgcttctgtaagatcacttgcaagagaatcgccccagaagccgagtcagtatccaaaccacgagtctaggagatacaatcttccactacagacattgcaaaccataacacttatttgagaagatgaaggaatcttctattatttaatcacgattgtgacaagaatcagagttccctctggttaggagtaacgacagtaaaattaattatcgagtgttaagctccctcacttcttgccatggcagaaggtattcttttcctctctctctctctctttttctttgaggtctttcgaaagttataatggtgaatgaaaccatgtgaaattatttgggcttggggcaagcagcttcccaagtcgctatttatgctctgttgaagacaaattgaagtagaatttgacacacacacacgcagaagccaatatttttagagtagaagtagaatcaaagtaagagaccatgcaatagaaaattgtgccttaattgttaacatcatgatggaaacctgctgtgcaaagatggatctgaaggacctaattgttaaattatccacaggcacaaattgaagggaacatttttttagttgcacattttttactgtgtcaggatctatccttttggtttgtgttcttaattgttaatattcttaacgcactgcagcctttcttactaggaactagtgcctattgtcctcatttaagatggaaaaagtgttagcattttcagtggggcaaaatgcttcctcaccaagtctagcactcttccttctgctctaaactttacaccttttttattacctttttattgtttttaggtctcttcctaccttttgagcactttcttgtggtcaagaataaatggtgagtggtgtgtttttgggtcgttgataatgtttgcacttgaaatatagttatggataagactgaaagatgcctattcatgaagggaatgtatccatattgattaagttgtgtttgaagaataccaagatcacaatagtggtggatcattagattacattaagacattagccttcaaaaaggaaaaaacttgactaaaattaacatgtgaaaaaaaataaagaagtagaaccttaaaattaaatattgtgtagtaaaacaactaggtgagctgtgttgtatataaagctttcagaaaagaaactatacatttatcttgtttctgcacaatagagaggattgacttgctcgttttatgcatatgggatcgaattgtctattaaccttgcaattctactgaatgatgaggtagaagattgttcaggtctattcaacatgtaaagcaatctctttttgttcataaagctttgattttagcttgtgttacaattctcttagtggagtttgaatcatcatcaaactttttaaagttattagtattgtgaagttgagaagatagctgctggtggaatgggtcacctgatattaattttatctttaattttatctttaattttatcttattatatgaatcaaatcattctttaaaagagattaatttttttacttgcttattattttgttgcagttgatgcgtgttgcagaggtcaacactttaccactttggttcatcctttgcaggtatgtttggagcgtttttcaaacaaattagagtactacatgaaaagcaaaaaacagtaatatcagtcacaagcgctacaatgaacttaaaagttaagtttctttactttgttgattacctcctcacaaacgaattccttacttggtattacaggggttgtcaaccgctataactttgacattacgtgatgcaatgacattgagagcttttccctatgatgttgaagattgaataaatacataagtgaaaacttattgtgtatgaaagtggactaatagttaacatcatgatgcaaacctgctctgcaaagatctgtcaatttatgtctaacaagtcagcttgttctagtctaggtcctcgaggcttttctccaattaaaagagcccattgaaaatggaaacaacttacattgaaaatagaaacaacaaacattgaaaatagaaacaactcacattgaaaatgtaaattaaaaatgctagaaatagaaacaacttgcatttgacctcatatacatctatgtgaaatgtaaacaaatatcatacaaaataaaaacaactcacgttgaaaatgaaaacaatataatctcaaaaaaataaaaacaactcacgttgaaaatagaaataatttaacctaaaaaaaaaacaacatgacctcgaaatagaaacaagtatatatgtgtgtgaaatggaaacatatagcattagaaatacaaacaatttaacctcgatatgaaaactatagtttgaaatgaaaaaactgtcataaaaaatagaaacaactcacattaaaaatggaaacaacacaaattgaaaatgaaacaatataagctcgaaatagaaataatttaagctcgaaatggaaacaacttgcatttgacctcatatatatctatgtgaaattaaaaaaatagtagcaactcacattgaatggaaacaatttaacctcaaaaaatagaaacaactcacattaaaaatagaaacaatttaacctcaaaaaataaaaataacataacctcgaaatagaaacaagtagcatatatgtatatgtgtgtgtgaaatagaaacatataacattggaaatagaaacaatttaacctcaaaatggaaacaactcagattgaaaatagaaacaacacaaattgaaaatagaaacaacataagctcgaaatggaaacaatttaacctcgaaatggaaaaaatatcataaaaaacagaaacaacacacattgaaaatggaaagaatataagctcaaaataaaaataatttaacctaaaaaaatagaaactcacattgaaacataacctcgaattggaaacaagtagcatttttactcgtataaacacatatatatatatatatatagaacacttcttaacatatatatatacccattaacatatatatatatatatacatatatatatgttaatgggtaatagaaatagaaatatatagcattgataatagaaacatatagcattgaaaatagaaacaatttaaccttgaaatgaaaactttagtttgaaatggaaaaaatatcataaaaaatagaaataactcatattgaaaatagaaacaacacaaattgaacatggaaagaaataagctcaaaatagaaacaatttaacctcaaaaaatagaaacaactcacattgaaaattgaaacaatttaacctcaaaaaattaaaataacataacctcgaaatagaaacaagtagcatttatataaatatatatatatatatatatgtgtgtgtgaaatagaaacatatagcattagaaatggaaacaatttaacctcgaaatagaaaaaatatcttaaaaaatagaaacaactcagattaaaaaaatgaaacaatacaaattgaaaatgaaaacaacataagctcgaaatggaaagaattttacctcgaaatggaaattatagtttgaattggaaaaaaatatcataaaaaataaaaacaacacattgaaaatagaaagaacataatctcaaaatagaaacaatttaacctcaaaaaatagaaacagcgcacattgaaacataacatcgaattggaaacaagtagcatttttactcatatataaatatatatatatgtgtgtgtgtgaaatagaaacatatagcattgaaaatagaaacatatagcattcgaaatggaaacaatttaaccttgaaatgaaaattttagtttgaaatggaaaaaatatcataaaaaatagaaacaactcacattgaaaatggaaaaaactcaaattgaaagtggaaacaactcaaaataaaaatgaaaacaatttaacttcaaaatgtaaactatagtttgaattagaaaaaatatcataaaaaacaaaaacaacacacattgaaaatagaaagaacataagctcaaaatagaaacaatttaacctcgaaaaatagaaactcacattaaaacatatagcattggaaatggaaacgatttaaccttgaaatagaaattttagtttgaaatagaaaaaatatcataaaaaatggaaacaactcagattgaaaatagaaacaacacaaattgaaaatgaaaacaacataatgttgaaatagaaacaattgtacctcaaaatgaaaactatagtttcaattggaaaaaatatcataaaaaacaaaaacaacacattaaaaatggaaagaacataagctcaaaatagaaacaatttaaccttaaaaaataaaaacaacccacattgaaacataacttcgaattggaaacaagtagcatttttactcatatacacacatatatatatgtgtgtatgtgtgaaatagagacatatagcattgaaaatggaaatatatagcattgaaaatgaaaacaatttaactttgaaatgaaaactttagtttgaaatgaaaagaaatatcataaaaaaatagaaacaactcacattgaaaatgaaaacaactcaaattgaaaatggaagcaactcaaattgaaaatgaaaacaacataagctcaaaatagaaacaactcacattaaaaatagaaacaacaaaagctcgaaatggaaacaacttgcattcgacttcatatatatatatatatgtaaatgaaaataaatatcataaaaaaataataactcacgttgaaaatggaaacaatttaacttcaaaaaatgaaaacacctagcactgaaaatggaaacaacatatgagtgaaaaacaaaaaagtgaaaaaagcaaatcaaatgcgaaaatgcaatcaaccaggacgtaacaaaaagacttgtagaaacttgcaaaactagccaaaattgattattgcttgattaagcaaagttatgaacgatttagtttggctgttaaagtcactacaacatacagtttatttgttggtttataaaaatagatttggattgatttgttggtttacaaacatagatatggattaatgtgttgctttacaaacataaattttgattgatttgttggtttacttgtattcagtagtaatgaggttgtaaatctctattaaatatgttttcatgagttagtagcatttaaccttttatatatataatagaaacaactaacattgaaaattgaaacaatttaacctcaaaatggaaattatagtttgttgcgaaataaaaacaacaagcatttaacattatattacataaaaatggaaacaatttcacagtggaaacaaacactactacaaaaactagtttt

SEQ ID NO: 2443 - DNA, 1179 bp, Cannabis sativa
atttaaaaaaaaaaaaaaaatgtaggatgggagggggtgcggggagcgatgcatgtgtaccggctgcgttaatcccaacggaagaaggccgtttgacctgaaccgagttccataactttttcttttggtttttaggtttgcttggtttgtttgttactaatggactatagatttcttttgttattggctagcttgtacggatgttatatagataaatgttttagattaaatgctgtaattacggaacaatattgaagaacaccgaagcattgttacatacaaaagttagtcatatcaatcgcaaacccgtagtagcagtcgattgcataatgcataactcagtaaattataagcaagcatataacgattccaatgaagataagaatggacaacccaaaataaaaatacaaatctcagaatgcttaatgtttgctcattaagactcaaaatggtagttttggaaatagacctatttgtatgtataaattttaaaaactaagtagaatgctttgtttcgttacaaactttaggacattgccatttccaattggttggtttaatatttaaaaaaaaaaaaaaaagaaagtcatcacaatactatcccaactgatttaaccgttggaaaattattaagttttttaaaaaatttccaattgaaaatacccatttttacttgcccaagctgaactacaaacaattttcgaaagctttttggtttgttttagaaaaatcctttctaaaaatctttaaggaacttcaacaatatataatgatatgtacaaattgattaacatcaaattacccaaaattaaggtgaaattctattttataaaaccaaggattaccaaactttttgttttaagttggaacatcagcaattaatttcagtaaaaaagattctcatatattgtgtcccaagctcctagctttttccaacaaacacctctgaatctgatcttagaaggtctccataactttctaattcttagtttaaagtccgatttggttggcccattggaagccactgaactggtttttgcttaagaacatgcaacatcaacataaaataagaaagatattacacatcaaagaactaagctaaacacttgataacatcaataaaactcaatcagattacatataaacaaaagaaactaagatttttacctctttaatttg

SEQ ID NO: 2444 - DNA, 1110 bp, Cannabis sativa
agagagagagagagagatagatgaaatggaaggcgactctaggttatgttaggccttttatatttgtagggttttttaaaatgggttgaagcccaaatctattatttttattttaaaaaaaccaaattatttgcatcagttcacaaccgaagcaaaaaataaactatttgtgtgtcagttgtgaactgatgccaatgccttaaaaattgacacaaatcgtgcttcacttaatgactaacgcaaaattcgaccacaaatttattgtgtcaattttgtaatttcaccgaccaaaatttgaggttctagatgaagtttagcggtgattagagacatttttcatatttagagatgtttaatgatgatcgtagcgatgcatttgcgatatgagactaaaaaatgcaaagtacatcgccaaacatctataatcatcgtgaaaactttagtgtgttttagcgacatttagtgatgtgatttagtgacatttagtgatgcttcgcaacatcgtgaaaactagaaaacaaaatccagaaagagagcgatgggttgagaactatggcaatttcgagggtttcggggtggttcagcttgtggattttaggggttttagagtggctgagctcatggatttcaggagttttggggtggttgagcttatagatttagggctttggggtggagatggagagagttaaagagaggccgtcacagaagaaaatcgcagggggcttgtgattggggttctaggtctaggtttgacagcaggggttctgggtcaaggttgaacgccaaagagtgagagagtaagagagttaggctatttttaagatgtaaggttatttttgggaggtaaagatactaaaagtatagataccctatttctaattgggtggtatattgaaagaccatgctttacatttaagcatgctaagcaaaatttccctttccataatctgaaatttataaaatacactgttaatacatttttgaaaaaaaaaagataaaaaaataggtttagttgacctttaaacaccacccccatcaaacaagaacgatcaccatcattggtagaataggagatctgaacactactgaagagagagagagagagag

SEQ ID NO: 2445 - DNA, 2988 bp, Cannabis sativa
agtcaaagtgaaaatggaaacggcctatggtaattttcaagttcataatggcaccgacaattatttggcagaactatccaattctcttttaaacttcaatgatgaagagctcttgtgtatgacttctgatggaagagatatgattgataggtcttactatgatggtctaagctctcttttgttgagctcaccaaatgatgttggtcaagatcaaacgaccaatataacagaacttgagacatctatagctccagatatgtgtactgcgaatgaatctgctccatatcacggagagctgcatgatgatactgagtgccgtgaaggtgatgaacaaatatcattcagttctccaagccagatgcaatcatctatattagcctcaaaccttcaatttcctgaattaaaagatggagttatttgctgtgtattaaatactgaggaccctgaagttccatgcaatgatgatgtttttatatcaaatcaaccaacagtgatgtcgtccacagcagaagcaaagcttcaagaaacaagtggaccactttcttcatctattaaggattgcagtagtaatcaacgaactagtgatagaggacctagcttaatgcataaagaaagaaaaactcctagagagtctcatgtgatgggatcacatgttttacaagaaatgggtctgaatccttcagctggtagttttggggttatgtttgcagcttccaagtctgactcggctagtatggcatctaaggttgctagtattggtttaaattctgcaaattcaagtacaaggacactccaagagactctgaaggaagagatcagagaattgccaatggccaagcatctcaactcaactgatatctctattgagaaaccagattttggctctgcgagctttagaagctatccacacggaaatgccattgctatcgaggaggaacatgatgggttcagagatcaggagtcaatacaggctgaactgacacgcatgaattgtactgtttttaaaccacatttagacaatgcaacagctgagcatgatgcaatgcttaattacagtgaagatgacataccttgttattcagatgttgaggcaatggtaaatctggaagtgctgaatgcagaaaaatagaaaagaacattgacttagttgcttggcgtggtttgttttaatttttatgtaggttttataataaccttgtcttctccacctgcaggtgcttgacatggacttggatccagatgaacaggacttgcattctagtgaagaaggtaataataaccgagctacttcactaattgactgagcttattgttagtgctatatatctggacttattaatgtatgttgacatgcgtgtgattttttattttccctagtctggtattttcttttatcagagcatctaggagatgtgatatgtgctctgcctctgtctatagatgattaaacaatatgaatatggtattttttttcgcaagaattgcactggcatataaaattgggacaatagttcctataaatttttagattggaatttatgttcctgggtaaatctcagtttcttcaactggagatcatatgcaaatatttgcatgttcatatattttggtcatttgttttcaaataatgttatcatgccacttttattaaaaagaaattatcatgccacatgtttttatgactaaattccagattattaaataaacccggcattgcttctgaatatgtgtgccttttcaatgattcaacccaatgtctctttcttttcttccccttttgttttgttgttttcttcaacatccttcctattactccctcccctaccttttttgtttttctttttctgattacttatggttataactctgtatacctgcagtctcaagatatcagcatgaggagactaagagggcaatcatacggctggagcagagtgctcattcttatatgcaacgagctattgcatctcatggagcacttgccattttatatgggcaacactcgaagcattatattaagaaacccgaggtaggccagttctatcactctggctgcacccttgtacttctcatttggaatatttgttgtctttcctatattatcaagagctataggggatctttttggcgaaatttttattagagtttaagatatatattcagaactcagtttggatcttatgtgtagtaattaatttgatctagactcaaaatttaggaagataggtttttatataagacactgaagaaatataagtttcagaatataaatttggcaggatctagaaagcttttactgtgaagtgttttaacttgaattactttcatgcgtagaggttccaatgtgttttggggaataatcttgaaaacattttggtacctggttaccactgcattcttttatattaatccctagtaaaaaaatctgcaggttttgttaggtagagcaacatttgaaagccctgttgacattgatttgggaagagaaggtaactccaacaagatatcccggaggcaggtaagaggttctttgatcacactggattagcccgtataaaaaagagctaattatatttggagggagaggctgtgtgtggttatgcagttgttattttctgtgtatcttgcttttgtgttatcttgataggcatcttcacagttccatttcacaagaataaaagaggagaaagtgtgtttgtgtgtgtttaggcagaaagggaggagaggcttttactttataaagaagtgagtttgatctttctttttcttcacattttctaggctattataaagatggacaagagtggatctttctatctgaaaaaccttagcagcaggttttcaatatctgtgaacagtaaagaagtaggccctaagcagagtctaaaccttaattccaattgcttgatcgaggtacgttccttcggttccttgtcaatctgccttggtaaatagtatcaagtgggaataaacattgtgaataaataa

SEQ ID NO: 2446 - DNA, 1199 bp, Cannabis sativa
gatcctggtaaaataatttctaacgatgagttagtcttagaagatacattcatgtaacatgatcaatatttcttaagtgctaccattaaaaaataattgaaaatgtttcaaaatagtaaaagaaaaatgacataattatttatgttgaatcaaaatacttgagaaagaatcaaatataagactgacatatataatagttttacaatctaatgcaaacgatagcatatctaaataaaataaggtattttagaaaaaaagcttttagtttcaaaaattaaaagtaacactaataccgattactctttactccctcaagacttacttctttcaactcggtgcattgaaagagagaacatgaaaacttattcttgacaattatgcatcagtatatagaggaagaaataattcttaatcttactcgtccccaatagccaattgaaatgcctttctagttgcaatagttctccacaatttgatcatatacatggggaaagaaaagtaagaaaattgcacatcttcttgtgaagttgtaatggaaaaatatgatgtttaccactttgtctgtagataatatttcttccatgatggcaatgtttaccaaatgaaaatgtaatcactgaagagaaaaaaaatagcaaatacctctaataattttgctagtgacaaaggcaaatggaatcgaaatcctttctgttttcaaggatcaaagtcgtagaggccaatggtggtgcgatgtgggattttgagtctgaaagggagcatgataggtgaaatattctgatttgggacattgagaggtattaatttgagcccaaaatcctttccctcattcatagaaacgttatttgcaaggttcagtgatgaagttccaagaacaggggccctgtttttcaacccttggttcacaccctgttgtattataaaaataaataagtgtcattatcaaagaaagtgataaggacaaataagtgatattgtcattcctattaaacaaaaagattggtgagcaagtccattcgaacattaaaagaagtttataatcgacaagaggctaattaaagcagaaaaatatgccaaccgttactctctcaaacaggggcaggaaactatagaaaatataaataaaataattaactacagtaagcattgaccaattacagatagcgatttcaaacatgctaacctcgtctaagtcttct

SEQ ID NO: 2447 - DNA, 1193 bp, Cannabis sativa
tatatataccaagtacacaagcagaggagatattcctaaggaactgtttgtttataccaagtacaggtgaaaatgagtcaataagagccatgaaatgaaagtcaagaaaaaatatataaaattaatttaaaacctttgaagctttgatttagagattgataaggattatataatgagttctgttttaaccaagctattaataattatggtaaaatcagtatagtagatcaaaagtgaagattgcacattaatttgaataattacttctaagctctaaatcacatagccccaataggacacaagtacacaagcaaatattccttaggatctgtttgttggacttctaagatgatggtattttacatgcccaaaaatcagtggctagaactttgaggtaggcgaaaagagcccccagagtagagcatttggtaaactggtcgaactcgaattgttaaaattatgcccaagattgtacctaatccacacacacctgcaagaatttggaatgtgaacctaaagcaatttggacctaagcaagtggatccacctccttgcttggcagcttcagcatcatatacagaaccagctagcatagctgagaaaagaactgcaccaattgggttgcctagcaacatgaagctgtagataacaccgaaatgtcttaacccgaaaagctcagaaacagttggaaccatcatagaataatgaattccatagcagacaccgagaagagctgttgcagcatagagagtaccattgagagctgatgcatacaagaggaacactactatcataagtacatgtgaaagtgtcatccatagtgtacgaggtattgttcttgatctgcatttaacaaagtcaaatttcaaattagtttcacataaacaatcccaagtcagggtagtcttaagagtgggatggctatgaccgtaagtaacccaaggccccttagtttgaatttcatttctcaaataaaaggtctcttttttgagtatgatttgatttgttttggatatgggatttggggttcaaacctgacaaagtattcagaaacagtaccagagccaaggcgcccggcgaaattgcagaagctgaagagagataacagtattgttgtgttgttatatcctaatgcaactccaatttgggtcaagttattaagaacagttactccagtaccaaccccaagaaaa

SEQ ID NO: 2448 - DNA, 998 bp, Cannabis sativa
cacggcttgatgtgatgtccttcatagatagtgccttttaagtatcgaaacaagcgcttacaagcctcccagtgaaccgtagttggggcatgaatgaactgactcaatttgttgacaatgaaggcaacatccggcctggtgagtgtgatctgaaaatggttcaccaatctgtagagacagtgtgtgagctgatgatgtaggacttagacttggtttggctccctctaaattgagtttgatgagaagatcagtgatgtacttggactgggataagtataggcctgtgtggttccggagtacctccactccaagaaaatagtgaagacttccaagatctttcaaggaaaactcagtatttaacgattgaattaaatcagtgatgagcttgttgttaggaccggtgacaagtatgtcatcaacgtatactaagagaatgatcaaagagctgccttggccatgaataaacagagacggatcagacctggaagacttgaaaccccttgaaaaaagtgtagcctttagtttgtcattccatgcccttggagcctgtttcaagccatagatggctttgtgtaatttgcgcacatgatgagggtatgcagagtcttcgaaacccggtggttgtgtcataaaaactgtctctacaagagtgtcatttaagaaggcatttgagacatctaactacttaatatccctgttgtaaaagactgctagagttaatataattcgaacagtagcagggcgaacaacaggactaaatgtctcttgaaagtcaatgccaggagtttggtgatatcctttagcaactaaccgtgatttgcatcgatcaagactgccatccgcattaagtattacccgatgaacccatttatttcccaccaaattcatggaagaatggtaagggacaagtgtccatgtgccattctttttgagaggcaaaacctcagcagacatagatgcattccaaattggatcagctagggcctgtttcaaagtct

SEQ ID NO: 2449 - DNA, 1233 bp, Cannabis sativa
aaaaaaaaaaaaaaaaatcatccagactccactggaagaaacatattcatctgtgctagtatgtaatatgcaccgcaatagatatcaaacattctctaaaagagaaaagtgaaataaggcaaggataaagtactcttattttcttgataaagaaacatcaggagatgcttgtattggccgctggtttgttaacaggttgaaattagaaagaagaacatgatcttgtatgatatatacctttgtagcctcagtggcatacccccattctggagatatttcgtgaattgtaaatttctgcttttgttcagtagtcagacttacacctgattcaagtggtccagtttggccttgatcaaacaacatagcataatattctgaattggtgtcaagaacttttgatgaagatggatatgaagaaattttaagatggtcaacttcttgacacatcactgaggaagctgataacacatggacattgtcaacttgttggagctttcaccaaattaaaattaaaagaatggtaaaaggggctatttgcatgtatcataccattatcaacaatgctactactggatttctgccattgaaggtattcctgctcttcagttggtccatttcttgtatattctacgtgctgccaaagtagaatgacgtcaacagttcaattgtttttattcagtgcattaagattaatgttattacaaatgggacaagcagttaagaaggcatataaaataactaagaaaatctgtcacaagggaatacaaaattacagcctgtaaaaattcatcagggactcacagttccattcaacaatgcatgattattctggcactcaacacctgaagaaatattgcacgagtcaagcatctctttccaggatacagactcctttcctccatacctatgttcatgctcaagaagttgacgatgatctccaccactgtcacctaagataatgaatccacattaacttggtccttactggttctttgatgaagaattttcttaacttcagatttttacaatcctaccaatctcattttcatgaagcatgtacagaattcaagtccaaaaaaaaaacatatagagaatttttttcttaattctggttcttgatgtttaatttagcataggttacttcagtgaaaataatcaaatcacattctgcttgctgcttttggtacaattgggtataaatttttggttatatgtgccaagaagtaaaaatca

SEQ ID NO: 2450 - DNA, 2097 bp, Cannabis sativa
atttcacatctttctgaaaatatggagattattaatcttgaatgttgtacaggattggttgaattgccttcacttctcgaaaaactttctaagcttacttacctaaacctaaacaattgctcaaatcttggaaaattgccaacatttccaaaaaacatcaaaaatctagaaatgagaagatgtgaaaatctaaacacactcccaaacaacattagtcatatgaaagaacttgagtgtgtgaacctttcgggttgtactaagttgagcagattcccaggaatctcaaaaccaatgaatcgtttgactgttcttatattagatggaacaccaattaaagaactaccttcctccatatgtaatctaattaaactacaaattttaagcttgaatatgtgccaattgcttcaagtactccctgaaaccatttcaagcttagattatcttgaaaagctcagcatttgtcattgttcaaaccttaaatcattaccaaagctttcctcatctgtgtcttgggttgatgctcggtgctgccaaaagttggaaaaagttgatatgaccacctcaaagttacttactcatgtagtgagtaataatgacactaatactaattacaaggaagggaaatttgcattttataattgtcccaacttggatcatgaatctcaccagaatttgatgtttgaagcacaacttagaattctcagcagtgcaaagaggacaaaagatattgtaagtaattctcatcactttctttctttctctaccccaaacttttgtcatacaagggcaatgcaacttggttatacatgctaaaacatagctcattttacaaaatatctgctttgctttaatggtgtattaaaagttatgccaaatgtatttatcatgtaaattttcaccaaaatcaaatgtatcacaaagttaattttgtgccaaatatgagatattgttttacatattgaagatggtttaagggagaatattgtagttagatatgttaccctgtctaaattctgaattatcttataaatatattaatgagtattattaataaataagtattattagaaaaatttaagtttttacacgtaatttttttatttaattaaaataatatatcttatttttacattatgagttaatatttataattatttttttagtaaccattaaaaggtattacttaacattgttctatatataaataaaaaatttatataatagactaaaaattaaaaaaaaaaaattacaagaacttttttatttacaaaaatatctattaagtaaaaacaataaactgttttttagttgttttattgatttctcattattttttcagtttttgttaaccaaatgtatttttgtaattttaaactttacaagcttatttttataaataaaagtttaagctgtaaaattataaataaaacattaaaaaatatatatatactatttttgaaaattttcctatataaatcacatgatgaatagtgttatatataatgtaaaggaaaattacttatatattatttttttaatttacggtttgggttgctctgataattgtgatttttacgtggattgttatgttaattttggtttctatttagattattttgttggttaaaatgtggatttctatataaatttccctaaaaatgcaaaaaaaaaatgaaaaaatgaaaaaaattatacgtggttggtgcagggacaaaatagctttccaattgaagaaatatgtttaccagggaataagattccagattggttcgagtataataatgaaggagatgaaattaatgttccccttccctggtcttggtgtaatcacaagttcttgggttttgctttctgcgtggtggttgaattctgggactcttattcttttgattcagatttcaaactcttgtgtaaatctgaatgcatattccctggtgcagaattttttgatagatggcgtcgtatttggacttggcaatgcaattacaccaatccagattatcatcatgacattaaaaacacacatcataatagagtgaagaaatctagtcacatttttttgttttatgattatggcaggcctaagtactttgattt

SEQ ID NO: 2451 - DNA, 2493 bp, Cannabis sativa
tgaggatattccatttccattcccattaacaattccagttgcaggtactccattgggataatagctataactaagataacatttctgaagataaacttgaccagaaatggaatcaccacactcactactaactttctcaatagctttcttaacacaatcaccacaaccatcaccatccaaatcaccttcacactgtcccaatacatacacagattgataactccctgtatagaacaaactattcccactcttaacaccttcttcaaccatctcaaaagcagtatctctcttctgctcaaacccattattattattattattgttaccacctttcccatgaatcgacccacaagtcttgtaaagcaattcagactcggaaacttgcttgaacccataaacttcgtaccggagataacacccgtggagctggactcgtgctgctacagctcgatcgcagagcttggttgccatatctgggatcttacccacgcaatcggagcattgggctgtggttaggtctcctctgcattggtaccaacctgtaatggagctttggccttcgccggaggtggttgtggaaaagggtttttgttgagattgagttaggagtgattggaagagggtttttagggtttgagagtaaatcccatttgggtcttggaatttttggtctgcacagcctttgtagaccattttggtgtagtcggcgccggttgtgacgccggagaaaattgtggagaggaacagagtgagtgaaaggatgaaaggttgggttttttgaatacccatttggggatttggaaggggaaaggtggaaaaatcacaccatggatgagtttggagaagctttttgagtgagtgatagagagagagagagagaggttttgccgttttgggtttgaaaaaagagaagaagaaagggaattggtattggtgtctttgttttacttttataatgaatgatttttaataaaaggattgtttagatggcttttctttttggaatggttttcctttttcctttttatatgactttaatttggtctggttttgtgtgcaagctataaggttaatatgaacactttgatgttgttttttttgggatttagtttcaaacatttattataacttaataacaaagtaataatgtcaataattgaacttagaaaacgtgttctttctctcttctaggaaacacactctctctctcctccttgtattttaagtaacttggagctagggtttctttagattggtcggtcgagggtgttattggcgcgatggtggtgctatggacgagaggcttcgtaagtgggctcttgggaaggatagtgtgttgactcaccctagatggaattcgccataatgattgtaatgacaactctattttttagatttcacgaaaattaatttcaacaattgattttagcaatgagtactactaacacgttggtggagctctggctgaaaggctctacaagcgaactcttgttaagaattgtatctttacttagtaaattgacattcaacgtagtgataatgattggcattgtgttttaaggtgaagattttgctcttctaacattagtaatggtcaacttttgctaattggtataattgtgagggatttgttggctttgatgttctattgcaggctccatcatacatggactgttattgtcttcttgggttttgttaatacatatgcatggggctctattggtgttggggtattggctactttgtgagggtgaagagagtgtcacccgacaatgaacgagaagactcaggggtcattgactgtgaatagggatggcactcaactattgtctgtgaattgggatgacactcagactcagtcgttaacaaggcactgggacaacactggagtcgtaaaaaacctaggattgggaggtgtttttaggtgaatattttcttcttctaacattagtaatggtagacttttgcttatgggtataattgtgtttgttggctttgatgttctatttggggctccatcatagatgggcttattgttgtcttcttcgcatttgttgatgcatttgcatggggttctttttatgttggggtcttcgctactttgtgaagttgaaggaaatgtcacctcgcagcgaacgaggagacccaagggtcattgattgtgagtagggatggcgctcaatcgttgaccgtgaattacaacacccgtgttagtttttatagtccaaatcagagtaaaaggcggaaacaactttatgaaaaaaatttagatgaaactaatctaaaccattatctccaaagtctcaacatagttacataaattaaatctatactacgagattagaagatttatctcttgatgcctaccacgagatcattgaatctttttgtatgttttttccgatcattcgatccaaaagtaatatgaacacattattgactttacacagtgtctttcagatcaatcttcaatacttgggataagaatgaact

SEQ ID NO: 2452 - DNA, 1633 bp, Cannabis sativa
aacattagagagtgaagactgaaaaacaagggagatatacctgatagggtatccttcaaatttccgtttggtacatactcatagaccaacatgtgttcatctttagctaaacaaaatcccaggagtcgtacaagatttttgtgatgaaccgtcgaaagaagttctatctcagttttaaactcgattccaccctgcagggaccctttcttagctcttttgatagctaccagttctccggttggaagagttccacgataaacctgcaaaaagattcaaacattttgttgctgtgccaaattattttgtaccataacaatatgagtaaagctaacctttccataacccccagatccaatttcattttctgctgagaatttgttggtgcatttcttaagctcgttaaaattaaaccacctcgcccctttcaactgaggaatacttccactgctagatgctgcttcccaaaaccctgcattcagatcacataatgtgttcaacatttcatataatacaaatacataattgaaaaagatctaaaattctttccatatgttttacttgtggcattcttagtaagagtgcctgttcctgttcctgctctcctcttacggaagaaacggtacgctcccagaaatagtaatagcacaaggacagaaacaccagctgctactccaatgtcaatagcaatcctcgaccattttgattctttaatcacttctgtaccaaagtccacattagagtaagatgatgaaagttgtaaacagagttaagaaaatatgtgaagctgcagttttgagttggcctttctgttaaaagatcacctgcactgcttccatatctttcactaataaaatagaatggtctgtaaggtccagggagcatgtaattgatagcatcgctgatactgaaaatgtcgatttgactgaaatgatcctggctttttgggaagaaagataggtttacttgaaagtaaccacaattgttgatagtggggttacttagagaaacactatctacaggaggtggtttggacataaaatatttcatcaaagatttctcaatgtccatatagcgtgatgtgtttcccaagtctaagaaggtaatagctgtgaaaatgagagttcctttgaatggaatagcacatcgacaattggggctggaaatctgattagaatcacaaggactgggggaacaattgttaatctctgtgacatatgagctatcaggttcagaagctgagctggtgctgcagtaacttgcagttgtaccggtgtcccgacaaattggattgtccttaagtctgcggggggaagttaaatattaaaagctaaaaaacattagtagacttcatgaagcagcgaaagaagaacggagaagtgcagtagtttacaagatctgaacatcatgttcttcatcaccctcattatcattaatgtcagtgatgttattccaacgtagatcgatgagcttaaggtccctgttgtaggagctgctaatatctaatgttccaccgagcttgttgttctttagtttcctgttatttatggacaaacataggcctaatgatcatctgtactatttggaagaagaatatatgtatacatgtacagatgagctcatcatgataagttgt

SEQ ID NO: 2453 - DNA, 3483 bp, Cannabis sativa
acaattaataacttaatttactaattaagagtaatactatagagatgagttataaattatatggtgatcaatataaagaatttataaatccttttagaccataattcacacatgtaattttatattttataatgttgacaaacattatttgtcccattaatttatttattacttatattatttaatcaaaatattatatcatataaaataatataatattcttccactagattaaataataaatcattagtaataaatatttttgtaacataacattttatttaatcaaccaaacattttatttaggtagtattgttattatacaccgaaaaaataagaaagaatgaaaagttattcaactgtaaagaaaataacgtgaaatgttggttttatattaatcatgatcaactcgcccataaaatttacaactatatatttaaaataaaagaaataaaagaaaatgaatttgtttactccataacagtataagagtatacaattggctaaaaaatcacaactaatatttgttaaataaacaaaaaaaactcctaaaatatagatactttgagtcgtttaacaatacttgtacaatttgaaaatatcataaagaattgttgattatctttcaacctcttcttttggccattcggtacaaagtattgtcagaatttgaaataagagagactaagatgaatgagcttacattatttaaaaaaaatactacaagaccaaatatcgaaaaatttgtaggtgtaaaagagaaacaacgggagttttttagtttggtttgtctctttagatcacaagtggctttgatacatgttagaatttggaataagagagcctaaaatgaatggggttctatctcaaaactaattggcaatgagaaaagtagcccattcattttatgtatgacaatttatttctacacattaacaatgagagaccaactctaataaacatctccattgagaagctacaatagtacatagagaagtttgagacaaaaaatctttagtaatgtactcaaaattatacaaatacaccccacaccttagcagtaagacatattctagtgatgttacacactactaatgccattttgcatttcccttttccccattttcatttctctgaatggagatatctcttttggtatataaatttagagatgacttaatcctgatgtaatgaaaatcaaatgtgtccaggtgggaaaagttgttgctggctccaattaggccaagaaagaaaatatttttagtgttcaatcataatccctcttaaaaattgcatatccaagaaagaatgtattaccaaggacatgaagaataaacagagttttctgccagtcaaaaaatatcaagaaacctaataaagatatctcaccaataacccctacaagaacactgaccatctttaaaatgatggaacctattcctatctctaacaataatctctctgttgaaaacttttgaaataatttttgtaacttcatgacaatcccaacaaaccctgaggttcttcacaatccttattggaacaccttctcttaaacttatcaaaccaaaagcaatggcaaccttctcactgtgtttacacaatgcatcctctttctcttcctcttctatatcaaagagcacgggattagtattcgccacatagccaaataatttcagccgcctagagatctctcctaacattatctcaatctcattatatctaggatgagatttgtccccaacaaagaattcatgaacctcaccatcaacctcaatgacactacaaccaggaatcttcttaacacctttagacttcataatttgccggacgttactaactccatcccacttctttgaatcggcgtatatatttgacaagagcacataagcaccatggttcttggactccaactctacaatttttctcgaggccaactcgcccaactccaaatttttgtacattctacaagcattaagcaaagcaccccaagcagcagcatgaggctgcataggcatgctattaatgacgtttagggcttcaactacccgcccagctcgaccatacaaatcaaccaagcagccataatgctcaatctcaggttcaattccgtaggatgttttcattgaagaaaaatgctctttaccttcgtcaactagtccaaccacactacaaccccttaaaactgccacaaatgttacttcatttggttgaaccccatcttttttcatgagggaaaaaagctcaagacacttctctccaaatccattcatggctagtcctcccatggcactactccatgtgaacacattcttttccttcattccccaaaagacttccatagccttatccatggccccgcattttgcatacatatcaatgagcgccgtccccaaattcactgtcaccctcaacttgtttttctctatatacgcatgagcccatctcccttgatccaatgcccctaagtgagaacacgcagataacacagacaccatagacacctcattcaccttaactccttccatttgcatcaagtaaaacaaactcaatgcctccctcgatttcccacgttgagcataccccgcaatcatagcattccaagcaatggaatctctccccggcatttcatcaaacaggtcccgggcaaacccaagatcaccacatttcgcacaagcactaaccatggccgtttgacacactacatctgggctagaaatccctccaaacaccttatgacacgaattcaagcaacccaattcagcatacatgaaaatcaacccactttgaatatgcgggtcattctcaaacccatatttcacaagagctccatgaaccgaggggccagtctcacgtgctaacagttgggcacacgttcgaatcaagaagttgaaggtgtagttatcaggggaaagattgttaagagagcggagaattctgttgtaaaagtgaaagcttttgtggggcgtggagcttttggagtaagctctgatcatggagttgaaagagaagagtgttggggtgtcataattggtgaggagttgatcagagtaagtaagatttttggggttgtgaagggcaatggtggccacgaattggcccaataaatggtggtcgttaaggagaccgttagcaaggagttgggcatggacttgcttgagctccttgagagtggtgagtgcgtctatcagagtaattgttgggtgtttcgcaatggatcctaaggagcccatcataaaacgtaatttgatttgaggaacaaggtttcggttcagaaactcataatccaggagcaaagtaagatgaaacctcaacaagagaaaaaaaaaaaattagcaaaatgacaattatgcatattcatatatacaaacactaaaaataaaagggtaattatgaatttttccccgaattttaacatgtaataaattatacctttgaacttttaaggtggttaaaattttttctattgagattgttagattt

SEQ ID NO: 2454 - DNA, 628 bp, Cannabis sativa
gtaaaataatttccaacatctgcctgatttggtggttgggagaggaactgtggtggttttattagtggccataggtgaagtagaagatgttgagggaggatcagatgagagagaaggttggtgttgcataggaatgtctgctggggtgattggttcatattgcagggggggggctgctgttgtggagtcatgttgcaggttggtatctgctggtattgtaaaaccagggaaaaaaacatcaatgtttgtaggtggggttttggtaagaaggggaaaaatgttctcataaaaaataacatcccgagagtgaaaaatgtgattgctttggatatctaataaggtatatgctttcatattttctggatatccaatgaataaataagcttttgctcttggagagagtttatggccattgttatggggggaagtataagctaaataaccatagttccttagatgagaataagatggagttttgccatttaatagttcatatgaagttttgtcctttaggagtacagatggtgttcggtttagtaaatagacagcagttcttatcataaaactccaataaaggagtggtaaatgtgattgaaatgcaagggcacgagcaacatttaaaatgtgc

SEQ ID NO: 2455 - DNA, 759 bp, Cannabis sativa
gaaattacacagagttcttcatttcctttactctgtttcgtaatatacaatgctctctatctctagatgttgtttcataaaaaaaaaaattaaaaaaaaggagaaaaaagaaaaattaaagaaaatgaaaaataaaagaagattagcataagactctcacaattgctatattaagataaggaaatgtgaaatcttggatcacaaggtttcatgctaaaacccaaatcattacgcatctccagcttttaaactcatactagttggcctgagttctaacagttttattattagaggggtaaatttggtagtaaaatattagggtagcatattttgtaaggtggtatattatgagaccatgcataatatttaagcatggtttagcaaattttccattagaaactagagcttgaccattacatgttgtttttcaagttggagatttctagtatttatgcatcaaaatgttgtttttacatttaatgttccaagttctagaaatggcgttgcatgtgagtattttattatgtaattttatgaatatatatatacaaacaatttatattaatgtacacataaatttaataaattatttagattttgatgtttttagttatcttaattatatttttcttttactatcattaaaaaaaaaaaattattttcactcataacaaaatttgtgactaattataaatcatcattcatatgttgtgactaaaaggtccttgtttaaaaatattagttacaaaaaatataatt

SEQ ID NO: 2456 - DNA, 1183 bp, Cannabis sativa
ttttttttttttttgaaatgggtgtctgtgagtttaatattgctgtcagttaatagtgaatacaaagtataaaaagaatattttgggaccacaacttaaaatattatatgttattttgtctttatgcggagccatcatcttctaggttcactttgaaggtgcatcataaaggaaaattaaagttagaaggtaaaagtataacttacatcgatagggttgttgactatgtgcatcattgtgatcttgatcatatgagtctatatgagctttatgattttgcaagagatttagggtaccctaatccatccaaattagcgtattattttaagtgggaaaaatagtaatttattggaatgtgtaacaaatgacacattatttttggaaaaatgttggtctaatgtgaagaagactcatttacttgaatgttatttttgtcaaaatgaaattggtgagaccttaaggcatggtttagatgttgaatttgggcttggattggatgagggaattgggactgctatagatagaaataggcctgctttgggtgttaattttgggattggtaacacacaaaggtcacaaccaacaaattgtggtgttggtttagttgagcaacaagaatcaaaaagtaagaaggttgttgttgattctgaaactacttccattcatggtagtttaaatgacgtccatgtgtcacaaaacaaggatcaaaatgatgatggtgatgactcaagtgattatgataattatgaggtggatcctgagtatgcacagagtgaagatgatttggaggttgatgagagagctaagagacatttgagagggttaaggaggacatatgtggaccttgacatagatagtgaagcaacttttagtgataacagtgagtatatgccaaagaatagctcctctgacagtgaggtaggtgaagaaaaggatgcgagaagttcaaatttacacaagccaaataaaaaatacaagaaagtgaagttacctgagttgcctgagtttagagcatctactgacatggaaaaaccaatgtttgagaagagtttaactttttcatcgtctgctgaatttaaacaagcaataagagaatatgcaataaagaatggaaaagacatttggtttaaaaagaatgatcctcatagagttagggctctgataggttctccctgtcaaacca

SEQ ID NO: 2457 - DNA, 1648 bp, Cannabis sativa
caaagctcaaaacctctgttttctccgtttcttatttttatttatttttttcaatttgaattttgattctgattctcattttttttttctgtttgtctttcttgttcaaaaaaatttcagtttgctcatagagattgtatacagagatggtgtaacgagaaagggaatacaacctgtgaaatatgtcttcatgtaagaattcaaacgatttgggtttctctgttttggtttggggttctccttgttctgtatttcatctcagaaaactgaactgggtctctcttcttttctggttttgagttgatcaaaccaagttttcatcgttttaactttgttccctattttgtgactaaaaatttgtctttttcttccaacttttctttttatgtttacaagaactactctgttttcagttattgagttcttttctcaaaattcataaataaatgtatattttttcactcttgtattttaatataaagtaaaatataaattttattaaattatatgccctccttgggacaccgattttttccattacttgtattacttacacattctttttgaaatattcaaaatttcaaatatgtgaaaatttctaataaaaacaaatatgggtttttattgtatatgcagaattatgaaccagggtacacagcacctccaaaaatttctcctctaattgaagcagcagtaaccattaggtacacaaatttccattattaaaaaaagtttggtcattttctttctgcactttatcaaacaaaagggtagctttaaatttaaacattaagctaaaagaagctgttttttttctcttcataattttgtttcgggtatgtttttctttttgagtttaaatattcaagcaaaagggtttctttaaaagctaatattcatttgaattagattggtttcttattaactatgaataatatttgatactatgacagagatagtttacaaattccaagaagagaagaagaaaggggaagaagaggtggcagcagcgtgggagtgagggcggaaaacgaccactctcaatgcacgtccgccgcggatagaagcgcgtcttgctgtcgtaggctggctctacttgtaagttagtttacttaaacaactttcattcatgacaaactgtcatctcatctaatttggttttggtcaagtttttttttcaacaaaagaaaactaaacttattattagtattaattagatcgatagattagtagcagtatactaagatagttggttgttgccaagttgggcacaactcaatgaaaatgtatgaaatggggtaccttaaacttctaaacagttgaccattttatttcgttagtcttatatatgaccaactccaactccaactcctcatccatatccacatgggtatgggtttcttttaaatctccattgactctttcttcaatataataatttacaaagggttaatcttcttgattgtatttaagaaaaactcaatgcaattttttcttgctgctatgctaagtttttttttcgtttcttcatttatgggttatttttttaattaataattttgtttgtttgaatttcacagtttactatgattttgcttgtgagacatctctttgctattcttaatggtggactagaagaatacccttt

SEQ ID NO: 2458 - DNA, 2153 bp, Cannabis sativa
tatctactcagatttcagaggctcgttccagacttttggagatagaaagcaccaacttagttgatgaagcacaacattctgaagccagagcggctctaaatgaagctttagcaagagaagaaatgttttggcgacaaaaatcgagagtctcgtggttgaaggagggagaccgtgccactaaattcttcatggctagtacggtaactcgagaaggcgcaactatatccaatcattgaaaaatgaacggggggattacttcaaagatcccaaggagatagcctcagtttttatcaacaagttcagtaagattttcatgaagtctcagcgtcgctcaagtctggttaaattcgagtggctctttgctggtttgaacattcaattggaggaggatctttatctcactcctaatgaggaagaagtcttcaatgctctcatggctatgggacccgatcgagcccccaggcctgattgcggccttcttcagatctcattgggatacaatcaaaggtgacctaatggccatgatgaattttttctttaccacggggaatctccctgattttattaatgacaccaatctcgtgctcattcccaagaaggataacccgattacggttaacaacttttgtcccattgcgctatgtaatgtggtgtataaatgtatctccaagatcctggctttgcggcttcggtcgatcttgccctagctaatctctcctgctcaaaccgcttttatcaaagggcgttccatctcggagaacattgcgatggctcaagaaattgtccactccatgtccaagaagaagggatcgaaaggttttatgatgatcaaattggacatggaaaaggcattcgacaaaatggattgggactttattctggaaactctgcattttcacggtattagaactcctctgctccaatggataagaagctgtattcaaaccaaaagactgaacctgatgattaacggggttaaccaagggcgtattactccctcttgtggcttaagacagggagacccgttgtctcctgccttgttcattctcgcatccgacatcctatctcggttaattacagagtttaatctattggggaagataaagggattcaaaacgtcaagagttgccactccaatcacgcacctcatgtttgctgatgacgtaatgctctttggccatgcatcgttaaaggaagcgagtgccttcctgcaatgtatagagacttactgctcatggtctggccaatccgttaatttctaaaaatctactatccatttttcgaaaggtgttccaagaagccgtgcaaatgctattgcagaaaaattgggtatgcagaagatgaaggaggatgcccaataccttggactgccgcttctgaggtctcgaaaatgatctcgggacttacaattccttgtttccaaggtcagtcatcgtatggaaggttggaaggctcggctgttgtcaaaggcagggagagcgtgtttgatccaatccgttggaaactcgcttgttgtttacgccgcatcagcagaagtgatccctacaagcattgctaactccatcgaccgaaatttgagatgcttctggtggggagattctgagacaaagaaatcaatacacaccattgactggggaaatctttgtaagtcaaaactccatgggggacttggctttaggcaaacaaaggatatcaataaggctttcattctgaagtggggttggaaaatggtggctgagccatcaagtttatggtgtcaaaccatataagacaagtatctaaaaggctctagtttttgggatgcgcaaatcaaaggttcagactcaagattgtggaaagcgatccttaattccagacctctcttgagcgaggggttgtgtcgtagaattggggatggaagatcaacatccatttggtttgacccttgggtctccttcggtaatagttagccagacccgcttctggatgcaactcaaggggctaatctagtgaacttctttgttaatgatgaccagacctggaatgtctgtagggtcacacaatggtttgcaagcgaggatgctagaaacattttaaacattggccttccggcctccaaacaagacgactcatggagatggttaggagagaatactggactcttttccattaaa

SEQ ID NO: 2459 - DNA, 1214 bp, Cannabis sativa
attatatatctatgaataaagatgattatgttgtcttgtgattaatgatattaatcacaatcatcatgattagctttttgattttatgtattctttaactaacaaatttgtctattatcctcttctgaataattattaatacttcctcacttcctcagcattattttgattgttattttaataaattttttaatggaatgattggaatttttctcactgtgtttttatgtttaaactgtgattgcaaataaaatattggaactacttttgtaatcaatacagtatttcagtggatttttctttttaatgaaaccatgttttatttgtttattaggattctgtttttgaagcaatttttttcttaaaccatttcttgcaaattaatggagcacatatttagccatgaacagtaacctgaaagaataataataagaaaatctcattgagaatttatataataatgagaacaaacaaataaaacaagactctataccactacaaaattcgaggacgagaagctaataaacaaacaaaaataagccaaagttttcgtttcttctaattgtaaaataaaccaccatttatataactttgactttatttttgttacaaaactatcccttatggtaaaaaagaatgataatggtaaatcttcaatgatatttattagtgtatacattaaaaaatatatatttacaattgttgataacaaatattcatttacatgttaattaagttattatactatcttaattataattcataggaaacttttacatttcaaaatgctttcaaactattggttttgagtgaagaaaaaaaggacagcatttgactgttggtagtactggtagttcaactttagacttagtagcagtaatgtaccttttacatttcctagcaaaaagcaagtaaattcttatttatcaaaagatgtaatgtaaatctgtcatttgattttgaaggcacttcttcatatgatagatctgaggactaggaagtgaaatctcttagtagtagtactagttgtgcttatgatggagaaagagattaaatttaaggctatggtttaaagcagttcaaatgatgttttttaagaaagaaaagggtgcaatattgtattagatggcccaatgagaataagaaacaccaaaatatagagctagggaaaactgtagtatatataaataataaacccatattaatattgagtg

SEQ ID NO: 2460 - DNA, 1518 bp, Cannabis sativa
taagtttgttaactgaataagccagatcaggtctggttatggtttattgtagcttgccaataatttttctgtacaactttggatctgctagactctcctctccatcatgacttagtttcaagtttacttcaattagagtatttgcaggcttgcatcccaattgtccgagatcatctaacaattggagtgcatagtgtatctgtgagatgattccttgacttgacctagcaattttaagaccaagaaaatatttcagctcaccaaggtttttcaacttgaatctgttattcaatgtaacttttagattttccaaagctgagatgtcagctaagatgacatcatccacatagaaaagaaggattagaatacttgatccactctgtttaataaagagagagtgatccatacgcaactctataaatttcaatgtggatctcacgaatttatgaagctcgtcgtcagtcattttacggaactctcaatgagagaaccaattattagataatagttctcttcgaaacaagataaatctcctaaaatgcactcttcaagtcagtgccaaactctaattgaactaaagttctatttactcattccatatccaacaatagctatacaattacatatttatagtctttcacactctttacaaattactaataaaccctgcactatttcatagtgtgacaattcaaggtcgcaatactgcgttttactcgtcaattagctctataatggaaacattcttggataaattcaactatttttcatttggttaaagacgcaaacagtactatttgctaaataacttggtacccaattgcagaacctagctcaatcgaggtcatcaataaagttttaattcctcacttatgtttgacgcttactccaattctgaaacatagataaattctaatccagaacattgagatcaaattaagaaatgaaaaatcccagcaaattttctatttagccaaacaaaggataaccatgaccacaataataaaacaaatttttttattaagaaaaaaaaaggacagaagagaaagaggtagaactaactgaagagaagaagagcgccgaaggccccacccaaggaagagtagacgaaacggcgaacagtgagatccaaacaggcatcccatttagcgttgacgtcgtattggggtggaatgatggttttgttgtccgacattgccaagaccagaaagctatggaagtttttcttttgtttaattaattgttatttttggtgtaataaatttcgagttgttgtaggtaggtaagtggaagactaatacaaatatgcttttccccgaaagcttttgaattgtctaatgttatgttattgtgttttcctctggaacttacgttgcagagactagtttggggaagaaagctgcggactcgatctaactggactctagggctttctctttcttggactcaaatattgggcttactctatcttcttggactcaatttaatctaaatttggactttttgaatcataaaaag

SEQ ID NO: 2461 - DNA, 3431 bp, Cannabis sativa
aaaaaaaaaaaaaaaaaaggctgcttatagtgatttcatttgttgccttgccattgccatccaaatatttgcccatactattcttgtgtctctgtcttccgctttacacaccgttatccaatgaagtatcgtcaaggctcaactttgacttcagccaagcacagaccgcatccatctcttctggaatagtatagtggccaagtctacatgctcaaagaaagagttccattacacacaatccgaaagagcttaataatagtaataaaattatatatacatatatatatatatatttcttaaatgagaaggcttcacattcttctcctagctaatcaaagtacatgtaatatgttgtctgagatagaagtataacatacgctgaatacgatttgaatgtgacgtcctgaaatccagtcgaactcaagacctgtgaagatttctccccaaatttgtagatgaccacatcatcaactgcaaaaatatgccagggctgaagcttaagggatacaaattcatattatatacgttttatatgggatggcgatggcccactacaatgacatcatggcaaattaaattatacttttcatttctattatatttttggtctagtcaccataaggttgtttaaagttcctgctacaaatcaatgacatcatcatggtactgattgtagacattttccacaaatcagcataaacaaatgactgtccttcctatcttactgcacctccaatgaattttattctacaatcttcagttaaaatatatatgtatatatatttatatatgtttatacatctgcaaaattaaatcagcttccgtcaaggtaaaggtacatatcataaatcatgcatatgagtatgaaaagcactaagaattagtatatgagatagcatgtgtcatgccatatataattaacttagtggaagcaccattcatcagaggtggatgcagtaaaatgatatctcctaaaaatatattaactatcaagcacttagattaaaccttgttggctgactatattatcacatagcttccaagttttgtcgaaaagaaataaccattttactaaagttaaaatcagtcatctcaatttacttcatctctaagcaaatagattatagaactgcaaaaaattaagcataacaaggttgtaatatgttcaggccaagcatagattgtatcgctctattgaatgaagaattcaaacaaacattaattataatagcatataagaaatgcgtgtatacctttcccatggcacaacaaaatgggcaaggatgaagcacgccttgtggcttccgccaccccttctatcttgttacgtaagatcctgatttaaaaaaaaaaaactcataactactgagcagatccatgcaaaatgaataaaaccgggcaactataaaagtaggcataagaaatcatacttggcgcatggaagccatccacttaatccaacaactgcacttatattaactgggaaaggattatcatttccatactttcctgagataaagcaggttgcagagtatagggcagcagcagcacccatactgaaaccccctactccaattttaactgtagaataaagaacatctgttaagcctatatctatatcatgaagacaataaaataattggaaaaaaaataaaaattagaagggtattagtataggaaacataacttctctctacacacacacgggcactcaccctttcatccacacacacacatatgtgtgtatgtttatattagcggaaaattgcaataatcatatcacattagcattcatcaactgaaagtgaaaatgcaacgctatgaaaaaacagctctgttacatcaaacatggtttaaatacaccaattaattgattttttttcttttttatgtaaatttttaatattacactatgctacaatgacatgcaaaacctatccgcatttcagccaattgcacaagcttatgtgttgacctccttgaacacagcttgtggttgcaaaatatattacatatgtaatgtgatgtacaccaattatttgatttttttttctttattatgtaaatttgtaatgttacactatgctacaatgacatgcagaacctatccgcattcagaattttagccaattgcacaagctattatgtgttgaccaccttgaacacagcttgtgtttgcaaaatatattatatatttaatgtgatgcgaaacaaatgctagaagaaactcactgtcagcgggctcatttgctagcaaatttgcaacatgtgatgcagcagaatccaaaccctctaaatcatcagaagcatcttctgaaaggtcttccacatcaaaccctgttaaagggacagcatccaaaaaaagatgaataaaggtccaaacagcatccaaaaaggtgaataaaggtccaacagccaataaacctactccagtgacaagatttgtccatacgcccgagattattattactacagttacttctttgactgccaactaaacgtgacatctttttttctttccttgaagcaactaaaagtgacatcttaacttaaagtttcttcttttaatatgccattgtgttgccataggggaatttttgtaaagagggttataatcaggcctctctgtcaaaatagacttacaagcagtggaaggaaaaccaccgaacacagagattggctgagtaggagcagttgggcatatccatttaatctgcaccatgttatttgtgacatatttttagcattaatcaatttctatatccttagaattaaaacaaaaaagaggcgcatataagtgcaacagctacttcagatctacttaatccttacatttgaaagaggaagggtctccaaaagctgggaccaactgccaggaagaaaaatcaaaggtttaataaaaatttgtagcttcgttctttatggtccgcaaaaaaaagtcagcatatagtgcacattcattagaaatgtatgatgggaaagaaggggatggagggatttagagattacaaacgaaacaaggtttaggctcctttcgtttcttcaatatctttactgtcttcgccaatgttgcgcaaccaataaggaaaaagaaaaaaacatttggttgatgagttagagtaatacctagagccattatcaccaaggccatgtagccaaactacagttgcctgatgtctacctttgggtctgactacataggtccgtccaaattcaaatgctcttctaacagttctagcacctggaaacagaatccaaacaaattgaatggcaaatgacacaagaaaagaacaggtacaaattgaaaacccagacactgggaaggaaggaaaaataaaagaagcagagattaatttttattggaaaaaagaatccatgaacacaaaactataccataaaagttagagcgaaaaatcaaaaaaaaaaaaaaa

SEQ ID NO: 2462 - DNA, 2000 bp, Cannabis sativa
cataagataattaataagattgacgaagactaatgactgtgatcccttgggtaattggcgggtatcgtggtttatttatagacaagagaagggattatttctatgaaattaaataaaataataattaaccaagttttttttgtctgaaacttcagacgatagatctggacatgcttctaagaaaggaagagcttcgtgtaacctctcgtaatggtttgtcagtgaatcggatcaaattataggcaaacccaccaagtatggttccaatagtggggcctactatataaatccataatccagtgtatgttttcattataatagctggtccaatactccttgctgggttcatcgatgctccggttacaggcctgcatttccatattaatttttttaacaattttctttgtatatatatttctaaaacagaagtacataatacattgagaatgagaatcaattcgggtttcatacccggcaacaaagacgtttaaaagtattgtcattcccacagcgattcctgctaattctccaatctaaaaaaaaggtaaaactgttaataaagaaaaaatttcatcatcatttatacaaggtgacaatttattatttaaaaagattttttaattttagctgaatacttttttaagaagaatttggccgtaatgtagtatttggagaatatattggaataatcatttgaaaattttgaatttttattttttttagcttaaccaataagtattatgcaatgttttcactgattttgaaatcttataatatccaatcaggcccaagattttgttacacattttacttttctttctccttttttgaatggatatgatttaattatttgtaataatataagcttgagatatattaatgtaaattaaagtagtgttaaatgaaaacaattaaggtgtgtataatgtaaagggaaatgataagtaattacgtacagctctattatcagtggcaacgccagatataacgaacatcagaaggaatgagataataatctcaaaaacaagagcttggacattcgatccaactggtagtgttccaaagtaagcatcctcagttacgtcgaatagaaggtacaacgttccactcgctaggattgatgctattacctgtgccattatgtacagaggaacctgcaatccacataatttaatgtgcatatacaaccaattaattaataccattaatataaacaacctaaaattaaatctttaaattattgaaaacaacactatgaagtaatttgcctcagtgatagggaaacggcgaaaaattgcgaatgtgattgtaactgaaggattgaagtgagcgccagagatgtggccgacggaataaatcatgaccatcacaatcaaaccccaaaccacacaaatccctgggaatgttacagacccatgaatcttgtttaccactactgctccacaccccaaaaatacaacgaagtacgttcctatcacctctgcaatgatctgattatcacaacaaatacattttatatatcagtatacattgaatatatgtataaacatttataatatggaatatagaaatataaattactacacatataacattcttatacgtaccttttgcagttgtttaactacctcgttagaagagcatagatccccagcatttctttcgctttgaatatcagtatcaatatcactaacttcttcaatctttgatagatttcttgatgaagacattattgtctacaaaattattaataacacaaaaattaattcttgatacaaactcaggtagaaaatgtcaaaaaggctactaagcaggttaaccaaataaatgcttaaatatattgtagctatgttctctcgcttcgaataaattattagtggttaagctattttacaggataatagattgaataaataccaactatataggtttattttacatttgttttaatatattcctttattaaattttaaaatatctctaacttctaaaccgttaat

SEQ ID NO: 2463 - DNA, 536 bp, Cannabis sativa
agccattttttggccctataattaccaagtggggcggttcgaatcaacactaatctctatgttaagttgagtaacactaaattatggaatttatatttatttgtgcattgctgtgatcttggatcacttcgatcacaacaaggtaactgatcaatattctaaaagaatgacattaaaccaaatgatcatcaaaatgaattaacaatgagagcataataagaacttgaaaatgaattactctgaattgatcacacacacatctttgagagaattagtttcactttatcaaccaaaaagaactaagctacaagagtaatctgtatattatataaaggtagcaaagacttcatatattacacaaaatatcacatgagtaatatgtacatagtatataaattactgttagatttggctcaaaaatcaacttattttgaagttgctcgaagatttagtttaactttcaagaattttaggatttgctatttgacggtactaataattttgatatgtatgaagtgttagatctattgtttcga

SEQ ID NO: 2464 - DNA, 3511 bp, Cannabis sativa
tgttaaaccataaattgtgtcttttgttgtgttatgttcctttagatccctacaatgtatctgtatctgagagatttaagacattgtcattgttgttctgttttttgcagcttctattgcttgtgctgttgctggttgctgcaggactgctttggtggacctcgtggcgcgtatggtcctcctggtcctggcggaccgcctcctttctaagtcgtttttcttttactgcaccgagaccaaaacttgctgttgctttatctcaatctttttggacacaaattgtattgatcgtgttttgttgtattttttttacaagtgttggaggtgtttgttactgtactagtttatgataatgaagatcatttaaacaattatattttccataataactctccaacaaattaatgccaaagttgcgtttttccttggctaagtttattctctatcttatatatgtgacaagttaaccttttggaggtttttttttgctaatgttggtgagtgtatgggaactcacctcatagaaatcaaatcaagaaaaccattacaagactgttcgagattccacttggccaaaacatgagccgagtgattacaagctctacgcatccaaataacagaaacttggaactcagcacgtaaattcaaaacatgacaaagaaaaagagagatcccaacaaggaggttggagcttctaaatagccaaaacaagagtttgatagtacgaaaccaaatcaacatcctgcagacccaaacctttgaatcactcccagaccctttttgagtttggtgcaccaatttgcaaccttcatttggacattttgtgaactattgttctcttgtgattatatattattcgataattttcaaatattttgtagcagatattattgttacttagttatacaacatagtaaacgataattcgaactttattttcatagaattttccacatataatcttaaataactttaaattataaaaaataaaaacaaaactaaaaaacttatcaaatgcctaatcacaaggagtatgccagttttgtaactaatttaccgtatattacatatgcttttttcagtccaccatgctgaacaaccaaatgcattaattccaagctgaaaacagttgagtttgatcgccaaacagcaaaacacaatgatgctttttctttttgtttgtttcttttgttgaaatcgtctacatagctttaaaggatattcaaggaagatggaatttttttagtgttttttcaaactccagacttagttaagacaaaaaaaaaaaaaagaagggggggaggcacactttcatataaatacaaactacaggtaagtattgctaggtcaaagatgcctctgctattcattcacatgcaatcttagtgtcaaagctgctgaggcatatggcaaacgcctgaaaagctgagatgggatactgataatccatggtaaaaacatcctttccaacttttccgaactggagaatgacattctcatgctcctgcccggctgctccattctctgcaaaagccacaagctgaaaattcttcaccgaggcgactgtcacccttccattgaaattcagacaccagcattgcagttgttcatgccacctaggagctttgttcctcagcacaagcaatccttcactttggccagatggaggttctggttggaaactctcaatgcgggttgattttgatctgaagaaagggagggagggaaacatatccacactgctatgcacaaattcagtcggtgttggggccgcacctcctggctcaatagagcgagcaggaatggcatccattacacactgcatcctcctcggtcccctggcattgcaaaatgagtgaagtgttatatgtatgtgtgaattattcttgtttcttgccaaaggcacctaataaggaagtttcataaaaaaaattcgtacctagagcccaacacattcaactcataagaaatatgtgccacgggatagttgccagcaggaactcttggggaaacttgcttcatatttacaagcctggtagagcgagatttagtaactttggctccagaacttggcggttgggcatcatagattgtaaatttggtccctagaaagtttgatctgcaatggcagaaaaatgaaatgagttctggcctagagtgataaaaaaactgaggttgtaatgcattaactatggcgtaaatataccttaacttcccaacataagtactacttcctttagatacgtcttcagaatttagagagatgatgtaatccgtgcaagtaggacgtctacatttgcgcgctgcaagaagaaatttgccgtcgtctgtggaagctgaaatttttcaggtgaaaccataacagttcagataggaacatatagtaaaggaaaccaaaaaaaaatgatgttcttcaagttcaataaacccccacatcaagaaaccacagtaaaccaaaatgtgttagaccgatacatacataatgagagttagttaccttgatttaagccgaggtaaagatagtaagtttggttgctccgattgcgctttataaagcattgaaggacaaaatcccttggaccaggctgccataggaaaccaatacatttgaattagccacacagagagaaatgtcaacaaattggagaattgcaagtctgaaacttcaaagtgaacaagtttacaaacatggaactcaaacaaaacatctaattttatcactacaaaaaccaggaccagcacattttattattgcaaatggtccttaaaactattcaaattttcacaaagaagaagccagattagctaacagcatttcccgaaaccttaattttagatattgccaggactgcctgggttttctctttaaataaatccccccaaaaaacacacatataaactgtcttagatcttccgcgaggatagaaagtaagctatgattgtatgcaaataacagttacgaaattatcaatataaaattttgaaggaaatgtagagccatcataaactacagacctgcttcaaggagatgggaaatgtcaacttgccagaaaattctggtgatttcacaatttctttgactatttccctccaattccggcaaacaccagcacaagaaaccacatgtttgcgaggaggccatgtgtcttcagatgcttcaatcctcatcagcacatccctcaaaagctcaggcggcatattagcccagcaactctgcttcatagcatcaaccttgaccaagttatcttgaactaccctttgtgatcttgacctcccaaacttaacatcaaaccctctccttgagatactcccaagctcacctttcataccttgaagcacacttttgaaagacattggtgtttccttcccttcactcctcaactttttttcaaaatacaacaacgaatccgtccaaaaccaaccaatctccccaaaatcactcacattaatcacacacacattaaaaatccaatcttacttctgcccatatacatatatgagctaactaacc

SEQ ID NO: 2465 - DNA, 1956 bp, Cannabis sativa
ctatgattttcgtccgatttgaaaggtttgattataatggaagctgagttgagtatgtacgattactttagttaattggtttgttcagaatagaaatgtttttggttatgcttaaaaattttaagcatggttgttgcatgtcaacattctttgtttgggtttcagtccctttttttgctatcatgtaatatattgaaattgattttgtgcatttaacaattttcatgtcattttgtgcacccctttcctataatgtttaattattatttatatgttttgttgattaggaaatatgaagtttaattttatgtctatgtttcagatacaatggcggttcccctactcaccaagaagattgtgaagaagcgcgtcaagcagttcaagaaaccccaatgggacaggaagatatccgtcaaggtttgtagttcaccaattattcctcatttgtaggttttattatgacttaatcagtatgcaagtatttgtaggtacaagtgtttatcttctcatctattttgtaaagacaatgttgatagctttgtttattttaacattttcctgttctggttttcccttttgattttagttaatgtgtgttcgttcattgtgatatgttttcccgagtttttgatgtgtatttacttatgtgtatgtggtgttaatgttgcacagaccaactggagaaggccaaagggtattgattcacgtgtgaggaggaagttcaagggtgttactttgatgccaaacattggttacggcacagacaagaagacccgacactaccttcccaatggattcaagaaattcgttgtgcacaacaccaaggagcttgaacttctgatgatgcacaacaggtacacatttgcctttcactttcactgatattgttgtgtggttgatctctatgaaaagttttactaaccctttatcatttacattctttcaggacatactgtgctgagattgctcacaatatctcaacccgtaagcgtaaggagattgtggagcgagctgcccagttggacattgttgttaccaacaagttggctaggttgcgcagccaggaggatgaatgagcatttattatgcttttatttttgtttatttactttgtgagatttactcttaggcacttttggttgaaaggtactttgtttttaattttgcagtttcttttggatgattaaatgttctctagaatctcagactcttgtattgcttgctcaaataccttaaaagtaatattttcttttttgccattttcaatatgatttttgaagcaaggattgttttgatgatattaaacgcccaatatgatagagggttctgaaattttaaaatacttttcagctaaaattcaccaagtaaaattcttacatcaaacacccgacccaagagtctttttaaccataaattaccttatttcaagtctgttatcttagtacactgtaattttcgtttagtgttgtttgttttgtgtcgtgttcacagatttgagatgtttttttgtagcaaataactatacgtttaaagcacattgcatcatcaactcatataaactaaagaaaatcaacactaataattcatctctagtaatgatattaatcattatatatatattctatgttgtgtctggtgtgattgtcttaatttccaagttctaacttgttatttccaagttcaagacttaatatatcatcttatttgcaaataatgactcgtattgctaacaggaaatagatgtgtttagagaatttctattatatataaaaacaaaaaaaatctacaaagtatacacgtacaatcaatcgtctaagaagttgaacatagttgcaaaaacgttacagaactcataaatctcttaacaggctattattgactaaataaaatggtaacaatgagaataaccaaatttctttgggcaatatttagatagtttcctttcaaaaagataaa

SEQ ID NO: 2466 - DNA, 936 bp, Cannabis sativa
agaaccaggcagactttaaatgaaaagatcagtcagctcaactcggccattgacaatgtgtcttcccgtctcagaggtggaaacaactctccccaagtgcctgttgaaaccgatcccgaagttgaggctaccatatgagataggtttcggtctgctttgggggtcaagtaactatggttggacagcagaatctgaacggttgaagatcacatgtatcgatgtgtggttaagtggtccggccttaattttgcttggtggttgttttttcaattgcagaaatgaacttggtctcattgtcaagtatagttgaacctaaccatgatgacattgtttttgacttttgggtttcaatttcatatagattatagttctcatagtgatgcatttggtgatatgggtttattttagtgttcattcttactttctctcccaagtcaatacataaaaatccacaaatcaacaagaaatattgactagaccaaattaaaaaaaaaagtctctttatttgttcttaggttttttgtccaagacaaactagatcttcaataggaccttgacacagtcttcatgcttcaacaactgaaatgctttggtaatatcagccattggaacttcatgagttaaaagctcatctagctggaattcctgcaaaaaagaatgaagccaaaaaaattatgtgatcttttttgatgaatgcttatgcattgtatgacatggaaaatttatataggctttcttgtttaccttatttctccatttctcaaatacaataggaaggtctgttttggctttgagccctccgaaaatggaacctttcaaggttcttccggttagtagagcgaaattgttgatttgcagggttggtgcatttgatacaccgattacaatggctttgccttttccaatttttgtggcttcaagtgcctcattaatcaa

SEQ ID NO: 2467 - DNA, 2407 bp, Cannabis sativa
tcatatccatcttaatcatgcaaggactataatttttcctcctatagtgtgtcaaaagatcctgaaaaattagaatgtaattgccaatatacctcccataaacaaatccaccttgattagctgcaatgagacttggtaacacctacctcagccaagaacaaaaaaaaattcatgattattttattgaactcattgtaatacagtggacctaatatcacaaataatgtttgggcattttacctttggaataagggtaagagtagtagtagtatttatctccttaagaatcttctttgaattaaatgctgaaagcatagttggagtaaaattatttcctgtagagttccatgtcttcctgaaaaaaccacaactaaacccatctaggcttgaaaaattattatctggaatggagaataaaatatttttaacatcctgctcagtatagggaagcatcagcatcataacttgtcctcattcatcacttgctcctcctaattttttttgcaactccctgctttttcgatgctcacaacattttcactgctttctaaatatttatattatattttttaatttgtaattatatataaatctattttcttccatgaatatatatatataaatatattgatttatcatatatgaaatgtatttttgtatgtacatgtgtactagttagtaatatacaaatatatataaacataggttattggattaagtgtgacgggtgcgcttagtgtgatcttaccacatgagcaccgacacgaggcatgtcgctacctctacaaccatcaggtaataataaatacacatggttcgtttattactcatataagcctcaacaattatattaaattagtaaattattatattgagacatataaacacataatatattatgaaatttataaaaaaaaaaaatgtatagccggtattataatatttataaactatgtttgaattgtggtaaaattagaattggagtgggactcgggcccggcctaggtttggagcccgaggtcagggtcagggctggagctgagactggagtctaggacttggggttaaggtcgatgttggggctggctctaggtccatggcctgaggttaaggtcgagggtggggttcgaagatagccatggagctagggttttaggcgggagtccaaggcctgagatcgaggtcaagattgggggccagggtccatgttcgggttggattgggggccaagaccgaggtccaaggtccggtcaggtccaagggataatatgtttaggataagtattaagagtaaaaatcaaggggttaggtcggggttagtattactttcacatgtaatataattaaaaatatatattttattattttttaagaaaaaaaaaagataatacaatacaatactattgtgcacgaaatatagtataacacatactctattactataaatcaataccataatactatgtcatataatattattcaatacattccaatacatcaccaaataacattattaatatatacatatataaaataatttaagtacagaacgaagatggaggatgggggctacacatagaaggaaaaagcaccatgttctgcactggcctatgctacgtagcactgcggttgctgggagaacatatggacctccaccccatccataaagccagatcatggatcctcactcatggtggccttacctacattccttcttgggggaaaatgtggctctcggtaggtacaatatattaattattaaatttctatgatcgatgagtgcatagactacaaaataaagctgaatgaagaagattgaataatgtaatatagatatgattgatgattaggtacttggggtatatgaatggagtggaaacaatccattacctccagagctatggcttcttccatacactttaaatcccctccatccaggacgaatgtggtgtcactgtagaatggtgtatctggccatgtcatatttatatgcaaccaggtttgtgggtgctatcaattccttggttttgtctcttaggaaggagctttatactcttccttatcatctaattgactgggatggctctcgcaacctttgctataaggtacatatatcatatgacatacattaattaattcttcctcaaatttttatgtatatatatatgagatagtaatgatttattattatatatatatcaccaggaggacttgtattatccgcatccaatgatacagaacatactatggggttgcttgcataagattggagaaccaattctgatgagttggcctttctctaagctaaggcagagggctcttcacactgtcatgcaacatattcactacgaagaccaaaacactaattacgtctgtcttggccccgtcaacaaggttcaattatata

SEQ ID NO: 2468 - DNA, 2784 bp, Cannabis sativa
  modified_base (2283)..(2285): a, c, t, g, unknown or other
tcaaccgtagctctactatccaaagaaagccttggagcttctctggagaacttccatgccgttctagtgccttccttgaattcgaatactggaaggggaagaggagacttaggtggagtttctttaggcggactgttctccggtaccggaaagggaagctccgtggccacagaaactggcttcgaccggtccggcgatggagttgatctggtattcttatgtttctccaattctctagccaccacaggggattgaatcgtcttctcagattccggagatgaatccacggactgcattttcaaaaaaaagaaagaaaagaacaaaaagaaaactgaatgagcaacatcattttcaaatattttccaagttgccaaacagaaaaacaaaagtattaaagataaaactcaccacagaagaagggaggcgtttggtggaataaagtcttttcccagcaagaatctggttacggtcgaagatctgaaggaacccagccatgcaacccatctgcttctccatatgtttctctagctgctgatcccgaaccatccccgtcgtcatcttaaacaagaacaaaaacaaattcactcaactttctcggtatccaaacaatcctctaccaccactcaccgtctcaccacatctcaaaacaacacccttttttactcactctctgtcgcccacagtcgctcccatctcactaaaaaacgtacctttactagttactaccactttacagcgtctcccgtttttctggtcttttaaagtgtgggcggactatggtcttattgaattacctttttacccttaagcttttcttattattccaaacgacttggcggttttactgaaaatttggcaaaaaacttgggtcctcgaagtaatggcgggctttgaaatcggagacccttttattaaaatatattttttttttaattaaaattagattaataaaaaagtgaaagaaggacccgcatgagtgagcctccgtgggtgatacaaactcatggggtctgctgtacaaggactacgctttgaccctgttactccccaaaccccgtcccaccacttactactgttctggatcgttagatctgaacgggagagatgaacggtaatcacgaggaggaggacacacagagagaatggagaagtggtaaggtaaggtgtacacgtgagaacctaacgttttaattattattattcttttttttttctctgaaattgaataacgttttaattctttaatctcaatatcctgataaaacaatttttcttattatttttcgttttaattattagtttattacagaaaaaaaactcagtgggtgggacccttagctgctgccacgcacgtagtgattctgagtttcttccacgtggcaatccggatggcgactctagttttattgagaaaataaaattgagttttgggattttgccacgtgtaatgtttctttcgttctgatgatatatactcaaatggttggatttaactcctgttattattcgaattaattcaaatgtgataaaatatgcaacttgattacgtaaggatatatgattgtcttggtgtttgttgggtgtgtaactaaattttcgtatcaattaaaaatggagaagatcatggtatataatattttaggaaggtgcccacaaataaatttaagaggatttatacatcataccggagatggtgtcccacgatatatttttgtgattatgaaatgttaaaagctacaaaaagtttagtcaaccgcttgaatattacggtattatgatagctatatatgtatgtgtacaaacaaataacgtttttattatggggttctaatatttttttttatgaaataaagattgtaattttattaaagcaaatcagctattaaaatagcattcaaaccagtagggacaaaccccctacaggaaagacggtcatgaaccagctaaccaattaaccgcttagttcccagaccgtttaacaaactgaactgaaacatgaagaaacgaaagagagtgagtgaaaaaggttgttgttttgagatgtggttccaatatttttagtagggctgtaaaaaaaattcttaactccccaaaacttaacagaaaaaatttataaaagttacaaattaaaataactttaaaaaaattataaaccgctcaatttatttattgggcgtgttgaaataagtctaatctactcaaataaaccgaatgactcgatcaatctgactttaaattttttattttttttacttttaagtttttattatgtataacataaannnattaaatatataataatataaaattatatacttaagtgttagtttcaaagttatatatattgtgttgttctttggttgaatttaataattttaatttttttttttaatttttattgactttgacttttgaacctaaaaaaagtttggccggtttgagctggttaacttaaccataccgtccaaccgttggtcggtttacaattttttttttaaatgggacgggtcgcacttaaattttagcaacaaatatataggataaattacctaaaccgaccgatgtatcgtccaaactttcagtatcagatcgatttttgtaagcttcatgagttttattattataattattaattatttatacattcgagtaataacggcaaggaaaaattgattttctaaaaaatagatctgtagatttctttgcttacggttttagcaattctatctaggattgtgtatatattcacgcatactatataatacataagactacttgctatat

SEQ ID NO: 2469 - DNA, 1502 bp, Cannabis sativa
ggtccaataacccatgaagatagggatattttataaagatatgagtcctatattctagtgatttagttatccttttttatagtataaataatagataaaaagatgttgatatccctattttggaaggatatcattacctatttgagttaggaccttttgtaagcatgataatatataaagttgattagatcactctctcaaggctaggtcattctacatggactaaaaggtctccacaagtcctctctcatgctacattgagcctcttacacatgcaagacctctcactctctaaatcctcacattccattaatacctcctaaaaactaagtccagtatctttttaagttctccacaagatcttactagttctttatctatacaacattgttctcacaattgtaatactgaagatagctagatagtacaaggtctatgcttatattatgcatggtattatctcatgagtgaatacagctaaaaggagagtaggtcattactagctaaaaaaggggaccagacctgtatcaatctatgtatcacttttactatttatcattcttatttacacgtggcgataatcagtaattaataaggttccacaatcaattgacaaaattttgagtcaacaaagataaaagccaagctgaaatatgtaatagattttaagcgacacttccttgcagaaaggagatccaaacatattgaaattcaggcaatattatcatctaaaactaaaaaaaacaaaaaaaaaattaataatgacaagcgggtgttgtatgtatttgagggcacataggtggatgtactgtaccccaagtgaggtgggaatttcggacgtctctaaattcttggttgcttatttaaacatagcatgttgtcagagactaacatgtgaattcttttgtaaatttcttccatttttatttcattgtgtccataggcttacatcaagaaggaaaaattacatagaattatatataactcagaggaatgttaagatttccatacccctggcctattggtagtaacgacacaaattgtatgcattccatgcacgttggatctttgatttgtccattctcttgagttggtatgttccattacccactttgtgttgaatcttgtcgggtccttcccaattagtcctaaggccgtaactcccaattcttacaatgctgagaatactctcctgaagacaagatctcaaaccttaaatgtatgactcttgactttagcattaaagttcttggaaatcttgacttggtcattttaagctaaaattatggttgttctgggagttcttcaatcaaatctaatgattcttggagtagagcgtgattctgggttgggtcgtaagtgtctcgtctgtgagaagggattgtcatctctactgggatgatctcttcaaactaaaaatccattgaatatagtatgtgccccactgaagttctcttcattgtttgataggaccaaaggactcgcgcaagttccacttgtcc

SEQ ID NO: 2470 - DNA, 779 bp, Cannabis sativa
ttttattttattttttcactatcacggtgcctttaaagatattaaagcaagctaattattatcatgatgtctttaatttattaggttcatacagcatattcgcatgtaaaatatttatattatgtagtcagtggtttaaattatagtaatggttaaaaataaaaagttgaatgtaaaaaattatttattttcttacatataatttttagtaaaaaggaataataaaaaaaatatattgaatgtagtgtagggtgtagtaaataatggttaaaaagaaatggtaataaaataacataaaaattattggatgcatgtgcatgtgtttaggtttaataatagtgtgtgtagtatagggtgcaaaggttgcaaaggctattccaaatgatatgatatgattaagaccacttctaaacaacattcaaactccattttcaataattcaatgtccatttcactcttgtcaacatcatctttttatttttatttttctaactaaaaaaagcaagcaatcaacctaatctacataaaaatatacatgttgattcaagaagattatatgtcgtaatgtgaataaatttatagtctattaattatttagttttaataattcataaacttattcttatatacatgaatccaaaaacattcatatttattatctatattaaatgtattaaaataaagaaacacaactaattagaggccatctcaaaatatgtgtcacacccactatgtaccataattagtgtacgttactttctcccataaaagaaaattaa

SEQ ID NO: 2471 - DNA, 1236 bp, Cannabis sativa
aaaaacttggctgccactactcgaggctgcactgatgatgatgatgaccagaacaagattgtttggccgaaatttgaatcagctaagctttttccaccaaaggaggcctcggcgcttggtcgtccaggaggtgttgttatcccgacactaaaaatcgtaacaagaaggttcgtttttgggtctgataagattgagtctcttagagcaaaataccaagaagaagatggggcgacgaggcgaccttctcgggtagagacattgtctgcttttataacaagtcgttttatggctgcactaaaagtaggatttggtgatgataaaaggcgcctggttataggtcatgcgtttaatctacgtaaaagggttgatccaccactagaagaaaattcatttggaaacattgccagaccatttgtgaaagtcttgtctagtaataacatgagtgatgttatgagtcaaatgagagagcttattgttagcggtgatgacaaagagcatgccaagagcttacagaaggaagggattgatccaacattgaatttttttgaacaacatgctgatgaattgatgaaaggagagctagtttgtatttgcttcactagtatatgcaggtttcctttgtatgtagattttggctggggaaagccctcgtgggttgcaacaaatccttttccttataagaattttgttgttcttgcggactccagactaggtggaatagaagcttacattgatatggaggaagaagacatggtcaaattccaaaacgatcaagagttgctttcatttgtttctgatccatatataacaatataataggggaactcacctccatttgacgaagctcacctcttacaaattattgtgtcagagattactatacaaccaggagaatccattatcatcaatgtatacattattcacgcggttgatactttgcggcattatttgtttaatgtttaatgtggaatttgattcagctagagtggaggagcacaagtgtagtagtttaactctatatggaaaaaaaaaaaaaaaaaaaaatgtatggaagttttattttgagctaattatttgtctaaataaattttataaatgcaaacaaaacaaaagtgaaatcaatatctatatctgaagaattgatgttgactaccaaacaaatgaagaagacttgtttttgtcttatctctctttcttctttttttttttttttttttttaaattttttttatattt

SEQ ID NO: 2472 - DNA, 2404 bp, Cannabis sativa
aacaaggttctgataatggcggccggggcaatcgacaacgtcattaacgtcttggaatcgggaaagaccatggaagctagggagaacgctgcggcggcgatcttcagcttgtcgatgatcgacgactgcaaggttgaaatcggagctcgaccgagagcgattccggcattagtagggcttcttagagagggaagtcccgccgggaaaaaggacgcggcgacggccatcataaacctggccgtttacaatgcaaataagctagcgattgtggctgccggagcgatccctttgctgatcgacctgttaatggatgagaaagccgccataaccgacgatgctttggctgttctggcttcgcttttggggtgttcagaaggagtagaagaaatcaggaagagtaaaatccttgtaccaattctaatagaccttctgaggtttgggtctccgaaagggaaggagaattcaataacactgctattggggctgtgtaaagatggtggagaagaggtggccaaacgtcttctgataaaccctagaagcattccatgtcttcatggcttggccactgatgggtccttgaaagcaagaagaaaagccgatgctttgcttagattactcaataggtcttgctttcagtctcacagtcaagtcagattgtgacaaaaccaagagagaaagacttgtatatttgtggacaaaacaaaacaaaaaccataaccatactctcttttttttataaaatgattttgtttgtgtgaagaaatttgtgggtttgtttcaaattttgaatctaaagaacaaaggaataactgaaatgttctttcattgcttgaatactctatataataatacattttacatgagttgtatataattagacgatgagagatttggttcaacttgtgtttaaccaatcgaatctcaacaaattttgacctttatgagggtgagtgagatacgatccacgccatctgtgaaccaggattcacgtctgggggttgagaattggtgattattaacttcaaaattctactaattccaactcaatgtgcgagccctttatcttgtacttccagtaccagcttccactttctaccatgttcttatcaataggttctaattgaactgccatacctgtttttacaatgaaataatggatgagagtgagaaaatgtagtagtcccatatgggaggtaaattttctgacagtataatggcagtttggaataaaaacataacagttaaccgtagctgaaaaaagtttaaaacctgaattacctgttgtgatctttaatttgtacccatttggaacttcaaatatatgatcaccctgaatgaattaaaaaatattagaagaattttagactttcttctaaaatactttataactaagcagtacagcatataacaggttttgtcaaccttgtaggcctccttttcatatgcactaaagatattacacctattatgatgcaaattttactgcacatattagtactcattaatcattactaataagtttgaatcccaaattgttactgttatacgtaacaatattttgatagcactagtggaatttataataattttgagagcaataacaaaaaaatggacattaactgatcgaaaatgaagaaatcaccagactcccataattaaaactaacataacatgtcaaaagtttcttattttacgagttaccactcagattatagtaatttggccaccttatagcaattagcagttagtctgacctgtatggtgacatctctagcctcaaattcagcatttccatgcaatataattttacatgactcgaaccgttgaacttgatgcttccaatatacattgtgtccacaattccagtcgactccctgattctgcacttcaacgttctctaatctacatcttccacacctatcaaaatgtttaaatgattaatgatagtattgcctccaaattcttcaataaatgaaaataacacgaacctgtggccatattgcaggatatgttccccgttatcatcaatcctatttgagcccataatgttgtctgcctctataatcaggcttccatcaagctggaaaacagaaaccagatcgtttcagcacaatagtaaagtaagttaaatgctctattcatgcattactaacctcaacattcctccacaggaactctgcgacctctacttttaactcagatcccttggatatagaacctccattgaactggagttcatgtcatagcaaaagataatgagaaaaatataagaaaatgatcacaaatatgtagtctcagattacaacatctacattctatagcctctcaattattgacgggttaaaagcaaacaaaaaatgagaagcagatggcatctgcatttgggaactaggattaataaata

SEQ ID NO: 2473 - DNA, 2179 bp, Cannabis sativa
aatttttccaaatgaactaataaaagatcagccctcttcctctcctctcttgcagccttttattttctcagaatcaatttgaagatcgaattaaggatcataaaacgaaagataggattggaattaatttcaaagaatcggttgaaacatatgttggttgcaatataagaactgagagtcgacttcaagaatcgattttgtttaaggagatagaaggtcaatttcaatcgattgaaaatactctagggaattctagagctgtaatcgcatatagattctaggagatgagaaattcatatttaaaaattagattgagtttagcttgtgttccgtgttaaggttatacggttaaaatttaaaagtaatattaaattatttaaaaattaatattaaaacacattttaatattttgataaataattaataaagaatattttgttaattacttcttatattctgttaaagttaacgtaaataataaaaaattatcgttaaactaaaaattctggtaagatatatatttttaacaatgaacaaagctaatatattattattgtgcatatcatacaatttaaattcggtttgttcatattataaatgtaatcgtgtaatatggactatttctacaaattgtaatttataggaaaatattgttaatgtatcatcatatcataacaaaactagctatggtataatgctaaaggacaagatggcatacccctatttacacaatttaatatcgattttaatttaataaataataattctcagttataaattaaattaactcaatactttaaacttaaatgaacaaaaacaaaaccatatacataactcaaacacatctaagctaacagtgaattagcctagttaattaagccgccatataatataattaaaattaagtacaaataaaaacatcctagttttccaacacaagcgatattaggccatcatcaacatcatttgatgttgatctagtcaactccttagctctctccgcttgcacattccaatcagtagtgaccaaaaccacaaccatgacacaagcacaaaccaactgagcccccaccaacccaacccacaacccaatcaacccctttcccatcttaaaccccacaaacatagcaaccggaaaccccacaccataaaaactcccaacatttatacaagcacccatactcgccctaccactccccctcagaactccgcaaacagtagtttgcggacaattcccaacctcacacagccccaccacgggcaataccgccgcactcagcgataaaatcgctctgtccttggtgaaaatcttcccccacgtgtccttcaccgcaaccatgaaaaccaaagatacaatgcctgttacaaagccacacgacaaggcaacgaaagccgcagttttcgccttctttggctggttagcccccaactcaatgcctactctcgtagaagcagcttggtttaaggcgaacgggaactggtaaaccagcattgtagcctgcatgagaattcccatgcaggccactgcatctccggagttgactaacaacccggagagcattatcatgagctcataccaccaccactctagacataccgagatgcaactgggaatggcttggctaagaattggtttccattccaagaagcagttgcggaatgaccattccggccaagaccatgtcacggcgccgaagaagtatagatagaaagctaaggatacaaaaatgttaaggtcagttaaggaagcggagagagcgacagctccaatgttgttgaaaccaagatggttgatgaagtagtagttgataggagcgtgagaagcaagcgctaaggctgcacttaacatgagaggttttgtgagtttctgagtccttaagtggattcgaagcgggtttatgaatgattgtaagattagagaaggaattgagtatttgaggtaagttgtggcgattgtggagagagtttggttgttattgaaccaataaaggaataagggtttggagttgaaccatgagaatgagatagggaatgtggcgagtgtgagtatcatgaggattgttcggtttagtgtttggcccatgagtgaccatttgttggcaccgtaggcttgggaggaaatgccttccatgcccgcggctagccccgatacgacggaggagccggtgatgttggcaac

SEQ ID NO: 2474 - DNA, 1746 bp, Cannabis sativa
atcatacccattccattatttgtcatacccctaccaaagaaggctgggtttacatgtggagccactgcacctagtcccattgtgttaactcctggaaatgaagaaagcattccagggtaagcatgtcctggaaatcccccataaccacctcctctactcatatatgactgatcaaatccagaacccatcatggcctgtggattcatcattccaccaacaggacccccgaaagcatgtcctccaagaccctgcccatatccacctactccaccagcattgctcccaagtccaaccatgttcttagcacccatagcccctcctccccttcccctcattaccccaccacctcctctgttgagtattccttgcccacctcgtccccatccaccccttccgaaattcctccctccatctccactttgatggttctgattgccacctcttccaacaccatcactgacaggccttcttccctgcccctggggaggttgagactgattctggacttgattcttgcttgtataagcagctcccatctgctgaagtgtttgtgaagtagcaaatgccacaacacaagctcttccattgaaaacttgaccatgcattccttccttgcatgcagtagctgatgatgaatcataaaactcaacttgacaatatccttttgatttgccactggctctttcatcaaaaaacttaatttcctttactcttccatattgagataaaacattttcaagttcagcatcagttgtccaccaattcagttccccaacaaacagcatagttgaaccattctccattggtggccttatcagattttcattaaccgcagggtgtttaacgcttaaatccacattggtttgattagcagtatttccagaattcagtgacaatacatgctcatttgcaacttttacaggaataacagatgaatcaactcctgcaccatgttgtatcaaagatccattagaccccataattcttcccttttctgagactgaagcagctccattcgggtacaacatgaaaccaacttttgatttattatcaactgcaagtccctccttttggccaggaatttgagaacttgtactaggatattttccatctgttgaaacaccaggaatattcggttctcgagataccccagtttcgtctcttggtaaaagaaaattagtcttctgagcttgaagccctccattgctgacaccaccaggaggaagtggtgcctcagactggtgcaactgcatgaaaccatctccaatgttaacatcattatagagatcatcgtattcatcatcttctcccattggttcttcatctgcaagagcagatatagctccactattaccctgatactggagcttttgaagtcctccatactcctcgtcttcgaaatccatttgctcttcactcattcagcccattaagactgaaaaaagtgagatgaaaataaagaataataaataaaaactccatatatatatgatacaacataagcaagaacaaaacaagtatatgaacacaaaatctgtaaagtttacatggctctactcatagagagatgataatgtcggacattcacaaaattccacttcagaccaaaacaagaaacagttaaagaagtttacaataatcaaaatctagttaatatgcatatgaacttcaaagatctgatattacttcaataaatatgacatttttgctgttttttctgtaacttaataagtgcatgaaattcaa

SEQ ID NO: 2475 - DNA, 1915 bp, Cannabis sativa
caagttcaacataaaactcgattagctaatcgaaatatagatcaaagttattctaactacaatcccaaatcaaataagaaaacttgacagcaattaagtaggccgaaattcttacaagtttatatgtaaaggttttagaattagttcattttttcttacaagatttaaactaaactaatttcacttagcatcaaacaatgtttgttggacaaatttgtaaaacaaaataagttattaaaaaccaaataaagaatttcaacattcccaaataaaagaattaccaagaacttgtcgaatcacatccctctctaactggaatccatctccaagcatatggaacagaaactcctccatgtcgtcatgcacattatcatccttttcagaatttaacttagcttctcttatcaaaggttcggatactggcaacaccttcgagtttagcttcatcgatttgtttgctttgacatatccttgtttgaattgtgcggtcttcacataatccttgccaataatgcttgagacggtaccaatagaagcagaacgatactttgaacgctctgagacactaacacataatgattccaaagaatcttcgatcccccctatctcttctccatcaactgcaaccgagcaagaagaagacgaactatcctgctctttgctgaaaaatgcatagggtaaatctcccttacctctcacagtcccattaacacccgatttaccttggttcttcgtattatggaaagatccattttcctttgaaaactcttttacagcttcgacaatagtggttcctccagccatccctaagacttaacttttacaaactcggctactttatttaccaaactagatgaatcttttctctctctctctctcctataaaacaataagaacataagaaattatttctcaataaaataaggctcttaagcaaaaagtttctccaattcaaattacatttctacagttggataaagaaaaaagaaaatggcaacccttcccaatataatcctaaccaaaaacagaaaatgaagaaataaaaatcaaatttgtcttcagacagaaattaaaaccaaaaggtttcttttttgacaagttattttagactgaaagagcaataatttaagtaagcaacttaagtaagaaaatcaataagatctactgatctacacataatcaatgattaactataactcacattactaaattcccataatataattcagattcaattaacacaaccaatcattaccttaaaaaacacaatgccacacccaaaaatcaaataagcctttaaaatctcagtcttctcttcaacttcttaacaacatgcaaaatatccaaagaatgaatacccaactaaacagaggaaatcaaagaaaaacaatgaaagaacaacccatttagaattttaaccaaatttaaccaagaaataatcaaataaatgaaaaacaaacaattgggtatcaataaccaatgttcactcacacaatcaaacagaaactaatccaatcccactgcccaaacaaggaattcttcatcaatttctttttacttattcattagggagataaaaagagaatctttaacaaataaacaaaaacccaaatctaaaatcaaataaagtaacgatagaattaagagataaaatacattcattgtcttatctctatcaaagtagctacgaaatgagagaaaacaaaacaaaacgaaacagcattaatggagaatcgagttacctgaagagaaatcttgattgaatgagcgaatgagagagaagagagtatggtgaataattaggagagtgagggaatgtgtgagatgggttttggatactgataatgaatttggatgaaaggaatggtctttaatggtggaaaggaaagaatgaagaaggagagagagagagaga

SEQ ID NO: 2476 - DNA, 3193 bp, Cannabis sativa
cgaccaactatctttactgggattaaagaagttaggctccacgagccaatggttttcaaagaaaaatctgttattacttctattaaaatgaggagtgaaattataaaccagtttgagagctctaagatctaaaccatagaaagggaggtaaaaaaagttggttgtgggaaaagtgtcactccaagccttattaataatgccccagtctaggtattcaaaaagactaccatgctttcaagtaaaataattaccagtacagttcaaaggaaacatattgtatttaaagataaaattttgaaaattgtgaatagcatggggaggacgtaaattgtcactgttacgatcattaaagcctaagtaatcattaaagtcccttcaaattagccaaggagagaatggggcaacatctaaaagacgatccaacaaaatccaatagttagttttaccatttatataaggagaaccatagaagaaagataagtgatagttaatatggaagtttatggaaacattacaatgtctataacatgaggagtaagatagaatattaacattaacaatatcattctaaaagagtaatacaccacctcctaatccatttctagggaccttaaaatcattatcaaaacacaatctagctttaaataaaaaattgcagttggctgccagcttagtctccattatgaaatgtatttgaggttgatgttgtttgaccaagaaagagaggttatggaatgcccgagaactccctaatccttgaccatttcaagtgataatactcatttttctgggtaaagttgatgagcaacacccgccagttcattagagtcagacaaagatgggaccacaacaaactcagagttggaagatcgggctctttttagcatgcttctaacagaagaacccacttgaaaattttgtttagtgaaagcctctttgtcattgacttggttcctagaactgcactggcctatggaagtggtaaagtaagaaatatgcccctggatatatcagggtacataaggcccttacccttagaggtggcaagccgaggcaaagtaaaagctgggcaatattctagtgttagatttgggaagcaaaaacttctggtcaaaggccaggaagctgttcccatagattttactttagaagttatttcccatccccaaacttcttcatcagcagtggtctcttcttctcacggttgagtaaataacaatgcttttgcaatagtccttctctagcagagagcagtcgtcatggatgacgaagaggaggaggaaggtgaaggatccattttccttcataataaaagatctggctctgaactgggtagagagaaaaagttcaagaactaaagctaaagaaaagcttcaatagttggctaataccaagaagcatggttctgattcttctggataaagaggggtagatactcaagaaaatgataggcccatggcggagcactctttctgacaaagagattatcaattatcagcctctgccatcacaattaatctaagctctttcaacctagttccccagagagaggacaaatcttccaccacttcctccttccaatattgtcttactagttcgctcttccttgtttctgaaagaggtatgtgctcaattggatagaccagattaattcttcctcaagaaattcaactccaaatatgtatatataaggagaaaaacgtctttgctctgaactaggcagagttccaaattcactaatgttgtgaagtggaatgagtcacttcctcaaatgtttgatcgtcaggtggtttctaagaggccccaacccagggtatgctcatatctggcaccatttgtagcgaacttattagatcaaaatgctgggacttgtagcagattaggtgctaataaattcactacaatggcgagtagagatccaatctttatggcggaaagtctcaagagacaaagtactgctgtaagtctactatcttttgtataagctatatctactaagtctttttgcttatattttattattatgtattttatatttcaaacaagtctaatagcggagatgtaatcttctttggtcaacaaattggcttatgaagttgaagcgttgaatgcataatgtgataattccgagcaattaaaagaagaagtagtcaattctttggatgatgctaaatctcgagcagaggctatagtcaagcaaagagttgaggtgtccctcaatgacataatttacaattacaaagctttttccaaggcgaagaaggatggcgctgagatatgtaaaaagtcttacaccaagacaaattcacacatttttggattggaggaaaagcttgttgatgctcatgttgaagtcaaagagctagagcaaaaatcagacactacttctaaggactacagtactcagactgaggtccttaatgacaagatcgttgcaatcgccaatttagagaagaaaataaagcatcatcaagatatccaacaacaggctaaacttttgaacaggcgtgttgacctcaaaaagtaatcaattgacagtggggtcatatgcatctgatgcttgccacgtgttacacaaacagaatgaaaaattataaaacatacaaatttgttatagaggtttaacccccttgtgatagcaggtgatgacctactacctttttggttctattgatacctagagataatactatttagataactataggtgggatctgatatagctatctataagatacaaaacatgaatcagtaagaagatctctaatgaagagagtgataattcccttagacgtgtgagagagatgaagagaagaaagagccctttggggcatgtagcagagagagagaaagagagattagggtttctgacttagagtaatttggaggcttagtgacttaagttttctaggttagagttaaggcctttatataggaagcctaaaatcctaatttacaatgaaacccctagatatgtacacattaaattcattaaatacaaaagactaaactccccctcaaaagtagatattttccatcaatttgttgggtcgttaagggcccaattcgcagtagcttgttggccacatttttgggcagtacatagagctctgctaggttaactggctgcccatagacctataggggaggtctggctgcctaaggtctgtaggatgaggtctagccgcccaag

SEQ ID NO: 2477 - DNA, 684 bp, Cannabis sativa
ccactacttcttctttccttttgcagatttacgtttaggtggaagaatgatctcacccttgaggacagggatttccataatctccgtgagctcaccgaacttctttctgaatttctcgacctggtcgtcgtcgaggagcgaagctgagcggctgccgaggtagaagggatggttccctgaccacacatccaccacgtactccttctgggtaccacccgtcgtcatcacctgctcaccattgcagtacaccttcgcgtcctcgtagaactgcgggtgtaattccttcttcctgcacgttaccaccgcccggtaatttgaaaccccagaaacctacaacacaaaaatttcaaagtattaaagaacaatcgagaaagacaaaagagttgggtgtttatcctagacaaagacaaaatttgaggttttgggaatgaagaaggaagagggtatggaacttactttcttgggtgggagtgatggaagacaggtggttccttggagaaaggtgttggtcagattaagcgccatttttgatgatgaagagagggagctggtgataggtgatgaagatgaggttgatgacttgtgttttgtgaggttgtggtgtggctgcctattacaccttttggacttgggttgggcctctaaacatatatttcatttgggcccatgtttttgtgcggtttt

SEQ ID NO: 2478 - DNA, 1592 bp, Cannabis sativa
catgaagacaaactaaccagcacagctacgatcagtttctgtagtacaaaggtatgtagcaatgaactaaatgttgtcttgaatctctaaacatagaaataatgaaacaaacattcctagcctcaatattattaacattatttgtactaagaggtggtgagtattacagaggtaatcatgattagcttaaacgtattttcattgactccaacagctttacttacaccttacgtcaaagccaatacactctagaaaacaaatagtcatcatttactcctcaaaattattgatttttatttttcaaatgtatttagcaggaggattatcataacgtagttataatttataaaagagcaggtaataccagacaaagatttgggtggtcactagctcatttgatatccattgaaggaagattattatgtaaaatcaaaatagttgttgtcagaggcaaattattgttaggtcttcagtgttgattctttctttccaacaacactaaaagcaacaacaaccatataaaccatctttgccaaaggatacaacatacagaaattttgatacagatttctttttgtttgacacgttcagaaatcacaaagtttactacttctttcatgggttgtagttgtactaataatagaacatttgaatataatcttacccagttatagatgtattgaataccacttgggttcttgaatcatcaaatgacttagctttccatttgagtatgatcttatcagagcttgagttgagccgcaactgtaaacaactcacatgtacattcgacaaggcagacgatcactgtaaatattgtttgacttgtataatgtgtttatgtgagctaactattctctaaattgtaggtgcaacatggccaaccagtgtaacgtagccgatcccgaggtagtcaactccataatagtaaaacccactggtagaatataacgtgagggaacatactgagatataccggagattcaggccaatgaaacctaagacctttgagggtgaggggagtgaccaaaaggatgtttggagattggacgttttgcatgagagttctttttcaagacctcaagatttcaaggccttttcgtataccattggccaccttgtacctaaaagggcacgcgttgcatggtacaccgagcgagacctgcaaccacatgtgcaaggatgggatgaaatttcgctttgccatagagcttgagtttggaccaccaaaggagagatcttactggtaacgtcatttactgagaatcctcctgttaaccagtaagatctcttccatagcggcccaaactcaagctcgatggcaaagcaaaattcaccttatccccgcacacatggtcgtaggttccgctcatgtaccaaaacaaatgtgcacccttttaggtacatggtgtggccaatgatatacggaaaggcctcagaatcgattctgaggtctcagaaaagaactccaatgcagaaggtccatctccaaacttcccttcggtcattcccggtcttaatttcatagacctgaaccttcgacatatcttagtacgttccctcatgttatatttcccacatatatcttcaaa

SEQ ID NO: 2479 - DNA, 1055 bp, Cannabis sativa
ttttttgctaatggtgtgtcgatcatggttcattgctctgtgattattactttgtaagatttatcataatcttatctttgagtgttctttcccatctattgtggtctgatattagtaaattatcattcatatggtttgatgactgaatcattgtaccttaatccctatctttatagcttaataaatctataaacatgattcttgtttcaattaggattcatagtttttttcttggttgaggtttagaaacaccgtttatgttagtaatcgagaagcaggagggagatagtagttgttacgtgttttgagtcattacttagttttttaaactttatgctcattttgttattgcattttgccagacaacgtagacttgggaactgcatgtggaaaatactacagagtatgctgccttagcattattgacccaggtacttggctcttctttttatttacaaactcgaagcttttgtactttgttatagtttgcgattcttattggttatcattaaacttttcaggtgattcggatatcattaaaaacatgcctggtgaacattaagtagcccgtatgatctgtaacaggtcttagattttggtcggtcttttttttgtttattttacattttgtttttgggtttggaggtgaggaatagcactagaggtggtggcgaactttcaatgttctaagttttaactaggaaaacaatactaaagatgttgaaggctgcctgcatttatggttcttcttgattgctttattgtgacttatattttgtcttgaaggatgtcctgtaaccaaatttccttttatcactttggattttaaatttatgggaatgcctatttgcaaactgtttaatttattatagttccccttgtatgataataccacgagtagaagtactatgatgtttacatcaaaatactatacttgagaaattaagatgatttttttaaataggtagtcaaacattatttaccatcaacaacttcttactccaaactaaaaatagagtacaaaatagaaatgagccaattaaagatttaataat

SEQ ID NO: 2480 - DNA, 1849 bp, Cannabis sativa
aagcctagcctccacaaataggtttaccgcatccaaagtcaaatctaattcggaagcagtcacaacactcgaccccgaagtggagggagattgactattggacgatgagccaccagcattctcatcttgatacctctaaagatagttaagagctcgagaactaacttatgttatccaatagaagcttgtggtcaagaacaatggtgttacgtctatgccaaatataccaataaagaataatgaactccaattctcatttactcaaaatattcatgcagcccaacaaaatctcataaaaataggagacatcctttagagtatcaagccctttcagaatcaattcagatcgaattaacttaagtgaaaggtaaagccacagcgcatgaatagtagtctcattattcttaaaacaaatagggcaaaccttggcgagtcaggtttgcataaagcgacaagaaatttaaacttgccttccaaacaaagtttttaatttttggcaggagcttaagactcaaagaagcttccaccaacaagaagtcactgagaatgtcgaaactcgtccccaacccatgcttgaagcagtgctccaataaccactcttcaccaaataaatactattatttgaaaagtgccagataagcctatcttctctttcaaaaaaggaacaagggatagacaaaattactctagcttccacattatcgaacgattcctgcacaggaaaggagtcccaacttcccgaatcaggcttaagatcgctaaccatttgcaaatgggggcccctgtaaaagaataggcacgaccgacttggtcctttagaatccaagcatcctttcgaatatttatagtatcacctttccaaataagcaagggacaacccttcttccaaagattctgaccctaaagaatactctttcaaaggaacgaggctcgtttcatctcttcaacatcaggtaaagaaccatcaaaataatagaatcccttaataatcttaacagccaaagaatcgggacgattaaacaattgggccgcctgcttaagaagtgactagttaaagagaaacatatctcgaaagctcatacctccataaatattgtgttaacataaacgagaccaagtatactagtacattttcttcttattatcatcccgccctactaaaaaatagcacacattcaatgaatctcattgttgagaattatggggttcaatctcaaaactaattggcaatgagtggagtagctcatgttcttatatatgactcaatacttttatatttaatccatgtgggataatattctccaatactcattaacaatactcacgggtaaacgaaatatactcagaacatatataagaataacttgaataactaatttcaagagaacttcacaactctaaaagaaaaaagcttagacattcactcaaagagcttgttccaaaatttatctattatgaccacactatgagtagattatagttaatcatgaatatatatgcattcttttaatgataaattttataattaaaattaaacatttgtgatataatttcaatcttgacctcgtttaacattactcgtaaaaaattaaaatagaaaatgatggtacaaaagtattttcactttagacatggaatttaccatacttgcagaaaacgccaccgtcttgccgaccatttctcactttaatgattcaaataccaaataagattcccaaccaatcacattccacaaaccaactgaactgacggcgttcccacgataaccccacgcgctttcaaaaccaaaactcttcttcatactgtgcacacacgctcctaggttgagagtaggattacaaactcccac

SEQ ID NO: 2481 - DNA, 5189 bp, Cannabis sativa
tgagagaattttttgtgagaaaaatacttggatatatttggagggtgggctgtgagaagtgttataaacactttatatatttttgtttcacagtttcagtaaaatacttatagcaaatttatacacgtaccaaaatttgttatcaaatttgtctgtgttatttttgctattttgttttctattctcacaaatctgattaaaaggaaaattcatgtgaatttttttccaacaactggtatctgagctacgcttaaaaattctctccggaagtcagatttaagtgggagcaatggtcgcagatgaagaaatggtgaaacttgagaagtttgatggcacatattttggattttggaagatgcaaattgaagactacttatatcagaaaaagctttatcaacctctctttgaaaagaagtcagagggtatgaaagatgaagattgaaatcttcttgatagacaagcccttgaagttattcaattgatgttgtctcgcaatgttgcttttaatatatcaaaggaaaagactacaacaagtcttatggcagcactctctaatatgtataagaagccattagcctcaaacaaagttcatttgatgaggagattattcaatttgtggatgataaaaggcgcattggtagctcaatatctaaatgaactcaataccatcacaacctaattgagttcagttggaattgagtttgacaaagaagtacaagtattaatattattgtcttctctactagatagttggaatgctacagtcacagctgtgagtagctcatcgagaaacaataagttgaaatttgatgatattcgtgatctagttctcagtgaagagattcgacggagagagttgggtgaatcatcaacctcttcagtattacatacagagtcaagaggaagaaaatcaactagagggaatggccatggaagattgaactatcgaggtaaatctagagataggaggtccaaatcaagcaatctaaataattcccagagcttgaagaccattgagtgttggaatagcagtaagattggacactacaaaaatcagtgcaagagtgcaccaaaaagtcaagatgggaaagcagaagcaaatgttacttctacattagaaggtgatgatgcattgatatgctctctagagggcaaggaagagtcttgggttttagactctggagcatcattcaatgttacttcgaagaaagaattcttcgagaggtatgtccctggaaatcttgaaaaggtataccttggtgatgaccaaccttgtaatattgttggtaaaggtgtagtgaagattaagttaaatgattccgtttgggagctgaaggatgtcaggcatatcccaacctaagaaagaacttgatctcagtaggaaagttggctagtgcaggctacactacaaacttccaaggtgataataggaagatttcaaagcgtgcaatgacaattgctcacgaaaaaaagagcgacactttttacatgacagcaggtgcgtgctgttcaattgcagttgcaatagggaatgaaaattccattatgcggcactggggagttaggcacatgagtgagaaagggatgaaacttgtgcattcaaagggaaaactcccagatctacgatcaattgagatagacatgtgcgaagaatgcatacttggaaagaaaaagaaggtaagctttcatacaagtagtaaaaccccaaaaaaggagagattagagctcgttcactctgatgtttggggaccaacgactacttcatccattggtgggaaacaatacttcgtgacttttatcgatgatcattctcggaaggtatgggtttactttctgaagcataaatctgaagtgtttgaggctttcaagagatggaaagctatggtcgaaaatgagacaagtttgaagatttaaaagttcagaactaacaatggtggagaatataaagagaacacattcaagaagttttgctatgagcacggaatcagaatcgagagaaccgtgtctggcacacctcaacacaaatggtgttgcggaacgtatgaaccgaacgttgacaaaaagagccagaagcatgcgtatacagtcaggtgtaccaaagcaattctgggccgaagtagtcaatatagcagcttacttgattaatcgaggctcttcaagtctactagagtacaaaataccagaggaggtatggagtgctaaagagataaacctatcacatctaaaagtttttggttgtgtagcctatgtgcatattagtgatcaaggcaggaataagcatgatcctaaatctaagaaatgcactttcattggctatggtggggatgagtttggctatcgtatttgggatgatgaaaacaaaatggtcattcgtagtagagatgtgattttcaacgaaaaagtgatgtacaaggacaaacacgaaattgatgctaaaaacttagaatgtagtgggcaaatatttataaatggagattatgacctagatagttttatgatagagttgattgagacaagtcctcagcaagaggaacttgttggacaaagttgtatgcaataatctaacgcaacattacctcctaccccgactcctatattgagaaggtctttttggcctcatgtgcctaacaggagatacatgaactatttgttgttaattgatgaaggagagcctaaatgctatgtgaagcatgtaaaactagtgatgcaagcaagtgagagcttgcgatgaaagatgagatgtagtctttgatttcgaaccagacatgggagctagttgagctacccatgcataagaagtcacttcaaaataaatgggtgtaccgggtaaagaaagagcatgatgcctctaagagatataaagctcgattagtagtcaaaggatttcagcagaaggaaggagttgaccatactgagatttttgctcctattgtcaagctcaataatattagatcagtgttgagttttattgccattgaagatcttcatcttgaactgttagacgttaagactacagttcttcatggagacttggatgaggagataaacatgcatcaacaagaaggtttttcaaagaaagggaagaagaatatggtacgtaaacttaagaaaatttgtatggcttaaaataagccccaaggaaatggtacaaaaagtttgacagtttatgcacaaagaaggcttccataagtgcaatattgaccacttgttctatttcaaatgatataggtccagctatatcgttttggtactttatattgatgatatgttagtagcaggtccatatatggccgatatcaaattgttgaagcaacaattgtcaaaagagtttgacatgaaggacttaggtccggcaaagaagattcttggaatgcaaattataagagataagaatagagggattttgtagttatctcaatcagagtacatcaaatgtgttttgcagagattcaacatgggtgatgccaagccagttagtacaccctcgccaacattttttcctatctaagggtcaatcgtctgagatggaggaaggtaaatatttcatggctaagattcctaatgcctcagctattgggagtttgatgtagcgatggtttgtacaagacaaatactggacatgcagtgggggttgttagcaggtttatgtcaaatctaggaaaatctcactgggaagcagtgaagtggattttgagatttctaagaggcaccactattaagtgtttgtacttatgaaaaggtgaattaaaagtacaaggctttgtagatgcagacttcggaggcaaagtcgatcatcgaaaaagcaccataggttatatattcaatgtttgaaatacagctgttagttggatgtctcaatcgtaaaaaattgtagctttatccactacagaggcttagtatgtagtggtgactgaagccagcaaagatatgatatggcttcaaggtttgttaactgagctaggattcaaggaagagaataatgttttgcacagtgatagttagagtgcgatccacttacaaagaatttaacattttattctagaaccaagcatattggacttcattatcatttcattagatctctattggaagatgaaatgttaatacttgagaagatcgaaggatgtaagaatccaacagatatgttgacaaagacagtgacgattgagaaactgaagttatgttcaactttagttggcctacaagaataacaaaaccagaaagctttgctacataatgtggagtgtgaagacagtttaaaatcagtcttcaaatgggagattgttaaagaaataacattatcctttcttagataaaggaatggatcatatgcattgttatctttaagaagcctaagttagcaaattcataatggaaagtgcataaccataggctaatttctaccactcattttatttgtccaaagcctatataaacccacataggtttcatttaaatatatcccaaaacaaaaaagaagagtagctttagttaaaaacttacagagagaaaagatttttgaaagaatttttatgagaaaaattcttgagtagaaatggggtgtgggttgtgaggagtgttgtaaaacactgtgtattttttatttctcaatttcagtaaaagatttgcagcaaatttagagacatacaaaaatttgttatcaaatttgtgtgtgtgtactgagctaaataatcaaacgacttggagaaaacaaaattcaaacatgaacgaccctagggtgacacgcatttgaggcccgtcgagtacaactagtacgatcttacacccttaaaagccacatgggaaatatgccacctacaaatccaacggtggtaattcatcctcgtggtgatctatccaacaacgacccatgcaagagaattggcctataaatatctcacagatagcacaatgagggggatcctttttttggacctttaccttctaattgaatacttattcttcatcaagaaaacacattactgtaaccccactattaactcttgaatattcctactaagcttcctcttattcaagaggaacacggtggaaaactccattgtatttgtatttgtataaatagccaacgaccgatcagcctaataaaatggcctcgtggactaaggatagttaacgcctaaacaacgcaaaaatatcttgtttagtattttattatttacgccatcatt

SEQ ID NO: 2482 - DNA, 2269 bp, Cannabis sativa
  modified_base (510)..(516): a, c, t, g, unknown or other
agttaattcattttttcttgggtgcgatggaacgtagttactgtatatttatctttataacatcaaggattacaatgtcaattacttagcaataacaaactcattaagttgtgttcgatctattatacgaatattaatttttggtttatttttaattagtttaagaataatttgcagttagattattaagttttcttaaacattaatatattgcattcaatttacttttaatttgtaacactattatttagattaattgaattatgtaaaaataatctcaaacaataataataatattttttctttaattatttattatataatttttaaataaagtaaaaaccacttagcataaaattaattatgcgagctcgcacgtaactttcttctagtataaataaaaacgagaataaaaatagaataaaatttaaaatgcataaaaaaattattaaattttttctcatcatgcattagaatggtcttttcttctatttcaaaatggaatagtcnnnnnnncaaaatggtggaaaggtcattctattggaatgacattccaatactttaatttgcaaccaaataaaggaatgtaatgaagattattttatttctattctatttcattacatttaactaaacttcaccttaaagtttatgagtaaatgtggtatgattattaaattttggtgggttagaaatagttatttttttttttttttgctaagtcttgaaaaaacttcattaagtagaggataaaatattggtgagtccaaaaggacttggactcacctcccaaaatttaagaaaatcattacaccgttgattgagattccattttgatttagtcaaaagataagccgaatgattacagatcttagaaacatttaaatcagcaatcaaccttaaaacttaacaaaaagagaaagagagattccacaaaggagcttggagcttctgaattgccaagacaagtgattgacaatctaaaataaaatcaggtcgactttaaaaatagttggatgatagtaagttgttagtagccaaaatgtaacacttttggcttgatattttaaagtttttgttctactttattgaaataagtggtagagaatttgaaaatttagtatttattttgaaatgtttcataatttttcaatagtataagtaaaagctttatttaatatacaagaacgttgtaattttaaagtaattttatctcatattactttctttttacaacttatgattatattatcttcacttaaacacaccttcatattagcctcataccgcctagtcctagtcagcaaatccaataaaccgccaaaacttccctcgtgttcaacttcaacgggtgaatcccatatagaacgaaacggaattaaaagctcactacgtttcgtttcgtatcaataaaatcgaaacggcatccaacgacgtcgttcgtttccagtgcatgacttccggaaagagatcgtcgttcgtcacctaaagctctcgtctttcttccctttgcctctccctttgcctttcctctttttccttttggcaagttagggattagggtttttatgcgccagaaatacaaaccaattgagttccatctcagtcgataatattaacttgaaatataaaattaattgcagagttggattttgggcttacaggaataataaatcgcattgttaatcaactagcggtatttctgcaacggtaatttccttgagttcttctcatagcaaattctatagtattttttcttgtattgagtaatgcattttgggcgtcattatggctccattagaattgattgaaattaagcattttgattcattttttttatgccccacctgggtttttcattgccttgtacaatagagtagcaataacattcccataattttttacattacatttctccttgatgattattttgttttttatttttaaatttgatagtctctgaaccataatttaatctcggcagctttgcactttgcaggatatcgtgtaaattgcttaatctatacaataatgcttccttgattataggaatgaagctcttatgtacatattcatgcttgtggtttagatattaatttgtgctttgacggttcccctctgtgacatgacatataggctttttgccctcttaagatatcaatttggaatactgggcaatctgctataactttgtagcagtagcagtgagagatgtcctcacgttcaaatgtgaaattgaccgaatttgggggggatctaggtcaccagg

SEQ ID NO: 2483 - DNA, 765 bp, Cannabis sativa
aatcacattctctgcacttctttctactatcaaaacttcgaaatttcagacatcaagagcgaattgaacgcacaaccacgaaacacgtaagtgttagcactgatcgaaattccagttccagcaagaaacatatcaacaaaacacgaaattccaatacaattaagctttctgaaactatcaagatagtaaattcaacttcccaatcccagtacccacttgagaactccacccaaaaaagacactaaacagagcaatccaagtttcgaaaccaaactaaaactgctttcggaaaacaaaaaaaggttcgaaaccaaaataaaactagataaaacaaacctgaattagcagaatgcgatgaacaatcgtcctgggcttccttccagaaactacaatttcacgatctctcactcaacacaagcttacttttttgtgcgtgtgttgagattttggggtttttcttcttaattttcaagaagtggtgtaatagaagaaatactctaattttttttcagaaggttctgaagtcgtcgtttaggtcaaaggcacgtgcgttttatgtaaaagtgtgggttgtagttgatgtgaacaacaaaacggtcaaagaaccgaacccgtccaatcatccaaatttatgtaatacattccactagattatgcctaagatggaacacttattcttataaatataaatgataatacatatttgttttgtttgaggtaattaagaattttgaagaaaaattaaataaaaagctaccactaact

SEQ ID NO: 2484 - DNA, 1485 bp, Cannabis sativa
tcatgatcgtaaattaattaatatatatagtacctggagactagagaaacgggggtgcttgagcagagtatgaaccaaattttgtttggctaaatccaaattaattttgatcttgctacccatgatggctaagatatgaacattaaaatttggttcgttaaaaagacgacctgctggacttactggctcctctaatgaaattttcatatcatctcctctgtttttaacttttgtctcaattggttttagaactactgcttgctgctttctcgatctcataccttcttcaaactccataatataataattatcgatctttcactacaaaaaattaatttatatgtatatttaaacagggggaatattatgttgttacttataattggttgggttccaattatctatggcttatattatatgggtttatctatatgtatatatatatagctaagacatctaatcaatcatgatcgtgggatttattatagaacgatctttcatatcggttatgaggagttttcagaaaattaactattttgactaacactttatcagtttgaacaaccaaaaaataaaaaatttatttgttcaccaataaataatgaaattgtaataaatattactttacagtaaaaatactcgttactttgcattattatttatattttgttttttttttttccaagattaaggaaagtccgtatgacttaaaaaatgaagtaatgaacatggctaagttatattaaacattaacaaaaatatatacattttgaaaagcataaacatatgtatatgcattttaggtaaggtagttggttagatcacgtagagggtgggttgcgtgtaaatgagaaaataaatgttgtcgtacatgttggtcatcatgaaatggttttggaatgaattaatttgttgtttggtgaaattaaattacttaataatggtgttcataaacatagcctggtaactttcttctcacaaaatggaagtcctaaattcaaatttttatcccacaatatatataatgggaagatttaaggtatgacctatacttttgtcctcataccatagggaagtaaaataaaccaatcaaaatatagaaaaaataaaatgtaaatagaatctttttaataagatgtatcagatcatgtccgcactattttattttatttttttattattatttttatttttaaaactttcaatagtttattctaacttatgttagagtaattcatgctgtgtatttttttttttatttatttgcaataaaaaataatttataattacatgcaatttttttttattcaaaaaataaataaataaataaaatatcccaacaaaatattataaataaatttaacaagatttttaagaaaaaatatcgccaaaaaattgttgtagcagttattattgtcagaaaaatcgttggagcaaccattatcactagaataatcaccaaagtaactatcatcgctaaaaaag

SEQ ID NO: 2485 - DNA, 1324 bp, Cannabis sativa
actctatataaaaccccacgaagaaacagatatctaagaaaaactcgctcctcctcctctattcctctctttatcttaggctctgttttctaactttctgaaaaagagcatggctcgaaaactcacattttacccttttatcttactcttctcattagcatttcttattttagcaggtataattattttcttatctattgcataattttccattattgtgcatttacaattatgtttgaccataattatttgtttgtttcggtgtacagagggaggttccatcagtattaattacggtcggattgcgaatgacttaccacaaccatcgaaggtagtggagctattgaaatctcagggaattaaccgaatcaagctctacgacactgactcaactgttctaacagcgttggccaactcaggcataaacgtcgtcgttgctctcccaaatgagcttctctcctctgccgcggctgatcaatccttcaccgacaaatgggtacaagccaacatctctcaataccaccctgcgacgaagatcgaagccattgcagtcggaaacgaagtcttcgtcgaccctaacaacacaaccaaattcctcgtgcccgccatgaaaaaccttcaagcttctctaaaaaagcttaacctcgactcctccataaagctctcctcccccatagcactcagcgctctccaatcatcatacccgtcttcatctggatccttcaaatccgaattggtccagcccgtgatcaaacccatgctggactttttgcgtcaaacagggtcctacctcatggtcaacgcgtacccttttttcgcttacgcagcgaacgcagataaaatctccctagactacgcgctgttccggacaaattcaggcaatgttgattcggggaacgggttgcgttactacagtctgttcgaggctcaactcgatgccgtgttcgcagccatgtcggctttgggatacgacgatgtaaaggttgtcgttactgaaacaggttggccttcgaaaggggacgaaaacgaggttggagctagccagtcaaatgcagcggcgtataacggaaacttagtccgacgtgtccttaccggaaatgggaccccattgaggcccaaggacccacttaacgtttacttattcgctttgtttaacgagaaccagaagcccggtcccacatcggagagaaattatggattgttttaccctaaccagcagaaagtatacgacattccgttaactgccgctgcacttaacggcaaagagacagcgcccgttaacggcagcaaagagcaggttccggccaccggtgacgtgtcaacg

SEQ ID NO: 2486 - DNA, 1871 bp, Cannabis sativa
atatttaggcataagttatcactactttagttctactcacaacaaatattgtaactaaaaacacatttagttacaataaattataatttttgtaaataataccttcagcttttcgatgataatataaaagtaataatttataattagttacaaattttattatggttaaatttttttttcttacaaccttatctaatacaattagataatataatctaagcgctatatagtaataagtggaataaattaaaataaaaaaacaattaaaaagtattataatatatatggtactacatctaaatgcatggtgttaaacacttgagatgatataatatgggtgattatatttaattaatctaatgtttttaattataatatatgttcgatcttaaattcagccataaatatattatgttcaataaatgaaaatatgaattaataaaggcatatgatattgtgggaaagttatgttctacttcaatacaactataatgtcatgtaatttagaaataaaataaaaaactgtaagagatcacaagagtcattatatgtatttgtttcttttaaaataaaaataaagtcattaatattatttatacttaaaaagattacaataattttgagacgtcaatgcttttttctatgtttttatagtaaagctagctaattaaatagagaggaaaggaatttaattaagggtaaaaagggatgataagaaagaatggttatttatttttgtatataataagaagaagtattattacgttctttcacatatatattacataatatgatatatctctcttcatgtccaatcaataaagcaagtccattatattatgttaattaatataaacaaaaaagataagagaaaatcaataaagtagagatcgtaccaaatatgacatgtaaaattatatgtataagatagcaatgatggttgtttcatggacttggtaattattgcattaaaattattgtttattaattgtcccctttgaacaatctacagttttttataataattatgattataattaaatatgaaaataatattttaatttttaataactattaactttttattctccactcaaaaatagtgttacaacttacaagaaatatgagaagaaaaaattggtgttttttttaatgggagacataggtactctttaattaagaagggtttataatctatttatataattattattaaattaaaattgagtaacagtatataaggagtgatgattgcaacattttattataatttcttagtcaatttttacgcttgaaattagataccacaaaaaatattttttataataatattcgtttcagttataatatcatcgctatattttttgaaatatttcaaatagttttacagtactaaaaacagagttcatgatatttttatttatcacatgtgtttaaaaaattttagagttcatgatatttttatttatcacatgtgtttaaaaaaatttaaacttattaagaatgatattataattattattagaaaataaaaaaatatgtatttttttggcaaaaggaggttgaaagtaccacttttcaagattgatatgggaaataatatgtgaaaagaaaaattgtaatgaaatattgattaagaccttaattttctattagaattacacaagtattatgtaattatttgactgaaaaatttatttaaattttgtaataagacattaatgctaaaggaatatagtagcaagtgattggtcgattaagccaactaaaaatacgattaaggtaaatattaatgcttcaattttttacaattaaaagttgtagtgaaaatattttacatgattaagccaacagaatttggagtttttttt

SEQ ID NO: 2487 - DNA, 2789 bp, Cannabis sativa
gtatgcaactgacaactcatatttctcaagtatttcacttttagttgtttgggaagaatatatagtatacttcttcttggtcatcaagatttgggatttaattgttccttttgatttttcgctgcttaaatgtgaatatttattaaaaaaaatcataagaaacaaagattttgactctttcattgatgaaaagttgaaagtgcaaaaattactcgagtttaagtaaatttgatccttgatctcgcaccttcgtatcgtgaaaagaaaaagaaaaagaagaagaaaatgttaaaatgaacacaacagatacaagcaagcctcccgtcactaaatttttatattgtttagtttgatgaactctgtatgaggttcttgttgtttgttttggtttatattttcaggattttgtcatggttggccttaaggcggactctcaagtggtcaaatgtctagcttgtaaaacggtatgaatatgcgatgcttaaccatttactgtcattacttgtattagaaatatcttatttccatatttcataaaagatatgctgtgtaaactctggcagtgtttcaggagctattgtttagaacttcagaactactgttctctctaatttattttttcgaaaagttgtttgaagtgtgttattttagttatattcttcttctgtcaaattttgatcatattactcgtctgcttcatgactgtttctagttcctgtatttgctatgctgcttgaagtgtcattcatagaattgttggaggagttcatcatttgcctgcttcacttcaacaaggaatgtactgaaccagatttgtaaccgagcttagttaatgctctgtttgtttgtttgtttgttattaagaggaatagggttactcatgaaatttcaccatctcttacttcccttgttcatgaatcggtgttacttggcattgataccaaactgctgctcttcctatttatatcagtatgctaagtagtgactttctgatacactcaaatagattaaacagagaaagaaacctggttctctccccctagagcaaagctcatacaaattgatggataccctcacacacccatatatctcttcactcttccttctaacagtatcccctaaatcccaataaaactgttacaacctcctgtgactaagtatcctagtcagccactactcatttattataccgagatggttgatccgtatgggaggtcttatcatatttttttggagattacctagttcactcaacaacaattaatgagtatcatagcacatttggatgaactcatttatttatttacgtttattaattctcaaaaactttctagaccttcctcctaggcattttaaattgataatttaatttgtcaactttctgcaggttacatgcctcctggaacatttaaaggaagaaaatatttttggcgttcagcttataattgaatatggtgtatatccacttctgcttgattgcgtcataaatgggtaaagggtccattgttacttgttgtgttcgcactgtagttcttttattattttctgtttatcttcttgatcaccttttttattgttttttttatgttatctgaaatatttgaggatcacatccacggataagtaaatataactattaaattcttttgccaacaagctattaaactctgtctatccagttgttcggagcacagttttacaatactggtcgatttccaaagaggaaaatgaatttctctctttgcactgaaatattccgtgaaagctcaaaaattgcaaaatatatattagatcagttctccctttgcaatcccttagttgaaaatctaatgaagtgtatttcataatttttgtagcaatgagcaagtgtcgagtgcatcaatggatgcaattaagacattagctggttttccacaaggcaaggtaggaggtgtaacttatatttctagtctaatctctaaatttttgagctgaatatcctttatgatatatcaatgtttgtgttttaaaatttgcttagtgactaatgctatttttcaggagattgtcttcccaactaatatcaatgacgccacacatcttggagtgttagcagcaaagtgctcatccctggtatggtgaatgctgatttctgctttaatctactatatcttgtttgaagcatggtaacatgtttttcgtttgaattagggagagactattaattgctaccacagattgttgttctatctgaaatatattctggtgcaacttgtgtgcataatatgatgagactgttgaatttggcaatagcaatagcaatttcacatgtattgttcataatttgttttttttttcttaacttacggttctcagggacaagtcagagctttagctttgatagtgaagttattctctgtctccagtgatgtggcagcagtaatataccagtcgaatctgcttacactttttgaggacaaaatcaagaatacagatgacatccttgtaacattgagtgttttagagctcttgtatgaggtctgtcttcaattgcctaaaaatttatattaattttacccctcatatatttatttatctatttgaaaaatctgacttcaagttattttctatgaacagcatttatctcttgcattatcttaggacttgggatggtttagtaactagatttttttatggtcaagcatgtggtttggtcttaataagtttgagctttggatctcttctagttacctacatagcatttgttatagtttcctgtttctcaaatattgttgggtttaggtgaggtg

SEQ ID NO: 2488 - DNA, 823 bp, Cannabis sativa
aaattaatatatatttatatagtagtatagtactaataggttcaattagctagagaaaaatttggtaagacatagagtcccgtcggccgagaattataggaaagcaaattaagtaaaacccataacgctgtccagtggtgcccatttccatttgccaactgttaagactataacatatgtccaaacctttacgattctctcattttattgtcctattccattccatctctatttctatttgactattccttgtccctttcttgtttctatttttcttttatttattttttcatattaataataataataacacattaaacgagttggtatgtgtagttaatgtctacactccaacttttttatatttttattattgctaaatattatataaataatgaagttgactaagtgatataagcaccaaaaaaattatatgagatctgaaactgaaacaacctttagtggactcgtaagtcacagtcataatcaactatttgtaagattagtcataatcaattgatccttatttgattttattctcaacatcaaactatgacatcaaaaagttaattttatgataattaataactaacttgattttactcacttaatttttaagcaaaacattaatttttattataaaaaattaaatatcaactagctaaatagaaaaagtacatagatattttatatgataaaaaaatgtaagaagaactttacctttaagactattcttccttgcttatccaataaattaattaataataaagttttcatatagtacactaccatcagacaaggcaaaactatttacatccacaaa

SEQ ID NO: 2489 - DNA, 1747 bp, Cannabis sativa
attactagccaagcctactgacttggtcgatgccatgaccaaagctcagttgtatgaggatcgtcaagaggatattatcagtcggactcgcagtgatggattcaaatccacttcgacacccagatcatcttcatcgagtactcctcttccaggatcaggttcgacacatacatcacccaagttcattacatcgaaccccagtctgccagtgaaatcacctaccccctcattaccagtaaaaaaattgacaccagcggagatcaaggaaaaacgagacaaaggcctctgtttcacttgtcatgagaaataccatgtgggacacaaatgcaagaatcgtgtcttgattttgtgtgcacaagacgaagaagatagagaaggtttgagcgcggaagaaactgattcagatgggtccgagggtgtggcggaggaggtgagtttgaatgcgttatcgaatgtcagtaacccacgcattttttgcatcatcgccaagcacagatccgaggatttggaagtgttaatagacacgggcagcaacaataatttattcaggaggctttggcaactcgtttggctctacctcgctcggaaacgaagaaattcaaagtttatatgggcaacgggaattccctatggtgttcgcaaatatgtatgggtgttgagttatcactgcagggccacaaatttacggtggatctgtttgttctaccaatttggggattagatgttgtattgggaatgcagtggcagcaaacgttgggtccgtaccttcatgaccataaggtattgaccatggaatttcaatgggaaggaaagactgtgaaactggcaggaacctcaagctcagcgactcaacaattgtccttctcccaattgcacactatgatgagggacggagaagtacgtgatatttttatgctgaccactatttcgcaccaggcggttaccaaggatttatcccttcagcagattgacagtaagctgcctcaagaagctcacggaattttgacagaatttcaagatatcttttccgagccaaaatcgttaccaccatataggagttccgaccaccgaatttttctgcaaccgcaatctcagcccataaacgtcaaaccttaccgttacccatatttccaaaaagacatcattgaacgactggtgcgtgagatggaagattgtgggtttgtgaggccaagcactagtccgttctcatccccggtactccttgtcaaaaagaaagatgggtctttgcatttttgcgtggattaccgagccctcaacaacataactatcaaggatcgttttcccattccaacaattgatgagctactagatgaatagagaggtgccacaatattttcaaagctggatcttcgggcaagataccatcaaatacggattgacccaaaagatgttcacaaaatggccttcctaactcatgagggtcactatgagtttttggtcatgccgtttgcgctcactaacgcaccatccacatttcaagcaaccatgaatcggatatttcaacctttacaacgccattgtgttattgtttttttttatgacattcttgtttacagcaaatcaacaatggaacatattgctcatctatgttcgatgttccaactattgagagaccatcggttttttgccaaactcagcaagtgtactttcttccaatccacaattgagtacttgggtcattcggtggcggcagatggcgttagagcggatccatcaaaaatcacag

SEQ ID NO: 2490 - DNA, 1011 bp, Cannabis sativa
ggaaaaaaaaaagaaaaaaaatagcccttttctttaaaaaaaaaaattggaccttaaaaaaatagagaccttgtgcaatggtccaagctgtccaatgtttgggcctgccctgtcaacactcataatcaaaatcaaactacacgatgacaattttgagtaaattgacttgagagtagttttgttaatatgagttttttttttttttttcacaggatatgaaatcgatacgacttcgagaagcatcaagcataacccgatatgaaaaaaaaatatgaatgtagaccgaacatagtacgatattacaaattagcatgacacattatataaaatatgagtttggaaagtattaagcgctaatccttttgggaggattataaggcgggcacaacatgtgagactctttatcaccataatattttttgattcgctgtctttgatcaatgtcttgaaaagccaaacactgtactagaataagttgggggttatcttttctaatattaaaattttgttgtctactttttcgggagcaactctttctcgtgttagttacaattttaatactacgcattgattggttaaacatgtctttaagatagacaaatttttttagatggaaaaaaacctcttcatttatcttgtaactttgttacattttatctattaatctctattagttaagaaaaagcctgggcatgagcatgagcataagcgtaacacgacaaatttgaaggcacgatacataaacacaattatactaactttaaataaacagttataattatttttagtaaaataattttattttgtaggaatttaatgtttataagaatatatatgagggctttttagttgttttagtatataattataaattaaaataaaatatttaatattttaaagtgtaactattttttagtgagtgctgtagctccgatagcctattacctacgtccgtcactgatcaaaattacattaaacattgagaagtgtagagtttcgttaaaatgggaa

SEQ ID NO: 2491 - DNA, 1390 bp, Cannabis sativa
caaacacgttctaatgatcttaaaacattggagcttagtctttcaatgaggaaattgaagttgaaagagacgcagcttgctctcaattttgattccaataatttggaaagaacaaaattagctatgggtgtatcaaaggcatcttttaaagttggaaagttcaagactcaactagaagacgtgagacatgcagaactcctcagaaaatgcatcgaccttctagttgctggcttgatgatcatggtgatatctctcttttatgcaacatatgtttattcataccaaaaaattactgaagccactgcatcatgcaaaccttcagaaacggcaagtaccctacctcctaacttcagtaattgatttgaattgattagattttaactaattttctcattattctcattttatatgcgtagaactttgctgtataaaatgattaccgaccttatggtaaagtagcactggggaatactcaaaaatctcttcttttttttttctgtcttaggcttcgaggtcttggtggattccaaatccaatgtcttcaatcaattcggggatgcacgtactcagttgtcagtttcaagctgttttcagaatgctgtttggaatcttaatgattatttgcattgcatatttactcttgcagcggtcagggtcttcgaaacagacaatgcccgtcactttcatggtcattcttttagcatttgtctgtggttttgtcggcaaggtttgcgtagattcactgggaggaagtggataccattggattctattttgggagatcatctgtctggttcatttcttctgcaatgtctgcacacctactttgttctttttactatatggacctgttaatgcctcacaagaaatgaaagacaaaataaggcttccatattggatccgtagagtcgtattttgggcgactttgcttctgattctaccattgctctgtggtcttatccctttcgcaggcccaagagaatggaaagatcatattctgttgcgaatcaacaattatctgtggggtactgaggattgaagagattcaacatatttatcattataaaatttgttatttgtctctttttagtgtatgcttgtactataaatttccagttgtgttaagccttgtatcaaaactaaaataacgcagcagcatacttgtgtctcttatggtggactagtctaatttataataggaatatgatgtatatcaatttttgtgtactttcttttatcaagctattgtaatttaaatatgatgtatattaactaccacatttaaatgtatatgcttttcgtttggataaagctataatagatttagagttggttggttttttccatctgtttttaattaatttatgaattgtgttaaatgaattttctt

SEQ ID NO: 2492 - DNA, 1298 bp, Cannabis sativa
aaaaaaataaataaataacaaaaacgaaaagaacaacaaaatcttgcatattgatattaagtcacctaagtaatcttcaacactcaagcttgtgataccaattgttttaaacagcagaaaagcacctgagaagttttaaaagtaaacaaaaacagttggattttgaagtaacatcagttaatactgcatggtacttttaagagcgcaagcttgacaaaacaaactagttaagtgtttgagtctaaagatcataccaaatgatattatgcagaaggatattatggtaccgaacacaccaaacaacaatatcgttgagaaattcctaaagaattgcttcttcttgacctggaaactgaaacatgattgtgaaattgtttagcagaaaagtgatcaacagttcaaccttgattacttcttttaaaggatctccagatcctaactcaaatttcatcgaattgcaggattaatgagttctgctaattcgaaatgatatcatagttgacctccaactatggagtattaactacacacacaagaaatcactcagagaaacgaaaaagagtacccagcattgaaaatgattggaggaagcaaatagagaaagaacaagtcctcgctgaatactaacaaacgtgaactctctgacttcctcaccaacagcaccactcctccagtgcacaaaccctaaattttaaccgcatacataaaaaatccatcaaataatcaaaataagccagcaaagcagagcaaggttttggattgaaatcacataaaaacaccaattttgaacacaccaaaagaagagcagtaatggattcgttaagccagcgattctgctcgagaagatggccaatgatgatacagacacaaagaagggcgaagaagatggtgagtgcaataatggtgctgctgctcaaataagaggatgaagacaactgatgaagtggcggtatgggtatggctccgagtaacgtcattgctgctgtttactggaattctcagtaataggctgtaatgaagatataaatgaattcatgaatggaatttctgatgagttagtttgaagattgaaaatttcattttcaagatttttgtgggtgaatttggagggaagaatggtagttgacaccggttcggacttcggacactccacaactatacttgaaatactaatttcgtacgtcatttagcgccacgcgtctttctttcaaaatatacaacttaattggtgtttggatggaagtaatgaatgaaatggaaaaagaatgaaagaatttttatttcattctattatttgg

SEQ ID NO: 2493 - DNA, 1369 bp, Cannabis sativa
gcttgttttattttacagatactaattgtgcatattatatttgataattaattagtataaaagaagtggctttagttgacttgaaaaaaaatgttgaacatttggataaaagagaaactattttaagaaggttattggaacttaataattttattttgggtgggaaagcaaagaaataatatgacattgattttaattatgtgggtctttcgaaatattctcgaaatgtagctccaccaaagatatctttggtctactaatcaatagcataattgtaagaaaagacgaaagaataaaggctctttatgaaaagcataattctacacttcttttctgaggtgggaaaaagcaatttgtttgttactaacattgccttttaagaaataaaaagtaaaaaagatttcggggttattaaaacaaagatgagctaattggctttggctcctctggtaataagaagaattaaggttaggtacataaacattactagactatgagctttattatagtactatttagtattctgtaagtaattgtaacagtgaaaattatcatccaccatctactttaccattttcccaaacaaaatttttgcctcttttaagatgtcgttatacggcagaagtttttgcctctgattatgagggctttcctttttatatataaataagataaaaacaagtgttaatatgcttatgttgtcagtgtccaaagaaaaggaaatgtcaatcgaaatacattttagtattttgaaaagagactaattttccagttgagttgagaatctccataggctagttctcccaattgttatttcttgcttttatgaattatccatggttacgaatttgttttgatcaattaatgatgtttcacaagattcagtttcagataaattgaatttcaacatatgagagattaggaacctctctacaatgatctgttcataatgattttagccaaatctgaccctacaatatcaatatgcattcaaattaacactgaattcaccacattagtttggcaaattggtataaaaattttatgtaatgagaccatattagggtacgtatataacacagaccgtcttcttccaaaacctcagcaccttccaatatcattttcctactaataaaatttgtgtactgattaagagtggagtacaacagttaacaaattcagtgtgtcctggatgtcatatctgggtaaataggctattttgaaaatgaaaaaaagttttaaggtcaatcctttggtggagagagttcattatcaattccactcagatatgacaacttgagctactctgtgagcgggaaggtattaaagtatggcacaaacatcaattaatagccacaccacataaaga

SEQ ID NO: 2494 - DNA, 2772 bp, Cannabis sativa
agaccagtaatcttcaagagagtgtcgtagagaaggggttgagtgacatcaatagagacacaaacacgcatgaaaggcccccatccttcctccaaggagtcgtcatcaacctccaaaaattccccaacaatcgacccaatgatattcgccataacctcagttttgctgagaaaaggcaaaccatgaacttgaatccagaaagggatgtgggtgaaatcagaggtagcaggagtagacagaggaggaactgaatgaaaaataattggctgattattgaaatgccatggttgacgatacagaatgcgttgcatatctccagagcatccaaattgaacaaggaagtaaccttcacgacgagcagttatggtcacagggaaccgaaatgcccacaaacccgacatctgattaataaacccatcttcattaaccttcctatgggttaacacaaaggcaaaaacaacaaaatgaggagcagtagatgtagcaacagtacttgatttaccaatttcatggaccactctttctttgtcagtgagaacaaacttggtggagagattctttagcatattttccgtggtaccaaatttagagtagttgtgcaacagagcacatcaaaccctaaataaagagggaagcgataagagggaaatcgtgatggaggagaggtagatcatggtggtcatggtcggatagaatggatgtgaaaatggatagagatcgtgtaagaggttaattagtggggatgaaaacctagaaaaaagaagaaatgaaaaaaaaaaaaacggtaatcaccacagagcacaagatgggcggatgctcgtctccaatattttaagttaataattggtaaaaaatgattgtacattttgacaactataaatattgcccacgaaagagatgctctttgtttttttttttaaaaaatgctcttatacatttataagggtgttaggcacgtgatgcctttctcttatctcataactacacttctgttctgtttagcaaacaaaatttcgaacgtagtgtaaaagtgattctttctcccttcatattatacgcagtagtattcaaagctctcggctatggcggcctctgctctactaatggaccacaagcctttggagccaccggcatctttcccgtcgacgagagctgacccacgtctctccgaacagtaccagtcctccgacgaggacgatctctacagtcgccagaaatcactgcaacgccagctcgagttcatcgacatccaggaggagtacgtcaaggacgaacagaagaatctcaagcgagaactccttcgggcccaagaagaggtaaagaggatccagtcggttcccctcgtcattggtcagttcatggaaatggttgatcagaataatgggatagtgggctcaaccaccggctccaattactacgtcaggattctcagcaccatcaatcgggagcttctcaagccctctgcctctgttgctttgcatcgccactcgaatgcccttgtcgacgttcttcctcctgaggccgactccagtatttcccttctcagccagtcagagaagcccgatgtcacctattctgtaagcccgattccttttttgttgacattgattctactaggctttgcagaaaatcgaatttaggggttgtctttcaagcgatctacctaacatctttgatctgaaagatattcaaatttagggttttcaaattcgtgcaccgtaccataattttgctatcatttgtttcaagcgttttaacaacaatatcatttctaaagtacaattagtttaaagattttatttttgatgttagtggcaatccaagttggggcaaattgaattccattttattacaatggatttcaaggcatatatatatgtgtatatatatttatcaccaagctctttctcccgagctcctcatgatttagttgtaatatggatttagaaagaaaaaaggtcatgtcctagtgagcccctagcttgttgaaattagtggtgatctgaattttggatttctaaattagttcaaagattcttattctcacttagtttttaggaatccaaaatttgatttctagaccaaaattcattatttcgggcatttcttgggatgttctttttgttcgattgtgcaccttgtatgatgttattactattatttctgctcagatgggatatgcagtgaactgattgttatatgataattgattatgaaaaggcacattcatgaattagtgatgagtttatttctaattgaatttgttattgatgaaggatatatctccattgcattttactttcattttatgagtgccattttatttctacgtatcatttatttatcttttgctaccttcccttaagacatttggtctcattactgtttgaatgatgctgaggttttttttttttgttgttgggtgcgctaggatattggtggatgtgatattcagaagcaagaaatccgtgaagcagtggaactaccgcttactcaccatgagctctacaaacaaattggtatagatcctccccgtggtgttttgctctacggcccccctggtacgggtaaaactatgttggccaaggctgttgctaatcacaccactgctgccttcatcagagttgttggttcagagtttgtccagaagtatttgggtgaggtatggtgtatatacttggatcttgttttcaacatttttgagttgcctcttcattacctttttaatgttcgagaacatgtttttatcattattttcaaagaaataaatgt

SEQ ID NO: 2495 - DNA, 1638 bp, Cannabis sativa
ctctctctctctctctcatcacattgtgagttagtcggtttagtttatactggggtttgagtctcaacattttctttatggggaagttttggtaattggacattttaaaagattttttcccaagttcacttcctgggttttaagttctggcactttccgtatttttctttgctttctattgagctttctagatttgcttatccttatggtgagtaagaaaacaaaagaatgagagaaagacacattgctcattgttatgactccacccaaaatattataaaaacacactgtttataagttaatattttggtattgtatccaaacactgtctgtgatgctattggcttatggtattttgctttgttttacttcagtggtaatcatgcatgtccatgttatggtttgacttctatttttacttcgacaatctagttcttacatagttgttttggaaaggaatttctgctaacctacaacgttattgttttgtttcagtcggttcttacaatatagggaccctcgtgctcaaaggcggcaccctctggttgatcctgttgttgtttctgagattagaagatgtcttgtggaaggaattgaattccagggtgagctccttaatttcaggaaggatggcacacccctagttaatagactaagacttgcacctatacatgatgacgacggaatcgtgacacatgtgataggtattcaggtttttgcagaagcgaaaatagatctgaaccgcctatcatatccagttttcaaagaaacttgtagtcagcagtttaatcagtcagggaagtatccttgtattactggagaatcaccaatcaaccaagaacaacaaatctgtggtattcttcagctttcagatgaagtcttagctcacaatatcttgtctcgtttgacaccaagggatgttgcatccattggttctgtctgcagaaggattcgtcagctcacgaaaaatgagcatgtgaggaagatggtatgtcaaaatgcatgggggagagaggtcactggtacattggaactgatgacaaagaaattaggatgggggcgccttgctcgggaattgacaactcttgaggctgtatgttggagaaaatttacagttggaggtgcagtagagccgtcacgatgtaatttcagtgcttgtgctgctggcaatcggcttgtattgtttggaggtgaaggagttaatatgcagccaatggatgacacatttgttctcaatcttgatgctgcaaatccagaatggcgtcgagtgagtgtaggatcatccccaccaggtcgttggggtcacactctctcgtgtttgaatggttcctggttagtagtctttggagggtgcgggcgtcagggattgctcaatgatgtctttgttctcgacttggatgccaaacagccaacatggacagaagttttcggtggaactccccctcttccgagatcctggcatagttcttgcacgattgaaggttcaaaattagttgtttcaggtggatgcacagatgctggagtacttctaagcgatacatacttgttggatctcactacggacaagcctacatggagagaaattccaacttcatgggcacctccatctcggttagggcactcactttcagtttatgg

SEQ ID NO: 2496 - DNA, 2478 bp, Cannabis sativa
atcaatttataaaactataaataattttaaccagttaaaaaattcaggagtcacacaataaacatataacataattcggggcaaaaattctaaataaacttttatgtaatattgaatgttctttttcttttacattgttattttgtaacctaacaaaaaaaaatactagattcactcttaacaaaaaaatattgatcttttatagatcaatattgtttttagttcaactaagtatcgagtatcgtataatttaatataataatttttaaaaagtatagctagccaataacactagacaccactactactgatgcccaatagcaatcctcgtaagtaattgggtgtaaaatatactaaattcaattgggtgttaattgtaggttttgtttggtatcttatcttatcttgcactggaactggcttaaacgtgtaaccaaacaacccctttcctatataaactcaaaacacacacaaccaaacaacccaacaaaccaaccaaccaaacaactcctctttccctttcccaccatggatccgccgcagccgccaccacaagcagctccggcgtcgaccctaccgccggcgccgcctccttcatcaacttccttctctcaccatctcagttacccagactcagtcgactcatcacctaggtcacgaaacacagattcatgggacgaacagcttcctcaaacctcaactcgacttcgcttgatgtgtagctatggcggacacatcgtacctagaccacacgataagtctctctgttacgtcggcggtgatactcggatcgttgttgttgataggaatacttctctttctgaactatctaatcggctttcgaagactcttcttaacgggagatcttttactcttaagtatcagcttcctagtgaagatctcgattcgcttatatctgttactacggatgaagaccttgataatatgatcgatgagtatgatcgtacggtttcggcatctgcgaaaccctcgaggcttcgtttgtttctgtttgcttctaagcctgaatcgtctcagtcgattggtccgattcttgataatccggcgaaatctgaggattggtttcttaatgcgcttaatggtgcagctggtggattgcttaatagagggttttcggattctgcttctgttaattgtttgcttggtcttgatgatgacgtcatggccggtggtggtggtgtggttggtaatctcgattcggctgctgcggcggcggcggcggctgctcagccgggtggatttgggaatgggaaaggtgggaaggtagttgttggagggaatcaagatgttcattctgttccagattcgcctatgcttgaaactacctcttcttttgggtctacttcttcgtctccttcgcttgcgaatttgcctcctattcgggtacatatggaggagggtggtggggttaggatggttcaggatcataaggttgggatcgaggagcaatttgctcaaatgagtatggctcaagctggtcttaaacaagaagagggtggctttgctatgatatcttcaccaccgccgccacctttatccggtactgttcaattgccagtgagttcctcggctgttggtgttgattactcttcaggaaatcgggttgtctctgatgacgaaagatcagatcatggagtgcctattgggtaccagaagcagcctgcgcctcaacaatctcagcctcctcaatcacaacaacaaaagtctactggtgttcatgatttgccttctcctgattcagtttcaaggtataaaattatgctaaaagcttagatctttagtggttagattttggttttgtgtttattgaatgttttttatttatgatgcagtgataatagtattggaaatgcattgtctcgacctaaacctgtaatctatcaagaccaagttcagttttcaggaaccacaagggttgttccaggaaaccctgttgatcctaaagttaatatttctgatcagaacactcgggtacaaattcaacaacaggttcaggattctgggtatgtgttgcaagctcaatatgagttgcaacaacaacaacatcagcaacaacaacttcaacaccagcaacttcaacagcaacaacatcagcaacttcaacaacaacatcatcagcaacagcagcaacaacaacatcagcaacttcagcaacaacatcaacttcaacaacaacagcagcagcagcaatttgttcaagctggaggacattactaccaccctcatccttctgggactgtgcccatctcggcttactacccggtatatccttcccagcagcaacatcatccacaggttgatcagcaacagcagtaccctgtttactatgtccctgcaagacaggctcaagcttacaacaacttgtctgttcaacaatccaatataagtgaagcttctactgttatccctcaaacacatcccaatcccgccatggttgctactccaacagctgctgca

SEQ ID NO: 2497 - DNA, 3558 bp, Cannabis sativa
cattttaaacaagtgagattaatttacaaatcaactattgttattaattaatttatctactatgtataatataataagtacaaagaatcacatacaaggattggagacagttgctttgctttggtacctcaactgtcatcaactaccacattcattcattaattaagctgtttatataaatatatataaatggtgggcaagttgatgatggaatttccatcacgggggctaaatatatttatgtctagtgtagtcctcatgaagtggtagggcatcactttaaaaattgttctgactctctgacatttattttttttatatatatataattcaattaatcccaaaaaatattggtggtacctgaaaaagaaaaagaaaaagaaaaagaaaagaaaaacttaataatattaagtgagaaccagtcaagtcaagatttcccaaaatcttatttccaatataatatatattttctttttagataattgagactctcacactttcttgcatgccacttattacttttttctttttttctatatatatatatatgtccaactccaactacccatttaatatgttaattagacactttaaaatatccaatatgataagaagtggcgttatttttattgtatttattaaattaaaatatataagatcctatatttcttattttggttttataaaaaaaaaacatgaaaattaaatatggtttgattttgagttaataataagaatgaatttggggattaatagtactggtgaggttgggtacgtagagatggattggaaggtgtacgtagtcataactaattattcactatttatatatatagttatatatatatattatgttatattacgtggtgacatgcaggaatgacgtgtcaagtcatggatggaagtaatgtcatttcccaaaatcttaacaatatatttaattcatacgtggatacatgtctctctgacctgtccactttttatttttattaataatatctatatatactactacaactgcccaaacaataccctatatcaccacctatacataatcaaacatatatatatatatatatatatttacacatatggatttattgaaaatatccactacaataataagcatattttatataagtatcttagttataaactatagttagttggatatattatctaacaaattggacggcagcagcataatatataaagattttaaaaaaggataatatatataatttataaagatataattaaagaaaaagagttattttcatgcatatatatgcactttttatctcatctttatactttatattatacatgaatataaatgtgaatatatattataatatattaggtcgatatgcataaatattataaatatatatatccggtttgtaaatttgaaacataataataattaatatatataattgtagtgaggatcgaacaaaatcgaagattcatttggatggatctatatatgtttatatatataattcgttatccattccaaacatatatattaatctatatattaatgttaattaaacttgtatccaaaagctcgatccttctcaaatatttatttttcaaactttttgactttcatgaaagatatcatatatatatatttaatctttatatatatgtaccacttttaataaagtgttattattatattatttattgtaatcaactatttttttttctttaaagtaaaaacaaattaattgtatgaaaatgtaatgtatatatgaatttttgtctttaattggtgaatatacgagtacatataggtgggttaatctatatatatatatataaatataattgtgatcacgtaaagaagaagtattatataattataagtagaaatataaagatgattgtttatttgttggagtggaagtgggagagagtctggttaatattaatttgatcgttaggtgcttttcttgagatacaattaacaaattgaatatttattaaaaaaataaaaaagaaaaagaaagcaaagaaaacaaaaaggaaaagaaaaagaaagtgtaatttgttgttggttaataaaataataataataataataataataatatatggttggatgatcaatttgatttgtaatgttgcctttcggaaagtgttaacactttttatgtttgtatagatagatatataaattggaatatcctttcctttacttgatcatattatatatatggccgtaaaattagactatatatatatatttcactctcactcttaattaatattatgaattaattatatatggataatgtagttaattaattatttatttatctaaagtagagtaaaatttaaaataaataaaatagaaaagaaatggaatggaatattagaatggtttgttaggacacacctacctagctaccaattattttatgaaaaatatttatttttgatttgaagaatattgaattgtatgagtgagtgaatagtgttatcaaaggaaagggatggtaataaatgggtctgttctctatgtgtgtgtgtgtgtctaatgcgtactggtgtggtgtgtgtgaggacataaacattttcacttttctcttttttcttttttccttttttctttctttggtttggtttggtttggtttggttgggttgggattttgggacccactaccaatatgtacggggtgggagtgagtaagtgttgagtgatctcatctctcagtgtttgttggtgttacttatatatatataaaccaagctaagctaagctaatgcttaaccaaatctcataatatttcatattccattccatttactctgtttcttcttgttgttaaatatttgttaaaacacaaaagagaagaaattaaggaataataatgaagtatgttttggtaacgggtggagtggtgagtggtcttggcaaaggagtcactgctagcagcattggtctccttctcaaggcctgtggacttcgtgtaacttccattaaaattggtattcaatatcatcatcaccatcttcttctttttctttttttcttttttgttttgaatatgaaaatgaaaatgaaaatggaaatgaaaatgagttgtttgtttgtttgtttgatatgatcagatccttacttaaacacagatgctggaaccatgtccccttttgaacacggagaagtgtttgtgttagacgatggtggtgaggtaagaaaataaccaactctacatatatatatgttcatcatcatcatttgattgatcaattaattactatgatttgattttgttcaggtggacttagaccttggaaactacgaacggttcttagatataaaactgacccgtgataataacatcacaactggcaagatttaccagtcagttattgatagagagagaaagggagattacctgggaaaaactgtacaggttgttcctcatatcacagatgcaatccaagattggattgagagagctgcacagattccagtagcagatgatgaggatgataatggagccccggctgatgtttgtgtgatagaactgggtggtac

SEQ ID NO: 2498 - DNA, 1372 bp, Cannabis sativa
cttcaaagacttaaggctcggttggttgcaaagggatttcatcaaagggcaggcctagactatggtgaaactttcagtccagttgtgaaagcttccactgtaagaatcatcttaactattgctgtctctaaaggttggaaaatcaagcaattggacattaacaatgccttcttgaatggcaatctagaagaggatgtgtacatgtgtcaacctgaaggttatgttgatcctgaaaaacctgactatgtgtgcaagttgcacaaatccttatacggtctcaaacaagctccaagagcctggtttgacaggctcaagagtactcttgttgcttggaagtttcaaaattccaaagctgatacatcactatttttctacatcagcaacaatgttatcattcttgttttaatatatgtggatgatatcattgtcacaggaaacaacaatactcatctcgacagatttgttcagcaactcaacaaatgctttactctcaaagatcttggggaccttcactacttccttggtattgaagtgttcagagatgagacaggcatgtttctcacccaaaccaaatatgttgaagatctgttgaaaaagcataacatgattcatctgaagcctagtccaactcccatcacaactggaaagtctctatccgtttctgatggcaaagaaatggaaaatccaacaacttacaggagcctcattggagccttacaatacctgtgccacactcgaccagatatcagctatgctgtaaattctcttagccaattccttaagtcaccatcaattactcactggaatgctgctaagagaattctaaggtatttaaagggaacaagcacacaaggccttcacatctgctgcagcaacagtttgaacattactggcttttctgatgcagattgggctagtaatgtagatgatagaagatctgttggaggctactgtgtgtatttaggtgatactttggtgtcctggtcatctaaaaagcaaggagttgtctctagatccagcacagaatcggagtatagagcacttgctcaagtaagtgctgaaataacttggatcgaatctctactcaaagaaattaaatttccactgcctgctgttcctattacttggtgcgataacttaagtgcaagtgctcttgcctcaaacccagtgtaccatgctcgaacaaaacatatcgaattggacattcactatgtgagagataaggttctaaacaaagctctggagatcagatatgttccctcagcagatcaaattgctgattgcatgacaaagggtctgtcacattctcgttttcagtatctggtgtgcaaactcggagtgaagattacaccctctcgtttgaggggtggtg

SEQ ID NO: 2499 - DNA, 2436 bp, Cannabis sativa
agcagcaactgatcccaaatggttacaagctatggatcatgagatcattgctcctgaagaaaaccatacatggatcattgttacattacctgcaggaaaacacccgattggatgcaagtgggtttataaaatcaaattaaattcagatggcacagttgaagggtttaaagcaagattggtggccaagggctatactcagcaagaaggaatagattatacagaaacatttgctcctgttgcaaagttagtttctgttaagctaatcttagctcttgcagcaatgcatcattggcatcttcaacaacttgatgtcaataatgcattccttcatggggatttgcatgaggagatttatatgactttacccgaggggtacagtcctaaggaggagactctacctgtcaatccagtttgtaaactcaagaaatccttgtatgggttacaacaagcttcaaggcaatggtttgctaagttttcaagtgccttgcttgaagaaggttttacacattctgcaacagatcactccctcttcatacaacattcctctaatcattttatggcattgcttgtctatgttaatgatgtcatcatagcaagtaatgatcttgcagccattcaatctctcactgtcagacttaatggcagatttaaactgaaagacttggggagtttgaggtattttttagggattgaagttgcaagaactaatgaaggaatattcatctctcaaagaccatatgctcttcaaattcttgaagactttggaaaacttggatccaaacccgtgactacccctatggaaccaaaccagaaattgcatcaggaatcaggagagctcttggatagttctcaaagttacagaaaaattattggcaagcttcaatatttgacaataaccagaccagatctttcctactctgtcaacaagcttagtcagtatctcaacagtccaagaactctccatatgaaggctgcagaaagaatattgcagtatgtgaaaagttgtcctggtttggggttattttttcctgcagaaaacgatgtgcagcttagggcatacactgatgctgattggggagcatgccaagactcaaggagatcgactacaggctactgtgttttcattggtaaatctctgatatcttggaaaagcaaaaagcagcacaccgtttccagatcatctgccgaggccgaatacagagccatggcaacagcagtttgtgaagttgtttggctcatttctgttctaaaagaattaggacagagtcatggcaaatctgttgaactgttttgtgacaatcaagctgcattacacattggggctaaccctgtgtaccatgagagaactaagcatatagaaattgattgccatttagttagagaaaagatacaatctggtttgattaagacagctcatgttgcttccaaagaacaagttgctgacatccttacttaaggcattgtttcctaaccaattcaactacttaaaggacaaattgcaaaatatctttactccatcttgagggggagttttagagttagttggagttagttaggatgagctgtcaaaaatctgttttgttagttgttattgtatctgttttgccatgtgtatataaaggcctcaattgtactgtttcactattcaatgaaaattctgttgaatcaattttctttctctcttttattttcttttctttgttttctgaaatggtatcagagccgtaaggcttttcttcttcttccgcatttttttctactctgtttctttcctgttcatctctttccaccatggttcaaacacgaagtggagctgttatagaagaaggtcagcattcaagtgatcaacctggcaataatcaaactcatgatcaggtctctcgtggatacaaggatgaagcttggaatccctattacctcagtaacagtgatcatccgagctccactcttgttcccaagatcttgacagggggagaaaactacaattcttggaagcgtgccatgagtgttgcccttcttgccagaaataagatgaagtttgtcaatggacaattgcctgaaccaactcctgatcacgaagactatgatgcgtggaatcgatgtaacaacctggttatttcttggatatttcatgctgtttcttctgatattggggagagcataatgtatatggataatgcagcaactatctgggcagaactccatgaaagatttcaacagaacaatggacctcaggtgtttgaggtgaagagggctcttcaagttcttgttcaaggtagtgccaacatccagggttatttcacgaaattaaagggtctctgggatatgattcgtgactttcgacctctacctgtttgtacatgtggggctatgaagattgtacaggcatatcaagaacaagatcgggtgttagaatttttagttggtctgaatgaa

SEQ ID NO: 2500 - DNA, 3181 bp, Cannabis sativa
ataatgtgattttcatatccacaaataagtaaatgtagatttttttttcttgaaaggaaggttatattattgttatagaaagaaaaaaataaaaaaaaaatgtagaaagagaaatgcttatatttagtatgaacaggaaaattatattgaaaaaaaaaaaatttaattaatgaaaaaatttgactttttttttattctccatgttttctttttcccaccatttttcttgctttttttctccatcaccaaaaccgaacatagacaaagtaaatgcagattcagagtgtatatacagtgacaattaattgcaatttgcacccatatacataaaaatgaaatgcaacttatttattagagcattaccatattatggtctctatacttaactgatctaaattacatgaaactaattcctttattcaccaaaatatcttctgaaaaaatttcttcatccgtagcttgacagtcttgcccccttctatcctcaacatctttggaactcaagaagcttggctggttggttgaagatagaagcctagcccacattctatcagttattaccacattgttttgtctctcagtgattctctgcaaatgaaatgattaatatgagataactacagtcaatgaaccaaaattgaaaaagttctgtaaacaaatattgaagtaagtggatataaagttttgtaataaaaactaaaagacatgaactcacatagaaaggaatgtaagaatgtcttccattgacaggcccaactgtaaaaccagtgtaacctgccattgctccatgaacagcactttgagcaagaagtgtgcagtaaacattatcagaggcattgctaggaacagctcggatcatgtacgtagggtctgccaacataaagtgcaaataatcaagctcttaacaagacaactctactcattctcaacttctgcaaaattttacttttatgaccaattcacaaacctatgtatttgaggtttatagccatcttctttagtttagcaaaatgatcctgcaaaaagggcattaatttcttttgttaatagagctaagcaaacaaaaccaaaccactagatcaaattggttattagaagccaaaccttgattttctgggaaatccataggccaacgtccttgagaagcttgttgcctgaagcatcctctttctctgtgggaatgctttcagagagaagctcttgcccagctccttctgctatgacaagaaccaaatgcccattttctttgagtcgtttttcgatgtattcaaaaagtccaccagggccttcaagatagaagggtgattctggtatcaagcaacaatctacatctcggcttgcaagagttgcatacatagctataaaccctgcattgtagcaccaacataagtattagttagtcctgtttgaaatatttgacttagaataaaaactaagacttaagttgaaggtttacttaccactgtaacggcccattaacttcacaacaccaatgccattctcaatgctacatgcttcaacatgtgctgcattaattgcacgttgagcctcctcaacagcagtgtcaaacccaaaagacctgtctataacctgtctcatcaacaaaacaacaatcaatccattattttacagtgacaacaggtaagcaagcaagaaaatcttaccggaatatcattatcgatggttttcggaatccctgcaactgaaactttaagaccacgccttttgatttcctgtacagtagtacacaacatttatgcttactttcaatatcagattattcggataaagatgatggaatcagttctttgttcttttttctaaatatgttcaatttatgacacacatattctgaaaatatataattacctcaaatattacagatgctcccctctgtgttccatctcctccaattatataaacctgggaaaataaattgccaaacgaaaattaacatgcgaagcttatcatcacagtcacactgtttgagcttttagaggccttgaactacaaacctgattaattcctcgatcttgaatgctgtcaacaatttttgaggtatcatggccacctcgagatgtgccaagaatagttcctccacgtttatgaatatcattcactatcttaggatttaaggatatagtatttcgagcatagaagcctctgtatcctccctacacaattttatatatatattatgttatttttgagataataaagaagatatacgtagaaaaagaagggggagattagattaatgacttacatcaataccctcgacttttttgactccatacatgtaatgcagcccacaaacgatttctctaatgacagtgttgagaccaggacatagacccccacatgtgactatacaagcatgaacctcatccgattcaaaccaaaccttaaacaacaaacaacaccaaataatcactcttttaactgaatgttgtttcattaattaaactcttaatttcttcttccaacaaacgttaatcacataccttttgacggggtcccgctcgccggaaatgtattccttttggactctttttgtgcacaacaatctattgtggcaaaaaacacaaagcacaattaagtcaaactcacaagccaaaacataaaagaagaataagaagatgatgaagaaaaagctgaccttttgagtaacagtatcatcttcattcacaaagtattgcctggaaaatcaaagcccattccaccaattgtcagtgtcaaacgaaatctctacatataattgaaataaataaaaaaaaaatatgaaaattcagagaaaggaaaattagaaaatacttcacaacagagtatgccggattgtcttgcaattgatttgaatgggtctgtcacacatcaaatattgtcatattgttattatttaattaaaaaaaatcaaagaaagaatactaatttgcttaaataacaaaaaagttgacttttttaatctttttagttaaacacaagaagagcttttgtattaacccagcataaaatgaaaaaaaaaaaagtttagatagaaagtggcgtacaggaagatcggggatataatcagaaaaatgaggcacatcttcaagtacataacctccttcaccaaccacaaccttgtgcttctgatcaataactgaattagaccccatccggacccgacaaaacccgacccgga

SEQ ID NO: 2501 - DNA, 1267 bp, Cannabis sativa
acttgcatgctttttcattcgcaagctatcttggtgtcaaagctgctgaggcagatagcaaatgcttgaaaagctgatattgggtatcggtaatccatggtaaataagtctttctcaacttttccaaactggaggatgatcttctcatgttccggccctggagttccattctctggagaggccaccaattgaaagtttttcactgaagcaactgttactcgtccgtgaaagttcaagcaccaacactggagctgctcgtgccatctaggagacttattctttaataccataactccatctttttgactggccataggccctgatgtgaaattttctacgtgattggattttgaacggaaaaatgagagtgaaggaaaggaatctgaactgctaacggaaaaatcactctgcgtgggggcgacaccaccaggctcaattgcagaggaaggaatggcgttcatgatacactgcattctccttggacccctacttgtaatcaatgtagagaagctactttaacatctagtttaagatagtagtatattgttgcaaaactttaactcttacctagaacccaacacatttaactcgtatgatatgtgagccacagggtagttgcctgcaggaactcgaggtgacacttgtttcaaattcaccagcctagtggagcgactcttcgaaatcttagctcctgcatgaggaggctgcccatcaaagattgtaaacttggtccccagaaaatttgacctatataaaggcaaatgagaaaacatcaaataatagctgcaaatggtactatgaatcaaaaagagtgatatatctatgcttattgcacaccttagtttcccaatgtatgcactgcttccctttgacatgtcatcaccatgcagcgagatgacataatctgtgcaagtggcacgcctacacttgcgggcggcaaggagaaattttccatcgtcagctagtgctgccatgaaagcaagccaagatagaagttaatatcttcatggttcaaacgacaaaatagtatatccgatacatagcctatacacattatgagcttcaaaattcagaaattaagatagcaaatgatcaccattagtcagactgagaaaaaggagataagtttgggtagaacggattcgttttataaagcatttgacaagacaatccctcggaccaggctgcaagagaaaaagattaagaaaaaaaaaacttgattagagaaaatgagaaaagaaattatggttccataacaaacaagtaa

SEQ ID NO: 2502 - DNA, 661 bp, Cannabis sativa
gagagagagagagagagttgatattttatttgtgggtggttgattacttgattttatcatacgcgttattgttttttaattatttcttttgaaattaatatggtaagatcgatataggcaatttaatttccatatatacgtctttcttctctgatggacatgatacaatccatcattgttggacttgaaatacttaaaaaaatttaataacactatatatgttggacttgaagaaagagacatggaaaaggttatttgcatattttagtatatggcatattttgtggtgtacgctgcctttaatctatatatatatatatacatataaatacagttatagctaaataaagaaaaagagttgatcttactggtccaagatattttatgcactgaagattaagcacagttcttgggcatttctcaagagtgacttctttcccatctccaacgtccaaccttcattgttgtttgatcaaattattaattagaacaagaagaaatattgttgagagctcttgggtcaagtacttttacataccaatagaagaaaggttgagaactcttgctttcaaaccaagcattataatatatgtgtagattgtgtccataacgatgacgtggatcaatctgtgcacagcaagtatatagttgatataaatat

SEQ ID NO: 2503 - DNA, 1090 bp, Cannabis sativa
aatattttaatataaataataaaatataatatttctttctaacaaataaaatataaactgaaaacgatatatattagttaaaatcaatggtatgattatttttttttaaagtaaatactatatattattttaaaataataataaataaataaaatatacatatacatataattgtgatcttatatatattaacataataaatacagatacttaaacaaaatttatcatattcttttatatatgttttgatttaaaatatttgttaaagttttaaattaaaattaggaaaataacattgaatcaccaatgaatataattaacaccatttagaaatgaaaatagcggtcaccaaaattcataaacatgaaattttatttttgcctgcattgtttgttattggcccctcttaacatttaatcttggcctcacccctggatagggtccacacagtctggacaggcatcacaggcgggtactgctacagtagacaaagaggttaaacaggcactgttggacaaagagaatatattccttttggtaatgcgcgtactaccatgttctgacataggagacaagatctaattttgtaggaccaggcatcagagagtagccacgtccctttgaaaggacttctggaggcgcctcttgaaattcctctcctagcgtgccccaatgttcaccggagggttttgcctattccgtcggattcaggcaagtctcatccttagaagcgagacttctgggcttcaagtgggcttgggcctaactctcgtatggattgggccttcttgcgtggaagggctttggccgaggcgatttctgcttgatcattatctagaaatactactcgttatccttttgaaaacatggataagagtgtgcaagaagtatttcggtaaataagacaaaaaaaagaggtacaaaaattgtccaacccgtgtagaggtaaaagtgtaataaaagttactttttttttgttattattttttatgtaatttttcttattgtaatttgataaatggtaattttttttaaaaaaatgaacataaaagaatctaaaagaaagaagaaaattaaaatataattggaa

SEQ ID NO: 2504 - DNA, 1693 bp, Cannabis sativa
gccattgatgttgaatttgtaagtggcagtggtgagacaattcatgaccaaagaaggaaatttggcaggaaatccaaattctagcatgattttattaatgaaaggccactccactctatcaaacgctttgtccatgtcaagctttaccaccatccaactacttttttctgttttcctccctttgatggcatgcagaagctcttgagccataagaatattgtcagaaataagccttcctttaaagaaggcgctctgatttggggagatcaaggggttgaggactcgtttgattatattagctaggattttcgaaacaattttatcaatagtggtgcaaatgctaataggcctaaaatcggagagggttgagggtgttttgaattttgggatcagggtgatgagcattgtgttgaaataggagaaattaactccatgattaaggatactcaacactacatcagtaacagtattgcctactacattccaattattctgataaaactggttattgaagccatcagttccaggggctttgtgggccatgtagaatagtaacttcattaggggagaaagcctgatcaagaaattgacgctgataagggttaagctaggtagtaattctagtaatggcctgatctataacactgtggcatgggctttgtgatgtgaagagatcagtgaaatatttttcaatttcaaaaagaatatcatccgcattatccacttttaaaccattttcaagaaaaagatgattacttcgattagtatttctcctattagaagcaaatctatggaaaaagtgagtgttcttctctccagcctggagccaattaactctagaacgttgcttccagtaggtttcttccttggcaaaaaggctatccaattgagattggagttttataattttgaggaaagaagcctcaaaatgatcgagagagtaactagcctgttcaagattcttatgggcttgggcaattttctttgggaaccccaagaaagacttatgcttccatttacacaagtggtcaacacaagaatcctggatggaagcaaggtgttggatgggggaatcggtaatcttagagtgattccaagctttgaatataacctcatcctaaataggctcagtgagccagatattttaaaaaaggaagcacctgttctttgggggttgattgcctttaaagggcagggcatcagacttcagtaggatggctctatggtcaaagataaaagatttagatggttgaggaaagcattaggatatagtatagactagtaattgttggcaagagcccaatctaatctttcttaaacattgttatggccaaaattgttattattccatgtcaaacaaggcccttagaactcaagggcttcaacctgaaatttatcaataaaatccttaagcgagtctaaaagcccatttctatagttaccattactcttatcatccccagtcaaaaagctattaaaatcccccataagaagcaaaggtaaggaaaaataagagagccctattctataaaaaatttgccaagtgtggtggtgatttgtagggaaaggtgcactttaaaaaccagtgaagttaaaaccaagaaaattgacaccagagacataacaatgaacatgattagtagaaaagttagttataagtacatcaatgttcgaattctaaaacaggaggccc

SEQ ID NO: 2505 - DNA, 1859 bp, Cannabis sativa
aaccttcatttggcatgataaatgaaatttgcctcaaaaaaaaaaaatttaaatatcatgatcataactgaggttgagatattcttcattattagttttatttcagttactagtattaaatatcttattttttaaaagaaaaaatttgttgggaaatcaacggaaaaaactaattaagcattaattaaccgatcatatttttataaattttggttgataactgatgatataattattaattaagcattaattaacttgatcattttttttttcttatattttacctaaattaatgaagaaaaaaaacaaatatctacttattaaggaaaagaaaaacatcattaaaaaaaacctattccatattctaaaatttctccaataggatttatatattttctcttttttttcttaaacatttttaataaaaaataaaataaaaaaatcatttaaacatttctctaattataaattatttttctctaatgtatcatttttaatgaagtttataatcttcttttataaatttatataaagtgtggttatgtaacaaaattattagtttaaagattattttttttaacattttttttcttttaataaaaactaacggaagattaatgtctccattaactttcatctacctctaaaatccatcatatatattattaataattaaaaaaaatcacaaccccattaaaatagttttgaaaaatagttaaacatgctagtctttattctctttttctaaatccctcattgattggatgagtaattttgagtgttcaacctgctataaattaaagcatcttttattttgagtaattttgaatgagcaattttcctactttatttctttgccccatgtatatgatcaaattgtgaagaattattgcatctataagggcaatgcaattggctattggcgaagagtaggattaagaattatttcttcccctatattcttttataccaactttttaattctccaagaaactgagaattagtttaaaattattactattgaaagccatttcggttaattagttcaatacatgtcttatttagatcatgggctttcaacttaaaaatcattcggcaataagtggaaaatggcaacaattagagtagaataactcatagtcaatgagtggtcttttgactcattatcattttgaatcaacttgtgaacctatctaataattcgataagagcttcttatctaattatacattttttattccataagagcttcttatctaatcaacttttaaagacttctcatcccaaatgttaaaatagcaaaatgtagaaaataaaaaatgtataagtctttaaaatattgtttctggtttggttttcattattaggaagattagctcctgcaatattcttaagcttagcttttgtgacagcaaataatcttgtgcctttaattatttgttactaggtttgattatggcagttacatgatacttgtttaggaaaaagctaccggtattacaagtgttactttttcatttttaaagcttaaaactttctctaaaataatagcttattttatttagatatgatattgcttgcattaattatatatatgtcacttttatatataattttttctcaagtattttgattcaacataaataattatgtcattttgtttttactattttcaaacattttctcttatttccttatggtggtacttaagaaacagtgatcatgttaccttaaaatgaatgtatcttcaaggactaactcatacatgtaggaacatttaattttacatttcaaaaattagctaaactaatataaaactaattatacgtgcatgctgcacgtaacaataatctagtata

SEQ ID NO: 2506 - DNA, 1987 bp, Cannabis sativa
caaaaaaaaatgtaatattttattttgattatacaaaaataaaagaaagaaaaaaaaattgcaatgagtaccaaaaaatgagataatatttcactcattgctttgaaataaaatcccaactccacttttaacaaagttggtttcactagtgagtagtgagtagtacttttcttttaaaaaaaacacatcatattgtatctaaataatggacatgaatatcattataatcaatcaagggcaatttggtctttctgctataagataatgtcactcactcacccataatgataatcaaagcctagtaacagcctttgattttgtcaacccttgtgatttgaccaagggtattttggtcaaagtaaaattcgttgactacttatgaattatggatatcaattataggagtctggctcttcaacgtgattaaccattatagtccacctcctaaatgcacgtgctggacatgttgtcacacactaaatctaaaaagccatttaatgaatttctcacattattatgaaactaattaccttataacttatcataaaatcttaattaaaacaaaaattatatatttatggagaaaatgtatatttttttttcttttaatatgaattttaatttaagttgttatatcaacttgaatttttaattaagttttaaatatatatatcataatagaagtacacaccatcgaccattctaccattcattttgaaatcaaaaaattataatgggatttcccaccatttacccaaaaaagaaaaagcttgacttttcaagttgatattattgatttttggtataaattttcacaaacttaaaataaagaaacatacttaattactttatcatagaggaatattttctagttaatttgaagtagatgaaaaacattgttttgggaaaaaaaaaagtctttgaaccatcacaatttgattatttttaaaagtaaaacaaatattagaattatcattaatcaaaccatatattataccatacttaacattgaaatgtatacattctctttctctatcactctccctatagtccatatcatttttttttcttcaaaaagaaaaaggagcttttttactttaaagttggtcaaatttggtccatccaaatattagaaaagtgaattatatatatttatttagatacaattataaaatgttatataaacataaggtgataaattcaccttttccttttgagccaagttatatagggttttgtgcttcttgtccaactattgtctacaataagagggaatccaaaggcattgtatcttatagtgtgtgttttttttgtttttgtacccacttaaggccaaactctccatatatataatttatataagaaaaaaaaacttatttttaattatacattaaacaaatattgtatcatatttcaacaaactatacttgtattattcaaaaagttacacatgtgtgaaaaataaacaccaatgataatattaataataattattatctcagaaatatgttacccctaaatgaagccaatattctgacaatatcccatcaatggaaaataaataaagtataaattataattgtgaattgtagtgcaacttaaaaagataactatctttccaactgtaaggctttttattttttatttattttatatataaataaataaataaataaataaaattaattaatttgtacctactaccactaaatattgttatacatcaacttcattctttatgttaaaataagtatacacacaaaatgaatcttcaatatttatctagaattaagaaaagaaataaaacattcttcttctcatattgattgtgtattaatttgttttcaatgtttatgtggtgattaactgattatgtaggaaaaaactgctatatttataaatattagtaaatgttgcatttagtctaagtggattttggggcccaaaaagatactattatcaaaatcaatacaaataaatattatat

SEQ ID NO: 2507 - DNA, 1177 bp, Cannabis sativa
cctttgaaatcaaaaccagcgaaaaaagacaaaaccagagccaccggcattcccaccatgtaaaaacaccccaagtttatgttggctccaactttgggcctggctgttcctctcaagaccccacaacccgttgtctgaggacagttaccgagctcacatagtccgatgattggcaaaaccaacgatgttaaagaaataatatctttgtcttgtgtgaacatagtggcccaaaccttccgaaccatgactgcaaacacaagagccactaagcccagtgcgaagctgcaagagaggcctacaatggcggcaaacctggcttttttgggtttgttagcaccaagctcgttaccaactcttgtggatacgctgaagcttagagaagaagggaatatgtagattagagctgtggtttggatcaaaatgcccatggaagccacggttgcccttgggtttatcaaaaggccacatagcaagatcatgatctcgtaccaccaccattcaaggcagaccgagatgcaacttggaatggccaaattcaatagtgttttccaatctttaaaacaatcagtggaaattcctccccatgttttcttgtgggccccagagactaagatgtagaggattaaggaagctacaagattaaaattggtcaaaaccccacttagagcaactcctttaattccccaattgaggtgagaaacgaagaaatagttaatggggatgtggagaaagattgagaaagttgcacagtaggtcagaggaagagtaatggattgagttctcagataaatcctaagtggatgtaacagggattgagctaaaaggtcaggaagagaataaagaagataagattgagcttccattgcaatagcttcatcttggccacaaagaataagaatcttcttcatgtttaaccagagaagagaaatcggtattgaagttaacatcaaaagaagaattgtcctctgtaaacagagtccaagcagagtgtttttcttagccccaaaagcttgaccgcaaatgggctccattcccatggcaaggccagagaggatcgagtaaccggtgatgttggcaaagccgacagcgagtgagccgccggctagagcgagctcgccgagccgacccaagaagagcatggatatcatggaacgggaatagagtataagacccgtta

SEQ ID NO: 2508 - DNA, 1250 bp, Cannabis sativa
tgttcactatattgcagtttcttctataataaaatattattacaattgaaaaacaaaatacaaaatacacatgttcttgtcatgattacgcatttttgccaacttcgttggaatgcttcaacaaattaggcctgtatatatgcataccactttatgaatgattttcttttctttttcccgacatttgaaactttattattgattaaaatgtcataagtcatgccaatgtggcccccattttcaagttgcacaagtcgcagtcatgggatactggcctcacaagctaagggctataggtgatcattagctgaaaattacatccagcaactttttctaggaatctatacgtaaaaagaaaaaggtgatgctttggaatacacccatctactaattaatttttagaattcctttatcatccatcaatcatcaaaagaaagcaatatctatgcctatggaatcttccctttgaggactattcaactttgagtggtcctctctcacaagttgggatataggtgattatatcatggactttgttatggtttaagggattatgtttttacttcaatgacttagaagtaggaatattaacttgatattagagattattaaaacacgtattgctgtttgaagagagaactagagaatctacatttttaaaaaggagaagaaaaaaggtcggctgatctgcatgaaaagtaggatttctttccttttcttttttgggggggttgaatggaatctagaacaaataaaaattccatatagctcaaagtataagaaataaatgatatataagttggctgaattagtatttggtacctttagaaacttatgtggaggatatgcatgggaaattacttcttgtgtgattgagaagcctccagcagaactcataatattgaatggatatatttgctatgtgattttaagttgagttatgagttaaggccatatacaaagtgctttcatacttgataacacttctgtggcttacatacgaactggataagataataaaatgcaggcattcaacattgctgatgtgatatttaagaagttgaaagtgaaagataagaacttactaatcatttttggattgccaccaatgtgaaaatctgcccaactttgatccatcattaaaaagttttttatttcaacaattacttaaatcttggtgccgttaaatttggtggaggaacaaaacgttttacgtacatacaaaaataatacgtgttgagagactgcat

SEQ ID NO: 2509 - DNA, 2561 bp, Cannabis sativa
taagttatttttccttaaaaatagaaagatttaccatcctggaccacttatctagttgcaaaaatatccaaaacaatatataataacagtaagatatggtctgttcaaaactataaatgtcaaaaggatagattgaaaattcaagggtaaaggttaaagaaaaaattgctgaagtggactctcgtacaatatttataggagggtgttattttagcttctcaactctatctccatctctaaattgagattaaattcaggatttgtactagtataagagaataataacccaacatatcccaaaatcttgaaaagaattgcacacctgagtgtatgtctggacatgatccctccaaagagaactagtctttagaacatctctcagagttgatattacctcaaatgatgttgcctttataacatcatcatctttgttatacggcttatcctataagagaaggtatagtccataagaaaaacaaaagagaaactcatcttacaaatacaagttataataagaactgtggataaagtaattatgaacaacatgcctttagatgatcaactttaacagtaagtggttcctcgctaacctgtcaaaaccaaagccaaaggttctcagctatataggtattttcacatacaaaacaaagtacaaatttgaagttcaagcacacacaaaggatagagcttaggcaataaacaaaaggtgttatatatcacctatcaacagactatttaaagatcatgcttacagataatttctacccaccatctctgtaatgcgaagacgcctgtgaccaatgaggatgacctggtctccttggatacttgagatctgacatatcataataaaacaaaaaaacaaatcactaagtggcagataatttaaagtgatgcatttaactcattagtccgcacctacacaaattcaatacctgcgcaagtgtaccaacttcgtgaagacgattaaatagttctttccctttcagatcataaatgttcttgtcagcttcagaaccagatacaaaactaggatcagtccctggctcatccttaagaagaaaagctccagcatatggagcttgccgttttcgactatcttgtaaagctgccattagtttcggatcctacaatgaaagtatatatattggagctatcaaaagttcatggtcaatataatgggatgaagaaacacagaccttacaagcttcaaaaatttcaataataccgatgtccgaaacaagaattaaaagaggctcaacaagtttccataccttgacaaaaattggcatgtagaatcctggaaacagcggtctatggggcaatggtaatgctatgacctgtgacagcaatacgaacagaaatcatttgcaaaagatagaaaaatagccaacaaagaaccaattgtgcaaggaaaggaatcatatcattttacaaacatctcaacaaaatgtacgaaagtatcaaaaacttcacaatcggaaagaaatgaaaatttagtttcctaaagtatgatatttcttatacatcagatgatgattaaaagacagtatcccataattgcttctactaatcagatgaacagaagataaaccaaaatctgttgacagacttttgtacgctaattagattagtagcactgatttgacaatgaaaagactagtgtattcggatcaacaatttgtgccaataatttaaacccttttcattattacaaaaaatctctatacaatgtcataataccaagcactatttcacttcatttctcatttgttactgatgtacctctatctttatctcttcctatcaaacatgactacgatcgtttcttcaaattctttcttccctcgcctcaatttcaagtttaacaattaaaatttcaaatcaactagattaattgatcaaattatcctgacttaaccaattgcaatcgcattatacatagcactagagttcactaaacattaaagtcaaaaacctaaactttaaagtcaaccaaccgttagataatcttcgggtctagggtttgtagacacaattgcggaagaaggttttgcctcagccccagactcggcctccttgacttcagcctccgccactggtggctccgacccatcactcgcgtccgaacaaaaaaatacacggcaacccagattacgatttcgtccggcgagaccagtgagcgagctcaaaactcgaagaaacggcgccgaagagccggttcggatactcgtcggagcgaggctgttgactcggttgtgaaggcttgaagaggatgagagaagcttcaacatttcgtttgtgagaacaattgagaggggccaaccgaaattgtgagtgttagggttttgttgttatgttttgtggtaggcggttttagtagttgtgatgaggaagaaccgccattgatacatggaagaaatgaaagagctttctgtgtatggtttctctgttttggttaaagccctcccaaaacccttgagtaattgtgacttgaccaaaatacccccaatctatggttctaattacgagttcttggtggtgaatggtgatgtcgattt

SEQ ID NO: 2510 - DNA, 818 bp, Cannabis sativa
ggcataaaacccaacagtctttgtgtttgatagcatgtataagttcaaaagccacaaggatgttatcttggatgagcctatttgaaagaaatgcactctgtgtttcagaaacagcggggagtacatgcttgaaccgagcaactaccactttagtgatcaactttgagatgacattgcaaaggctcatgggttaaaaatctcccatttgttgtggttttttggtttttagaatcagctcaatgatagtgcagttcaataagatcagccccctcattgagcacactcaaaaccacctttgtaacaagggcatcgacatttaccaattattgtggtagaacattgcagacattccatcaagtctatgacttttatcaagccccattgaaaacaagacaaattctacttcagtagcaacaaaaggcttgagaggctcacaattcatgtcacttgtcaccatagtaggtatggagttgagcgtggcttgaagtgttggctggtcaatagtagaagcttgaaaaatattcacaaaatagtcgtgaattgtagcaaccatatcaattttggaagtgactttgacaccagcagcattgctaaggaatttatcttattatttggtttcctagtcgtggcctttgcatgaaagaactttgtcttacgatccccaactccatgccaatcaacctgcgacctttgctgccaataaatctcttcctgctctaagagctcatcaatgacagtttcagagtgttttatttcagcaataacatcgttactccgagaagtgacattattcaaagttgcaaccttcgatggagcct

SEQ ID NO: 2511 - DNA, 2004 bp, Cannabis sativa
caacaccttgaaacggcctggttgattggcaccttactttccaatcaaacggcgtgcacgttgattggcaccttttactcgagagttgagttcatccacatcatcggagacatggtcaagagctttgttttgcctgcaatttcccatcattagttggccctgtatccaagagagactagtagtaactataaagaatatgatatggtgagatgatacggacctgttaagttcacttcccatatctacagccatgttcttcaagtcacccaaaatgttgcttaaatccgacagagcatcatcttgctttgtcttctcaacctgataattctaacccattactatgtaaactcactcaccaaaaacacaaccccatattcttttttatttctgaatctaacatacacaaaatataatccatgaagaccaacctcaactttctgcagggcacctgttgtttcagattgtggtgtctttgttgttgacttatttcctgttggtacaggcgctaaacctaagttttgcctttgctccaagttgttttcactccttttggaagccttgtctgttgagccagtattgtaaattaaaaatacaaagctgacccaatactgaaaattttatggaaaatatatgatctcaaagttatactatggaaagatagtcaccggctgttgtaagaggcccggtaatgtctcgagtcttctttggtttccatggcttagaaaacatgcccccaagattgtttaaaagcttttcaccctgtttttttttttttgttccagtcacatatggtcaaaaccaacaatgggaaaatcacaaagtacgaataaaaagtacgaaactgtaaatgatcagaaaatattagtggatggtagcttttgcatcacaaacaatgaatagcaaaaagcttaaggtcactttctgataatctcactgcattgtaaagttgaccattcacctcatgcagaatcttgataggaataataaattccacatcaaacacttgccataatcacaaaatggactcacccgactcaaatctctgtcaatatcaacagccatcatatgagtccggttgatttgctcaccctgctggttcaacatatcaagtgtcctagtagcatcctccctaatatcttctgctatctttaaacaattgttaacactctttgtcgtttcctcagctttatacacagcatatttctctagttcttgaacactttggttctctattccacccgaatcccgaaaatcgttcctgtacctatcgccatctccataatctggcacaaatagcattggttcagaggaagttcttctcgcaggttttactatgttctgtttggcattctcggtgtctgaatcatatgggtttgcagttgaagctgaaaatccaggatctactgatttctgcttagaaatcttattagccggtagtttcataaacccaaacattttcaccagaattgctttgattatcaatgggaaagaccaaatcaacaatggtacctggaaccgcaagccaatcgttaaagttggattttttctgtttctttaatcaaaaaaacattattcaaatacaaaattgttcaaactggaccaaccaaagttaaatggtaatgggactatgggctttatgtatcttaatattttgtcaggcaacaatatacaaaagtcccgtagaaatataatgtttcaaagaataaaagtagagtcaaaataagagaacttaccccaataacaaagattcagaaaggatatgaagaaagattagaacagatattttgaaaatcttacgtacacataccaatacaattctcaattaagaggaaacaatgagatgaaaaaaagatgggaagaaaaaaaaatgggagtcgccgcgaaaaaaaacaaaaaaactgtatggctcctttgaaaaccatcatctgagttcattcaatttatgaccgttagcttcctttaatcaggttaggaatgaaatgtaaggtagtaattttttttttt

SEQ ID NO: 2512 - DNA, 1038 bp, Cannabis sativa
taagaagaggtggcaggtggtcggctactgccggctttggaagccgtggatgacatggaaccggaggagaggctctgcgacttggtcggagttgcaggaggaaattgtcgacctgggaaagagctgaagcccgatcgtgatgggaaaatagggctcaaatttggtttaaagttattgggccttgttgttggactggtgttgaccaattggtatccttcctctactctttgggctgtttccatgatttgggccagcccatttggttgtaaaatgtgaagagtggccttgatgtcttccttcaaccctttgacgaaactcccttcgaggatgtggtctggtacatccggtacgcgtgaagcaagtatctcccaccggacccgatactctttgacggttcctgtttgcaccagcgatagtagttcttccgagagtgatcccaccggcaccgatcgaaagcggaggagtgccaattgtttaagcatggtccaagatgtaatgggtcgacgatggttctcccactgaaaccaggacaaggcgtctccgtcgagacccacgattgccgtgtccaacttcataggttccgtcaacttcgtgagcaagaagtagcgttcaactctgtatatccaactatcggggttctctccgttgaatagtggaatctccatccgtgggggtctgaaatcttggttgccagttatattcgcttgaaatgatccaagctgaatcggagtcatcgggggagggatgtgggttggtacggtaaccttcggaggaaaggtttgtgggagcggagtggattgtatgccgattgagctattttccccaccgattgaaccacttccctcgactgctcgtcgttgacggtccgcactcacagctgcggtctccggtgtgaccttctctgacggtagcagaaactgggaaatctgagacatctggttcatcactggttcaagttgtttggccacgatttgagcaattgacgtatgaatttcttcctgcaatttttccaacaccgtcgaacgtagatcagagact

SEQ ID NO: 2513 - DNA, 1666 bp, Cannabis sativa
atatatattcttggaaataaaatctacattactaattcatcaaaaaaaaaaaaaaaaatctacattactaggctgatgtgtctccatggagtccttccacacatacatatatatccctgaacaatttggtggctttgtgcaaggaactcacatccattgacagcaacattgtaaatctcatatctctactttaatatagaagctaaataaataaataattaacatcactaactatccatagaaggatcatactactatgtacatttattacttttttttggaaaatatattttgaaatattttttttttcaaaatagtatttattagttataatattaattttgtaattttttaaaaattttcgaataatttacagtgtcgaaaacataactcctcatatttcagcttgtatgcgtgtttaaaatgcttcaaatctattttcgacactataaactattaggaatttttcaaaaatttaaaagaatgatattgtaattataatgaacacaatcataaaataaatttcgacatatattttttattgtggagattgagaaagaagttataattagcactactttcttaagaattgattgtgctcagtatgctttgaagatttgatttataagatatatgtatatataataaggcattttggactataaattgttagctttttaaatttaaattgtgttgtttcttagtattttagtttcattttatgagtttttgagtttaaagattttattgattttatgagaaaaaataataataaatttgatgttattaggtgatatttggaggatgaaataactcattaaaatgatgttttgattgagtttgaaaaagtattgaagtcataaaactggagagttggcgttgtagcgaagatcaaagtatcgttgcagtgaacgaagaagaaaaataagttaagtgagccctcgctgcagcgaaagtttggtttcactgcaatgagtgtaccttcaatagtgctcactacagcgagagtttggtgtggccgcagcgaggagtgagcttaatttgacaagtcacaacgtatttattgattttgacaattttaaatccaaagttggattttgttctaaacataaaattcatagatctcattctcatttttttaaagcatcttcaatcgtccaattccaatttgtattaaatgggttatggacaaaatacgatctgagcatgcgatagtgaatttctgaaagtgaaaattagaatttttagaccaagtaattaactttttatctgctttacattttaaaccaaaacccataatttttagaacaaaactaggggagatcgatgagagaatcagagagtacaatgagagatgtaacagggaaaatgtatcagctcgctataggcgctttatagatgaaactattgatggtaggcgtcgctatatgcgatatgtagcttggcccaagatgcatcatttaaatgaatactctctagccaaacctttgtttatgcctcccgttaatgttgctttttctccaagtaccttagatttttaaattacagctcctcccagagtttgtaagcctaggttaccctaaaatattaatgttaaatttgaggctgagtttattaaattcaaagtcacttctattgtcctatttgttggtccatttttggtttt

SEQ ID NO: 2514 - DNA, 2807 bp, Cannabis sativa
ctgtgaaactttaggcaattgtgtaaaagttgccatatggatatggttaccatgtgaagaagggaaatgaaaattaaagatactaccataaaggaggaaaacgacagtgattcatatggtagatgagataaaacgcagcgccgcaggatcacgtgtaatttcactttcacacattatctcacacgcgttcctatattattaattactaatattttattaacaaaaattaaataaataaaaaatttgacatccaaaacggaagtagctccttccttctaggtattgcgaccttctaattttctctctaatggactgcgcttgcagcaatttcagagctttttcttctcttcttcttccttgtccatcctcttctttcttatcactctcttcttcttcttctttcccttccaagttcagattttcggtatgcctttctcttctttcgctctttcattttgtacgtttgtttgttttgtcgtttcatcgatataactcggtttacttgattgcttcgaaccttttataacagagactaaagcgttccgacctgattaagcagcatctggtgatcagaaacgcttgtgggttcgacggaaatggctctgctgatggctttcccaacatgcccaacaagcttttcatccaagaggttcgtttttctcttgcccctttttatatatttgattggttgttgtagaaatggatgcttcggaatagaggaatagaggtttagaaatttcaagtttaacttctggggtttccataatttgcgttatttttcagtaataattggaggactatgtgacatacaagaatttcaataaaaagcttcagttctttgttatttcatgttttttttctgtacactgaatttgggaatgatagttttgattattatttaattttcttttgcttctcaggctattggagctgaatatggggaaggttttgagacttttagacaagatggacctcttaagatggatgtggtaaggcttttgttttcttttcccttaactggtatggtaattttattcattttcttatgtttcccttcgaattttatttaatattgcttgctgcaacaagtggcagagaatagtctcttagttgtgtcattttttttttctcaaataggattttttgaatgaaaagttgcaagaaggttttcttcaacgtatacgctatgctatgaagccagatgaagcttatggccttatcttttcatttgacaatgtcgtggtaaatttccaaatttggcgttctatttgagagattgtatatctcctgagctttcacccatttaattccttgtataatgtgttttaggcggatactcgggctttgaagttggccgcatggaagcagcttgcctcagaagaaggtatgcttcaaaaaatttcttttagactagctcatgtgatgggatttctgatcagtgtctgaagcagttgttagattaggcatttgtaataaaattgtatcttttataagatgagatttcagttgatacgaaattatgtagttcaggtcttactaagagttaggtttaatttctcataatctgatgacacataccttattgtctcttaaaaaaaatgattattgtgcaggtaaagaaattcctgatgatagtgaattgcaaaaagtgatgctatctgctggtgctgatcatgtgttgaataaggtttcaacatcgttcttatgttcatgcaaactatttaatttattgactttcttttgtttttattttttcattttcttgagtgtccctcataagtctctgaaaattgtcagcttttattgtgggatgaagctgaaagtgagatggatagactgagtttgagattttcagagttatattacgaaaatcttttgagggtaagaactatatgtggtctatagttttcatcatgtgtttttcaattagaattggctattaaaatattatttttcttcctcttttccttagcttgacagacctatagagggcctcaaagaatggcttgatgctgtatccactgctagaattccttgtgctttagtgtcaagtcttgataggaaaagcatggttgaaactgtagatcgaatggggcttcaaaagtactttcaggttggtgatctataaagatgtgaaataattttttcagtgtacatattccgcaataggtttttctatcactacattaacattgttttagataatacaaatgctttattccactgagctgcctcagctgagctgactaccattcaacttctttgacaggcaattgtgacagaggaggatggcatggaatccatagctcatagattcctttcggcagctgtgaaggtattgtccttggcacctaatgatgaatttaaatatatgcctatcacataatattgagtagttccctctactgaaatggtatattcttccttttctaaagaatcaaaattgtgttataatgtgcaacacatattctacaatacggatggccatgcattacacagagaaactaataagaacagtaattttatagcttatcaattatcctgctaatgtttctgttttttaaacttattttataacctgcagctggaccgaaaaccatctaagtgtgtagtgtttgcggatgatccaagaggcataactgctgcccacaattgtaccatgatggctgttgcattaatcggcgcttaccctgcgtgagtaatcttgaattaacaaaacaatttcaatctagggtagttgcttttttaaaaatatatatatttctcatttagctttgtttaataagttgtgatcatagttttaagtc

SEQ ID NO: 2515 - DNA, 4416 bp, Cannabis sativa
  modified_base (2428)..(2428): a, c, t, g, unknown or other
atattccctagtatatatataatggttcaagtcttatacatttatgtgatctttggttttactccaattttgaaatactactaaatattctttatggattgagcaagaatagggtacactacaatcgagaaagattctctattggattctctcaaagtgtttaacttttacattcttacctaaaaatcttcttcatctatggaaaattcttcatacaaatcccaaaatcaatctctctcttttctctatacccctatctctctacctctcaatctctctcttcgaaactcgtgtgaactagttatcttctaaaataataaatgttggtggtatttataggctcataataaagatcctaagtcggtgattgcaagtgctaaattgttaagttagtttcgacttacaaacttaacaaagtcctcataaatgtatctccacgtcagcataagtcattagtgcttctagatgaaatgcaagcttctgggaccacggtccaaaatgcacactgaaaggactttccaaataggaatggtgccagttggattggattggatgaggagaaaaatgttggattggatcggatcgggtttcctttgctagatgaaaaaagaatgtagccatcatggttggtgttctagaaatcttagtatattaacttgtgagattgatcaagtccaagcaatgtttgaagttgtttactgttaagaccttagccctaacatcagcaagattatcgtctgttatgatcttttctaattcaaccaattcttgctctatcttctctataatttagtaaattattttatgtgtttgctcttttcataataaatcgaattcttacaaatatggatagatgattgactatccgagtacacagtcactctacctttaatttgtttcaattaaaacagaatttctcgaagccacaacgcttccttgaatgcttttgtggtggtcataaattctgcttccgtagtggaaagagcaactacggactttaactatgccttccaacatatacagtttcggtttgtcataaaaacgtaagaagtgattgattttttcgtatctctatttgaagcatagtcagcgtccacgaacctttttaactctagttctccttttttactttctcataggtcagatcatgattccaagtacccgttaagtaccttaataattatttgagggccttctaatattcaatgcctggattggacatgaacccagtaaaatatatttttttccttgcctgcttagaaaaaaaaaatatttaattttttttttctttttattgaactttcttcttcttcttcttcttatgcatgcctgcgtcaagacaaaaaaaattatttaaaaaaaattggatttaggaaaaaaaaaatatctttttctaaatctatttttttttttaatttaaatttgactaaggggaggaaattgtaattgtaatgtgagaaagaattaatagatgtggctctaaataatttggtttgttaagtagtgatagtcacattaaaaaaaaactctattatagattaaaaactcttcataatagtaggatgtgttatttactgatgggtcaaaattattttttttgttaagatatttgcatttataattattattgtggtgtttttaacataagtctaattagtgccatgtggaattattgggttggtcatttttcaattgacagttttgttagttggttttgaggggagttgttttctgtcctgaacctatatatacctaacctgttagtactcagaggtggctgaatttggtgagacactagattagagagaaaagtgtgactgaggatttgaagaggatcaggagcttaactccttttgtaatcgatcttcctggtgtaagatcagacactattgtactcaagatttcatcatcaataaagaattgcatgatgattgtttcccggggatgtagacatagattgcattgatctatgttcgaacctcgttaaagaataggtgccaaatttagtttcagttcactacctttgattattcagtttattgtccatgcttaattgaatgttcattgctggtttattggtttgcattttcggttctgcttatgttaattgttctttgttgtgtatgtgtcttgaatgaggtgaatcgggattcaccacaattatacatgtaactttaattaaaataaaaaataacagtatattgatacaacttctaactgtttcggtatcaataaaaaaaatttagtctaaattttatcaaagtcgtgtacgttatagttatttaagacatcctgtaaaattttgagaaattcgaaatgatttacaataaagaaatcaatgtttaaaccgtttatttcacacgtgtataaaataaaaaagttacgcgtgcaacaaatttttttaacactgtttttgacgtgttaaatntttttaaatttctcaaaattttgtcagatgtcttaaataattgtaatgtattcgcaggcccggccctgggcataggcaggctaggcctgtgcctagggcccacctagcccatgggccaaaaaaaaatcctttaaaaattatacaatttttttttttattttgaaaaatactacatttttttttctaaataagggcctaaaataattttttttctctggcccactaaatttcaaggctgaccctgtgtatacgaccataaaaaatttagagtaagtattttttttttatataacgaaatagataagagttcatcgatacacccattttaaggggtgtattgtataattttctaatactttattttacgattttcttacaatcatattcttttgagtttctggcggctaaatcctcctaactattattttacttacacttaactctctaaactcaaattttggcggcaaaaccttctaaactaatgaattgttagcaaatttaaggtgtcatttattttttttacagttaactatcaccatgaactgcttatgtgtacactcttgtatacgtggcacgtttatattagtacacctaacattattatttcaaaattataaaaaataaaaattaaatattaaaaaattaaaaaatattataaaatttgaaatatcttttataattttttaataataatattaagtgtacaaaaataaacgtatcacgtgtacaaaagtatacacataagtagttcattttagtagttgattgtaaaaaaaataaataacactttaaatttgctaacagtttaatagttttggaggattttactaccaaaatttgagctttgagagttaagtacaagtaaattgatagttgaaagagtttagctgcaaaaaactctattttttttttttttttgtagttaagtgccaattaagcctattaatatcaatttagaaatacgcgacgatatatttctttagcttatttaatacgtatctaataatatattactacatgtttctaagttgatacttgatagtaaaaaaatacgacgacaataaaatcgtaaaacaaatatttttgttgtcataaatatcccaaatttttttttaataatagaccaaaattattataatttacaaaacaataaataatattaatatataaatatatagccaccccactagactaataagtactagaattatataggctgaattattatacgagaaatgtggtattatgttttaatatcgctattgtgtaattaattatcaagtcttatataacttaatctaataatttgtatagagtatcactaactaataataaagcaacatgtctagaagatactaggtactactattaaccaataataatattcattaattttgtatagtaacgataatattatcatgggcattgtattagacacaagtggtgcctagcaccttctcgacatgtcgagttgcgattggctagcaatactcgctaaaaactattatattaaattatatgagatcctatacttagttaaaacaatagcgatattaacacataagagggtgttaggcaccactggtaccctttatcatttctctattatcatatatatttgaaatcagattgaatcaaatctgatcctaaaagaaattaaacagcgggacggatttgattcgaaatccaataagtatttaaatattttgcatcagaaataatacgtcaaattaaaactccgacaaatcttaataaataaatatttttatcatgcttactgaatatgataatacctgcaacatttatcttaacattattatatgccattttggttaatattatcaataatttaacactattatttgtaataataataacacacatataatatcgtctactatcacatgaattaatctatatgtaaattatatatttatataagagctctaacattcattagtaaagtaagccattcagatttaaagaaa

SEQ ID NO: 2516 - DNA, 2940 bp, Cannabis sativa
tttaattttcttttgttctatcattttcttttttaagagatttctttttcttgttttaataaaacaaacgtaattcgtggacaaacactttctcagatatttgcaacaaaaatacaaataaaattgatagaagctagctgagctgacaggcacaactcaagtaataaaacaagtatttataaatatatatatatatttaattatttaaatacataaatgataatgaactggatccaatgcaataattattttattacaattttaagagttcactacatcagttacaaatttctttgagccaaaccttattataatccttgggagattcgcaaatatttcttttatttctacttacaaacgttataaacaatgtcaactttcactttcagacgttcatttcttcatttcaaccaataatgacaataacaacaacaacaactatattaattttctttcaccaaacataaataaatatgatcagttcaaactttaatgataataaatggttacaaaaagtcccattatttttaacatgatatcattcaacatcataattcaaactttcagctttatcctaagtatattccatattcaacgggtctacatttatcctataaataaaaatattgaaaaagcttcattagttttaagataattatgatgaaagcatcatacctacaaagctaaaaatcttagcataaagaaagaagggttggttttaaagagagaccaaaccaatgtaaaacacttgataggaacttatttgtccatatctatttgccctttggggtcatctgaaaaccactctttatgattttgtaacagcaaaagaaagaaagaaagaaagaaagaaagaaagaaaattatacaaattgacagactcacatgtgggtcagatcatatagcgccacaacacacacaatctcagcatgttagtcacgcgtccctatgccaatatcactcacctacaacaatccaatcttatataattcaccgccaattattgaactccatcagccaccaaatttcatacatatatatatgtacaaattctacaagcaaagataagattagaatcaaaccaaagtttcaaccatgtggagagaccttccatttgatctcttagccaatattttttactttctttcacctgattcacttgcctgcgcgcgctccacatgtcgacagtggcaaaactgtgccaagactcgacctttatctcactctaagcactacccagattggtttatggccttaccaaatcggagcaacactcaattctgctatgcccacaatcccatatcaaagaattggtactcaattcctattgatttcttacctggagttggagttggaggagttaagccacttgggtctgtaaaaagccttgttcttttcagaaccacaagcctcaatacttatccccatttactcctttgtaacccttttacaaaggaatacaaacaacttcctaagctaaacatgtccagaaccaatccagctgtgggtctcatagctctagacgatgatgatgatgatgatgatgatgatcactccttctcttcctctttccccagtttcaaggtctacgtggcaggtgggatgtcagactcgccaaccagtggttgttcagcttacgagtccacgttggaaatgtacgattcccattacgacacgtggcagattgttgggtctttaccaatggaatttgctgtgagactcactgtttggacaccaaatgataatgtgtactgtaatggagtgatgtactggataacatcagctcgtgcttacagtttaatgggttttgacatttcatcgaacacatggagggagttgagagttccaatggctagtgagcttgaattcgcgtctattgtgttgagaaacgagaaattgaccctcgtgggtggcacgtgtggtgattgtgcatccgtgtgggaattgggtcagggtgatacctgggttttggtggggaaggtcccatttgagcttaaaaagaagtttttggggataaaaggaagttgggttagtacaaagtgtgtgagcagtaatggagcaatttacttgtacagagatcttgagtctggaatgattgtttggaaggaaaaagaagaagaagaaaagggtaagtgggaatggttttggaatgagggttgttcttcagttagaggaagaaaagtcccaaatttgcagatcaaaggagtgatttttcctccaaatctttctccttcatgcttcttttagattagattttaaattaaattacacaaacttttgtttttgtacatgagttctctgtttttcattcataatgttaaaataaattagaaaaagcttcagtttgaatgtaatgaacaagtgtgtctcttattgtattttactttatcttgggtgaggcctgaggctgtaaaatatatgaatatatcaaatcaaaatcaaagaaaagtttgaacttaataaaaataaaaagggaaattggtaaaaggtaatattaatgtttgggtttttttttttggttatactgtttttatataatttaagattttttttgttgaagcgtttatatattataatttaaattttaacatatgcttattcttttttattttttttttgatgactatttaaactagtctcaagtagttatttaagaaaattatttttaaaaaatattactgataattataataagatgctattaataaaaaagattaagcatcaatcaaatcactaatatttaattgcaatactttaaaataaaaatatgaaataaaaacaatggctgacaaaaaaagtccattttgtttggttgctagtttggtgccaaaacatctattttcaacttgggaaatatgtattttatgttcaatttccaaagctggtgaggtgagtcgatactaatagctgtaattactgtgcgcgttgtgttaatttggt

SEQ ID NO: 2517 - DNA, 1923 bp, Cannabis sativa
tgttataactatgtaattgacaaacttttagtatgtacaaatttttagcactgttaaagtaattattttctaaaataagctatattttaacaatactaatttatagcacaagatgctctagactaagatatcccaaatgcttcaaattttgaaataatatattggtaaagctaaaatgttatgcaataaaaatttatgaaatgttagaaagacagattcattcttaatctgaatgcaaacattaagcttacttttttatgatggctcacatggagtaatgaaatgaaaacacagataataaaaattagaaaaactccactttttggcttcttcttagattgatggatgtaataataacaaagccatattaagcattgaatggggcatatggcattgcattaatcagtgctttgcatcttcttcttcacaaaactttgagtactgctcagagtccatcaacttcttcacttcactcgattcgcttatctcgaccttcatcatccaaccgttctcgtatggacttgcattgacctatatccagaaagaaagaaaagaggagcgaatgagaaaatagttaagaaaatgaagcaatgattctaggtggtacactgaataatataaagaaaaataaatttcgccttaaaagatactcgaagaaagaatcaaatgatgaattaggcccccaatgatgtaagcagcaaagtactttatgttgatgttttttttttcaatttactctgtatcgggaaatggcaacgaggcgatggtgaatttaattttaaccattttatgtttgagggttagatcaacaacatgaaatattggaaatttatcataaatctgcatgacaaaactttgcttgcaaggcattgttgaactactccaaagagtcgaaacaaaaacaaacaaaagaggtgaatggattaggctctattaacactttactacaatgtgagcctaagtaagcaagtcaatggaatccaatgtaagaaaaatgtaagttattgttgggggagaaaacagttgcgcctaactattgttggaaataaaaaggatggtaaagcacaagacagaagaatctcaatcagaagagagttagatgggcttaactcattttgtattgttaacaaaatcaagtaactatgaaagagaataattaaactgtgccccctctcaggcatgataaaacacacctgcggttttattaagctaagattagatgttttttaaaccatttaaatataattacttgagggattgatagataagaacttaatcagccatgacagcatgaattcttacttttggtcaagaacaaaacatagagagaagctctataagatgtttaagttatgaacacaagcagaaagaagacattcagatgattcgtatgttatgaacaggaggagagaatcaatacagaagtaaataactagtggttaaattcatttgagagaaacaggcaagacctaagaaccaaaacaagagagaaattctatatgctgcaccagcaagttgtaagaaccgaaactacaactgcaacaactcagagtcatacagctaagaaattattcaacatgggtttggtatatataaattcagttcataactctatctgttgagtagtatcaatgcggctagggaatcgaacttattactcgaacaaagactcagtatcactaattagaattgtaataaaaccttcagggcttataccattttttaaacagagaaagaataggttgtctagcactacagcacatcttttatcaaaatgaaatctaatttcataaaatctttcactgttcaacttaaatttagctcaatttattgacaccgtcaaactatattatgaagaataaaaagggcacaggttccttaactcgatatgagattttcttaatgagttgaatttagcaaagg

SEQ ID NO: 2518 - DNA, 2066 bp, Cannabis sativa
caccttattttttccaaaaaataaaaatttcataaagcaaaactctgtttcatagttaaaatcctatttattcttttttttttcacccctttattttagaatacaaactcatcatgaagcaattaaaacaagaagaacagactagtttgccaactttgattatagtttactacatagcatagttcatcacaagtctaaaagaatggaaaaaaagcctatgtgtgttgaattgaatgtagtaaaccaaagatctagttctctgtttctgcctctcttctctcaatcattttgataaaattctgcacaattcccttgccttctgtagtaattatactctcaggatgaaattgaactccctgcaaaaaagttcaatttcatttttttattcattaagtgatcaaagaaaccaatatgacgaaaagggcaccctccaaccaaaacttataatgttcctaatcactacaccttaaccaggtcatagtttagttttcgggattgaaaatcaacaatgaacgccaagttacatctgcagagctcggtttatattgagtgaagaaatgaaagaaagattttttacctgcaaatgttgatattttttgtggcgagcagccattacgagcccatcctctgtccatgctgtaacctcaagttgttcatggggaaaactgtccgggtcaatcacaaggctgtggtatctaccagcagtgaaagggctgtaaagaatataaacatatttaactactatgaaactaaagcagattatcgaaaaagaaaaagaaaaaacattctccaacataaccatttatgctcttttaacagcatggcttcaaagcgcaatggtacttaagtttagacaacatgtgttatagaataaaacactgcaatctagaaaatctctaccccacaatgaagtgttaccaacaatggtgataaatattattgaaaagaaaaaaggccatacttggataatccagagaacaacccttcctctcctttctcatcatagtaaacaagagagctttttccatgcatgacaccataaggagatcttacaatcttacctgcaacaccaaaatcataagccaaagtaaaacaagcaattggatgaatgagacaatcgatatgattgattgtatctaattaggtacctccaaatgcctccccaatgcactgcaagcccatgcatacaccaaacaatggtaccactggtccaagctccaaaacagtttgcaatgatatccctgaatctttcggtgcgcctgttaaaatgaaataacatgtctaatgatccttgaagaacatattatttcttataaaagttcttcatcatgtcttatcaaattcgaacaccataaatcaaacctggcccgggagagataagcactcctctgggatttttcctgtaagaatggcagaaaatataaatcatcttaattaaggattagcaatcaataatgttctctttaaatataaacttttaccttttcagttcttccacagttagttcatcattgcggtaaacttcaaaatgacagcccagctctcccatatacttcaaatcacagacaagaatcagaataacagcattgttagtatataagaaagtttaataagcttaaatgaaatacattatagctgacattttgagaacttgtttcctactccaaaatgagtgactattaaagtctcttaaagaataatgcaattttgaacaatatctttgcaaatagagtaaacatataaaagtgcattaactactccttttctattcttttatcaaatggaagttttaatctaaccaatgaatgctgatacaatttcaaataagcaaatgtccgaagaatgtgatcactttttcatccatatccaatttcaaccttcactggaaaaattgttttaagaagcatccttgaatttgatatgtattcgtttgaaaatgacataatttgatgctgctgttaattattcctcttgattttcctttcaaactttcatgtgtacaatactcattcaatcttccactataggcaagaaagaattaagttcattcaattaaagaatgtatg

SEQ ID NO: 2519 - DNA, 3041 bp, Cannabis sativa
tgtatttacaatccatttttgtatatattcatatagcatgaaaaataatgtcggttgcacgaacagagccatgaatgaactccatttggcttctgggattgagtgaaagggagcatagtaattttttttggctctttcaatgattctgttagctccctttttgtaacggggtttgtgtttgtaagacgccaaagggtgtaaagaaatcaatttttttttctttctaaataatgaataataagttaatgtagaaagcatgggtaaggattggtccttgcatgttaagagctttgctgtatcaataagcacttgtctcaaagtgataagatgtatggatttaatttctgaagtttctgccagagtggtgagcttagagttgagtttttacttgcatttttgaactataagtttatgttcactaagttttttttttttaatttttttttatattttttatatggagaggttttgtgtttgagcagtattattttggagacaaataagtggagattattgtttaaaatgttaaatatatttttttttcagtactctgcatttgaatgttgacataggcttacttgctctagttggaagaggtcctttaatcgggggaggcaggggataacagtatggtgttaatttttttggctaattatgtgaatatttactggttaaaagactattctggttaatgaatggacataagattgttttattgattctcaattgtttgcttgattatggttgctacctgcacacacacatgtctatgatcgttaatttttgattgtttacttgattgttgtaaccttatttgccaagtgttttcttcacacttgctgcagacaacaaatctgttgccccagtatggaagctgaaaaatctgatgtttcacgagccgaggaattcaaagtccaggcaaatgaagcatttaaaggtcataaaacattcttctggaatctgcttctaaggttattactttttttttaataaaatacttattatcaaggtattggaccaagattttgaccttgattgaaagtctgacttgaatccatatcatctaacttgactttctactccatgtattgtattagattaaatttagtttattaatggtttgagttcttaattagaaattagaaactaaattgtcgctgcagtaaagaagtagaaattagaatgtataaggtgagcatacaaggcaaatgttatttgttaccaattttacctcaactaagaatccttttaattattttaaatctttttttgtcaaatactttagaactattacgggaattgtgctatatttctacgtctttgttgtgctgatggcaatgctttgatttcagtccgcaaatatgctcaagctattgatttgtacacacaagcaattgaaatagacagtcaaaatgctgtatattgggctaaccggtcatttgctcatctcaaactggaggaatatggcagtgctatacaggatgcttctacagctattgaagttgatcctaaatattccaaggcatgcttttgtggcctaactttctataggttctcatcatcctaatattttttaatcatgttttgataattctctgctgttacagggttattacaggagaggtgcagcttatcttgccatgggaaaattcaaagaagcactcaaagattttcagcaggttaatttctctttttgtccctgtgtgtctcaagttttttctttaaaaggcacatttttcaatgctaggaattcactgataatacttgaaggttagcttcatcttgtagacttagtagtttcatgatatcatctcatgtgtattgatttctttctacctaattttatacctaagtgcaattaggttctataaaaggcggtgcttgtaatttgtgcaatgtatatgtttttcgtaaagcttcagttgaccttttgttgtgttattttcagttcttcctttgtttctgattagttaataaccactttgcaggccaccttttatctagatgctattcatcttttagcgtctctattgttaactagttcaatttcctatttgaaacaggtgaagagaatatgtcccaatgatcctgatgctaccaagaagttgaaagagtgtgagaaagcagtgatgaagattaaatttgaagaagcaattgctgcaccacaatctgaaaagagatctgttgcagaatctattgatttccatactataggtatccatattattaatatcatgttgtttctttttgttattattgagtttagatattgttacaaatttttgaagcagttttgttgagttatttggtttattgtcttcatcattcatcaattttacttgctttgcttttcttttttctttcaagtgacttttgttttcaagcaatatttggttttttttttgtttgtttgtttctggattcattagttttgctgatatatatacctacctaattaatattccagtgattgtttgggttcgttaataaaattattatttgaggcggaaaacgtgtagaaattcaggccattcactaaaagttctatatgatttgtaattgagtcgtacttagtgaatgaccgatttcaggcacttgacttgagtcattaccctcatcatttggcagggctgtagtgtctcttacacggggtatatggttagctccatactccacagaccacaaacgtttcttgtgtctacatgtaagaggctagacacatcattgatcccatttggtactaacaatcttcccttgatatgtctttccaaattgacagtgattcttgagcattttttaactaaagtctctatgccattcgtatgatgcattttttattttaatgtcagacttgtcatcctagccacatttcaacctctgatttgtacaagtacctatcattttcaatatttaatttgcttttaaaaaatctcaaacctttgtggagctacgtaactgtgaaaaatggtgcagtcctactggtctttgaggttatgtcatatagacaaatgtacttgttaaagcgggtctcaatgtagttg

SEQ ID NO: 2520 - DNA, 833 bp, Cannabis sativa
ggtcggggtcgggtacgggtccaagtccaggtcatggtgaggggttgggtcgattttattgtaaagaatttataatttacacaagctattatagtaaaagtcaatatcaaaacatactgtgttgaataataccataccattccaatacaatacattttggtgatatataattaattttggttgttggatgaacttagtgatttttctaccacagaaaaccagaacgaatagaattacatgacacaaaagtcatgatgacaatacctgtttggggccagtatgtatgaatggactttccaatttaacattatttcaatctttttctctttcacggtaaaaacacataattttacatgcatcatcaatttttttttctttatatatatgtaggcacaatataccacaaactaatatcaatccaattaagatggggtggtcaccatggttgatgatcatgtttctaattaaccttgtattacttgattcctctactcctttagtaccttctgatcagttgtgtcatctatttgagaaatctgctttgcttcaattcaacaactccctttccttagatctagaatactcagatatagccgatttgaagactgcctcttggaagaatgacactgattgttgttcatcatgggacggagtgttgtgtgattctatttcgggtcatgtaattggccttaacttgagttttaactaccttcaaggctctcttcattccaatagcacccttttctcacttcgccatctccaatctttaatcctcgacgacattaatttcaacggctctcccatccctcctcattttggtggttttgccaact

SEQ ID NO: 2521 - DNA, 1793 bp, Cannabis sativa
atgtacaccacatgcgccatagggacatttgggattaaaatttgattctaccactgtgcctatgaaaaatataaactaaagtagaggagaacctaataatggtttcttaattgaggctcagagcaatgaagaaacttttcccagtatctaaatcttctttgaaagttcaccaattaaagaagtggtccttattatatttaaggtcattatttactgggttaaaaagcttgctgtggttgcagatgcaggattagttgtttgtccaacctgtatcctgtagctctctttttattccaccaggctataattgctggatcttcatttgtgcttttcaggtttgtgcaagcttaatatgttaaacttggagggatgcaaagtaactgctgcttgtttggattctatttcaggtctgcttctcctttgattttttgggatttaaaatttaacttgtcctataacttcaggataacctaatgtgaatatctattaagtttaacttctagtatatgctgtgtcatgcagttcatgattatgaagcaggagtttttcttctttgagcgaaaaaaatacatgttttcccagtggaaatttaaacataaataatatgtctcttctcttcattcattgttctgttttgtaggctttgtacttattccacttttcagaaatatgcatatttatcccagagtattgcatttgagaaaagaattgtagcatagtctagttcttgtttactaaatattattcacttctgtatgcctaacaaaaatttaaattgatatatagagaaatacattagggcaattagttccctttcctttatatacctaccgctctctgcgttcgtgtctatgcccaaattcatatttgaccactagtcataggatagctctctgaaataactggtggtttgaattttatagaagttgcattgttaaaattattctagcaactgtgtggtctttctgattgtgcaaataagctgttaattaatatatgctcttcctctatgttactattcttcaagtaactgtttttttattgttgcagctcttgaagccctggcatacttaaatctgaacagatgcagtctctctgatgatggatgtgaaaagttttctggtaagtgacattagattgattgcgtcatgttttggttctatgtatcaggaatgcatggtatttgtcaactcctttctggccttccttgttttgtaatttgaactagctaaataaaccgctttcctgcaggacttaaaagcttaaaggtcttgagcttgggattcaatggtatcacggatgcttgcttggatcattttcaaggtcctctctttcccctaagcatttgaccattttatgcataattttctccattaattgatttatggggcaagttgttacatcaacttttacatattttgtccatttcaactcaattatgttttgtgttatatgcaaaaagagtttattatcccaagcagatcccggatgtacattttaaatcaattactcaacttttattgttctctagatagatcatatagtaattttttcgcatttatcttgcaggtttaacaagtttggagagtttgaacctggattcctgtgtaataactgataaagggcttgctaatttgacaggttttctgtatagtatttttttacctctccattttccactcatgattaaaaatagtatcttctttcatgcaatttaaatattagtgttttagatgtgctgcttttcttcaagcagtgaaaggggaatatggggtaacatttattgtactaag

SEQ ID NO: 2522 - DNA, 2088 bp, Cannabis sativa
ttcattgttcaaataaaaaaatgaacaaaaatgataatcatcaagaaaataaatattactattaaaatgcatcaataattaattaataattaatatatttaagtaagagaatatatgattaaaactatacgtatatataatttaggagtgttcgcgggacgggtagtgcaatttttttgtttgattattttattttttttttttaaactaaactaaacctgcacatgcagttttttcaatttcccaaaccgcacccgcaccgcaaaactaaaaaaccgcgaaaactgcaccgcaacccctaatgaaacatgcattgatagttatttagactaaaaaattctaataaataccgaaacagtagggattgcatcagtacacctattttaatggggtgtattatagaagcatcctatgttattaatacattattatttataatgttttattgttggcccatgcagtttttataatatacttaaaaataaataaacatataaattgatattttaacactagaaacattcatggctatgtaaggaagataatcacaaaattaatattcacatatattattttattattagcaatatattaaatgatattggatatggattctttgaacctcaattatgttaacctaattttggtaaaaaaaaaacattggccgtgcgttggattttaccatacaaaaaaaaaaacgtttgcaaaataagtttacctaattaaattaatttttattataaaatccaaaaaccaatcatttttggtaaattaaaaagctgtcattagtgataaatggtaattaaactttttagccaattttcatttctatataaactttgatattatctctacacacacatgtataccgttttttcataaatataaggaaattaattataataaattttgtacatgccagcaatttatatttataatgaggatacgttatataaatttttactatatataataacataatatacaaaaacattaatacctaattgaatatataatcattatttcttactttaaatggccaaaaaaggtagatttattctttgaaaaaaaataaaaaaattaacctttatattatttattatttgctcctcttttctctaatgaaatctaagtaccaagatagctcttttttgagtggaaaaaaaaagtctttatttgaactcactcttactattatataaagacatatttacactcaataatttcctcacaccaaaatttgttttttcttaattttttcttttcttcttcaaaatgggtttattttcttttgagtcaccaaattcttctattccctattccaataaccaaattactcaacaattagggtttcaaaatagtcaaagctaccccatcaatggtcaattgagtcaatttcaattcaatcatcatcaatccaataatcatcccaattccaatattctaaaccatgttttgtttagccctaattatcatcaccaaactcaaatcaatcatcaacatcatcatcacccaactgtgggccaactttcacttaataattcccaaagggttagggttagggctaatagtaatagtgataatattagtactagtcctaatacaactactactactcttgttgtaccacaaagagtacaagtggttcaaacagtcaacattgactatttcccaatccaacaaaaccaatttgttgcttctcatgttgataacaatgatgggttttgtttcactgaggttgtcagaactcaagaggttgtcagaactcaactcctcaattcaagctcaactagagaaaggtttcttcatcatcaattggctccaaatcaagctcaagctcatcaagctcaagccaatcccatattcaatggtaataactctattcatcatcatcataatattggtacttatgatcattatagctcaaaagggtacaataattttcaatatgtcccaaaccctagccatgtttttcaccgaaaccctagtcatgttattgagaaagatgatggagaagaagaagaagcaattgtttttgatgttgagtcaatgaataatgctaataacaatgatttcaatcatcattac

SEQ ID NO: 2523 - DNA, 2272 bp, Cannabis sativa
tctctctctctctctctcctcatatatcacacgcctacaccattcaaggtgtgtgtgagattgtgatctactccatctcaattacaatgtctcatgagttgagaatacactgtaattcataaatttgtccatcctataaaattgaatagcctactctctttctaagtagctagcttgcagtgtgaatttcagcgatagttcttagattggatgatcgtaattatactaaaagatagcgaggatcccatgataggctacaataggtattgtattctattcattagatttaatctatatatattatgttgagatttttgggcttatggttcatattggataaaaactatttttatcaaatctgatttcacttttctaactctgatatggaccataaaaatcaacagattgggtttgagaaacattgagagattgaatatagcagctattggctggtatatgtttgggactatgaaagaggataatctttgggtaagttggacacattcagtgtatattaaaaatggagattatggagctacgtggctccataggatagagctggtattggagaaaaataataatggcgaaagataagatcaaaagcacaatggatctaggtgacttgaggaaaatgaattatggagtatacttgctacgctataaactttggccagcagagaatataaaatttggaactgtagaagagattcagtttcccaaatcatcaatttatagtctgattagcttctaattcccaacttcaaccagggattgtttggccaaatttagtatacgtaatgatgatacctattaaatttgtgctattgagattgaaattcattctcatctattttttcaatgttgttacagtaaggcaattgtttcagaaatactatcttgggcaggttttggttctaatcagtataggcttgatggctttctcaaatggtgcaatcgaagcaaacaaactagaaccagaaaacaagtttttatagcagttctcaatgcaacaatttatcatatttgggcagttagaaatgaggtccaatttggaattaacaagtttacacaatttgtaaagttgtaataataccaaacaaatagttagaagcaaaatctctcaaataaaaagagagaaaattagtcaaattgataaggaatgacagtgagttttgccttttcttggctctagttttgtatttgtaaagtcttattttggttgattgttagtgaaataaaatctttacttgcttagaaaaaacaaatattttatgtactactttcaagttataaaactgcctctaacaaatcaatttacctataattacagtaatattgtctttgttttatacgaggaatgtaaaatctcaaattgagtcattgaggtgatgttttacctaagatctctttataaaaattcatattattttttcttttattttttttaaaaatatatattatacacagaattatgatctaaataaatgcaagtgtatatgttaacagctaaagattatagatgatagtgtttggattgggtggatggtcccctctatagcggttcccaatatcagattatatgccaaatgtttcatcaacaaaagttagagttcgagattcatatgtcctaactttgtctccaattattatttgcacttctgtcccttcccttaatctagctcattgtgcctcattttcaacattatttcagccttaatccagtctaaaaccaagactattgttttcaatttacaactaattaatatctttacagttttttttttcttttgggctaagactaatatctttacagttgacccattcaaaaaaaatatatatatctttacagttgacaaacatacataataatgagaatttgagagagtgacagacacgcactcgagaagagtgtgtgggactgttatttggagattagaggagatatacctacttatgtggcgttgaagtgtttaaaatattataaagaaaaatataattgtatataaaagtgtaaattgtgttagatgtgtaataactaattatatttctattaattaaattatattgtttggttgtgtacaaaaattttatatattattttaaaaaattataataaaaatatttttttattatatctatttaatattaattatacataaaaataaaataattattcattaaaaaatatatttattaattagtaaatattaaattttattatattttttattaattaaaatgacctttttttttatatattttattactatat

SEQ ID NO: 2524 - DNA, 1182 bp, Cannabis sativa
agttttttacacaagattaattttatgttataataatttatacattccgaattgcttttgcaccttgtgttgagttctccatttagctagttttggtctcgaattctgccaacaaaacaagctttcaattaatttgggtttgtttctaatattacggtttatatatatttattttctaaaactccttaaactgagatctggaatattttccaattatttgcctattacgcatcaagtacattttccaaataagcaagaattctaattataacaaacactaggagaaaatagggctgaaaatgataatggtggaaagatataggacggtgcccaccagccaatactgcaaaaaaatttgaaaaattaccatttgaagagtttaccataatacccaaatgagaaaagacacccaacacttttagttcactgctttttttggtcgtgtccataatcgtttttgctacttttgtttatgttatagctttgcgtgcctaacttccaaacttcattactgccaatctctgtcatcaacattactttctaaaacagccactttaatcagtctacacgcagaaacattacattaaaatatgaaattcaaaagaaaaagaaccctcatacattatatttcttacctcccacgctaatcatcactgaacatatccccttacataataaaacccttcaaacctcactctagatctcacaatctcaaaccccattttcttaactcaaaaatttctcattacaaaaaataaacacatttagccatgttcaaaacaaaactaacaatcttgctctggctttctgcgtttgttatcgctctattttccatgatcatttctctccataaaatccctcttttcccaaccatcactacttctaacattagtcctgggaacagtttagagcattctatttacgatagaatcttcaagcaaagtgacagtgagaacttgttttctcaccttattacaagcatggtgtctactagtagtattggtggtcatcatcaccaccaccaaaataggaggaaacccaattgtgaccaaagcaagtgggaatcaagtttaataaacaagtacaatgtagtactcgttttgacagttgggttggatggctgcgccaatttcagcagtgtccaaaaggcagttgatgctgtccctgagaggagttcttcta

SEQ ID NO: 2525 - DNA, 1551 bp, Cannabis sativa
gagcttcattatcagtctatgggatcaatgatctccaaaggaaaatctttctgggggctcactacaaattttgatttcatccattttgacgctgcagctttgatttgacagataatgtccataactgacaaacgttttgttttaagtaacaaatggaattcaagagtattattattgtcatcattattttatatatatatatatatgaataaacaaagtggaggacacctaatccttgcttgggtttgccaatcattcatgcggttgattttctaaccagtttacaaagtaagtacattccattttgcaccatatgtacttttgttttgttttgcagccttgtgtatgggcggctgctgatattataagatatatgccaagacagatctaattcatgacctccctcataatctggtatggggcttctatctaaaacaaccaatactctatgtgctagctatctctctataactaatttaattaataaaaatgaaatggttgttatatatgtgttttttattttgaatgaattaaattacttaaatggggttatattatatgataatatataagattatgagagagaggaggtgggagaagatggggttttcaggttggtgaagaataatgattctcattaattcacttgtgtccaactccccatgtgaggtgtcaagttttttaatcagaaaaatacagataaaaaggttgtcagaaactttgccatacaatccggttgttttaacatgcatcaaacttaattacatgtatgtgtttttcttgtgtataagtttattattcattaattttcatactttactataccattgtttaaacttacattcatttatttttaatttaaatttctgttataaactacagaatctttgtttggtttaaacccttcttcatatgacccactttgacatatttcgaaaatcttttttagattgaaagaccaaaaaaacgaaaaactacttgcctttcttaaattttgcttcaattattccatttatattgatttgcgtatctcttattcaagtcaagctgattcatttttctatttttatttttattttttacgattctttctgtgctgtgattaattaaactagatggtcgttttcaagtggattggtcgaataaggcacataatgaagattaagtccaactatattccatttagacgaatgatttgggtgttaatatacgatcttcattatcttatatattcaatatattgtatcgattctcaacaaataaattgaggatgttagtactttattattaactggctatgaaaatttggaaagaaaccaacaaagtgttgtttgtttgcccatcctatcaaggaaatcaaatatattgcagaggacttttcatgtattttctttttaaaaaaatatataattatttttagattgcaataatgggtggcattaactacgaactctaatctttataatatgtcaatcattaatttccaatcattagctgtaattgaaaatccaaactagatgagaaatgattgggtgatatatagcaattaca

SEQ ID NO: 2526 - DNA, 3406 bp, Cannabis sativa
ttttctgtgattaatatgtgtgttacatttcccttgtcgactaattgactattttaattataatgaattcaggtacaaaaaagaaacatcgtaaagaagcaattgctgtgaggcgtcgggagagaatgcttcgtcgtggtcttgatcttgagcaaataaacttggtaactaaatatattatgaagacagttaattctaagtcttctgttccttcccagtttagataatgcttcgagtgaagttgtataatgatcattaaaaatcttgaagcttgtagatagtaataatacccctcatataaattcagcaaattttgttttgtttttcctgaataactctctatattcgatactgagtgaggttactttcacattgctttggacagaaactggaggaaattgttttggatggagttgatatatattcatttcaacctatgcatgcccgtgattgttcccaggtaaggtttatcagtttacgttacagagttgatttcattcaaacaatataatgattatttcagattagaagttgggggctaaccctagtcttctgtttcacgttactcctgtgccttaatattttgcaagatgctctatactattactattatgtcttgaacccttggattaatagcattttcggttggtaacacttcaggtacgtcgattagcttcgatttatcgcttacagagtggttgccatggctctggcaaaaaaaggtatgtaggtcccttttgctttctttatgacatgaatacggtatatgcatacctttctgattctagtttccattttgttctttctcaagatttgtaacagtgacacgaactcagcacacatccatgccgtcttctagtgacagggttcgtctggaaaaggtactaatgttcaatatctgtgtttgttttgctttttttgtaataattttctgagtagttacatattgttttcaaagcgtttgcactaagagtgaaaatttactttgtggtttcttattgtacatgataacttaatggttgatttttgtaatttcagcttataggagctggcatggaggatgctgatttttctgtggttgaaaactccaacataaagtcaatgagtggagatggaaaaaggttgaagaaaattggaagaggaactaaatttacaaggccagtggacctcggagtatctgctgaaagaaaatcatcagccaagcgtcatggcagaggcaatgagagtagagaaaagggaaaggagacatatgccaatcaaccggtatcatttgtatcgagtggtgcaatggtatctgaaaaagctgagtttacaactgtagattcaatggagatggactcatcaagtggtcaaaataatgttgttgctggctcagcaagctttggtgcctttgaggaacataccaagggttttggttccaaaatgatggcgaaaatgggatatgttgaaggtgaaggcttaggaaaagatggtcaagggattgcaaagcccattgacgtggtcaaacgacccaaatctcttgggttaggtgttgagttctccaacaccgtcgatgaccctgcaacaagtaatccagcagcaagtagtagtaaaccactaaagaataaatctcaaaggattgaagcttttgaaaagcacactagacgatttggaacttttgagaaggaatcccaaggatttggatctaatgggaagaacaccaaaggatttggttcttatgggaaggaaactaaaggatttggatcttttgagaagcacaccaaagggtttggctcaaagatgatggcaaagatgggttttgttgaaggcatgggattggggagagattcacaaggcattgtaaatcctctagttgcagtcaggttaccaaaatcaagaggtataggtgccaaagattagaaatattcactgttttttattgtaaaaatttaaagttaaagagctttgtcatgaaatcatgacatgatttaattgaataaaactatagatgattaattttcatcttgttcttctaccatgtacacatgtgacaacagatgattttatgtttttctccatattcctagtgctgttttttgcaactatgggaaatgggtttgattcagttctagcttagcctcatcaagatgcccatccattttatacctgtaattaccctttaattatttttttattaaactataaaaagtaattttgaaacttgtattgtatgacaatgatgtactccacttttgaactttttaagtggttgtgaagatcttataatcatgatagaattgatgtgtattaattataagtaatttggtttttaatatttctttgtagaattgaatcaagtgatgagttggttgattctgcaattttatattttgttagaaaggttttgatgattctgcatgtttttcataatgtaaaacatgtgtagctacgactgacagaaatattctttttcttaaataatagcaattattattcaatcattcgatggatgaatccaaattattcttcttaatacaaaaatatgtagttataacaaatgaccagatactcttatttaaatagtaccaccattagactccatgattgtatattatatgggttattttgattttttttttttttttttgtcttctttctccttggagtagttatttataattctcttcagtaaaaatgttggaatagtataaagaatttcatataaaggacctatttcatcaataattatgacattattattgctatatttattgatggaacatcaatataatgaaaatgattttatatataagaagaagaaaaaatgtgacaagtgtcctatgttgctgaatcacatttgcttctttcttaagtataatttcccatgtttgctcctatggtggcatttcttcatcacttatcaaataatgcacctgtgagttgtgacctctcaaacttcaatcaaatttgaatttaataaataataataaaaaaagtgaaataattataagaaaattatgaataaaaaaattgaaattacattaatgtagttgtggtgtagcttttaagtttggttagactgtttctgtttgtggttctggatcatgggatacaatacataataaacaaaatagatttatttttaataagaagaatttagatatttagtggaaggaaggtacatcatttttgtttctttcttaccaaatggtaatataaaccgatatttttatttattcttttgttgcaaggtacaattttgatgaatttgtatttattaaatatataaaattggtattagctgtccttatgcaagctacccaaatatacatgaaagatatattattattcaaaaaagttgttaaaaaaaattattttgtagatttagaaggtgagtaaagctaaatacataaattgtttacatgta

SEQ ID NO: 2527 - DNA, 1535 bp, Cannabis sativa
agagagagagagagagaatattataacaaagggaattaaagcttagttacatatggtgtttgtgtacatacatacatgtccatctgcaattagcagccagcagcttttaaaaatttgtcataaggacttgaaggtggtagcttgaaagaattattatgtccatactcatgtgaacacagggcaagctgatctctgactacaacttgctccttctttatcaactttaggccgccatctgtatactcccttgtctaacataataacaacgaaaagtgtcagtatgtctgccttttatcagcacaaacaaatagctcaatgcctgctaaatagcagttttgagtctaacaacaaaaaggagaaaatctaagtcatgtacatggttgaacaataactaaacgcaattttaagattgcataatattccatattccaaaggagttcaagaccactttcaattttcatctgaaaggaaaatgattaaaatggtttgtctaaaacagaaacattacaagatgttagaaagtgaacaaaagacatcattttatttttgcctgattcattgacgaaaatcttgctaaccttatctggaaaggtgggatagttgatttcattaacactggaaagagctagggcatttgcttcttgctgctgcttaaaactatgtagtactgacatcttttgttgtttaccagttacgagagcttcgcattggtctttcatctgatcatagggtattggtgttgaagaaactgggaagcttgcaacttgtcgcgctgtttccaaaacctgttggtaaaattataaccaagtttatccagtgtatttgaaaattacagcaaactgtttgcagtaaaactcaaacataaacattacatgcaataaaaggctagcctttcaagtaagacttagttatggaatatggctttactaaatgatatactctagcatcatatttcattcaaaccacagattggccctgtcaaaggcttatatgaatcaaagtgcccattttaatgacactgaaacagtttaaagaatcaacaagctccctaagaaatatttgatgagatcagacattttacaatgttcataaaccatcccaaaaaattataaattatttcatgttgaaactgagtattagtcagactttctcccacttaatgtgatttaagttatgttttcatcagatactatattaggaaaacaactcttgcattttcacttggtgcattaacatccttgggaaacagctcttggactttcccttggtgcatatactcacacatccttggaactaaagctattgtcacaagattataccttatacaagttaacaaaaacatataccatgttcgactatgtcttaccgattctagaagttgattaacactcaaaatgtcaaggctgctgatagagattgatgttttgcgatcagactggcttccacttggttctggaaaagcttcttcatctgtcaatgcacctccaggcatcacctgatagaaaatcttgtcagggaaggaacagaaaaaaaaa

SEQ ID NO: 2528 - DNA, 1678 bp, Cannabis sativa
aaatctgggttgcgagaaggaacggaatctaccttttcatttgttaaacataacgatgtcctttattatatgcatgaaatacattttgttccatattttcttggagagcaatgcatttatgtttgtatgtcctattgcgtattttggaagatttctatttaaattctctataaagtgtcatctatggagattactgtctgattctgaactgcattctgaatattttgaacttgtaggggaggttactgacaggggcaacaatagggctagttatagctggaggagcttacgttagtacagtggatgaagcaactttctggtaccatattgtgatttgaatcctaagcatggcagttgatagtatttttaatctcatgcttgtcatttcctagtcactcctttcgtgattactgctatcagtaattaaaatatgatctatgatgataatatacgttcgttttttcctaaggcgatctcgatattcatttgaatgtcttccttaacatgttgctaaaggaggaaaaatgagcggaaacttaactcagatatcctttaaattctataacaatgttactacttttttaaaggatatttatatataattacattttattagttcttgcatgtattggattttcttagtactcttttagtttgtggtctgctgtgacatttgaattactttaccttgaagacatcattctaatcagttaaaaaaagggtttgtgtttctatggatttaaaagtttgataccagtgtaatttgtcgctgacgttgtattatcaaacctatgcagtggctggctattttctgctacaaaattggtgaatcctttatttgccctgctggatccagagtttgctcacacactagctgtctcagctgcatctcgtggttgggttccaagggagaagaggcctgatccatcaaatttagggttagaagtttggggaagaaagttctccaaccctttaggtcttgctgcaggatttgataaaaatgctgtagctgttgatggattacttggtctaggctttggctttgtagaggttggttctgtaacccctgttccacaggagggaaatcccaagcctcgtattttcagattgcgcgaggaagggtaaagttaaaattcttgttaaatacataaaccttgtcataaggacatcagagctaatacagacttttatattcactgtaaaaaagtttgcagatgcgctttaacttgaaatgtacagagtttaactgctttgaagttgtgaaagatatagcatatgtctctgtttatgtgctcagaaattgtcttaatttttcagtgcaatcatcaatcggtgtggctttaatagtgaaggaattgttgctgttgccaagcggttgggtgtgcaacatggcaaaaggaaattggatgaaacttcaactgctacatcttcctccaatgaagatgtaaaacaaggaggcaaagctggtcctggcattttgggggttaatcttggcaagaataagacaagtgaagatgctgctggagactatgttcaaggagtacacacattgtcccagtatgctgattacttggtaaaccttcatgtttactttataaattacagtgattgtattattatcttttttaagataaatgtcaaatcttttctcacaaaaccaatgtttcaactttcaata

SEQ ID NO: 2529 - DNA, 1775 bp, Cannabis sativa
gggtgtagtgcttggattttggagacctgatcaaaataatttcaagccctaaaagaggctgaaatttgagggcaaaatgtaaaaattaatttggagccccataattaggaggaagggctccaacttagacatagaattccctgcaccctgcaccctggagccctagagtgatgtgcaatgttcggctacaagatggatgaagcttttagaagattctatatgtttgcgtaaaagacggataatttaactatctcttttattttagagatatttaaattttactttcaatctttattttattttatgaatattatataaatatattgtaactgatatcaaaatagttagatttataaatttaagtgtttgttttatttgtaaatatcttcaagtttaaatgaagatattagagacactatacctataaatagttatttatttgtaaatgctgaacttcgaaaactctaagaatccttgcaaacttaaaaactcacttgagaagagaatttttggtgaatataactttgaagaactattttggagcattgagatcaataaaaatactaagtggccagcctattaccgtcaaatgaggcgaaccactataaatctagtgttcatcattttctctcattatttttttatgtatggttacttgaaatctattatttttgttttcaatcgccttattatgatcttcttagatctgttgaccaatgacctcatcaactataaaaattaaaaatatatagtttttccttatgttcccccgatttacttctctctccctcttgctacctttgcacctctagttcttagcctaccaacgccatgtccagtctttgaacctctaagaacctaggcttgaccaacctcatgctcaacctcctcacctcccaactcccaagtaatgatattgttgactcagaaaatcgctaacctagtgtcgtttgataagtggaagccacacatagagagcagaaaattaaacgattaacaccacgattttatagtatattgccccaattcattggtaatggggccatgtctcctcgaaattttattaatttgatcaacacttaaagcattcagtctaagtcgtgatagaaaaaatgcttgcagaagcctggcttagagcgtttggccttaattcaggaaaaaacatgcacttagtttatcagatctctattgtaatgtccccactttaagcctcaattgggtgtccttccacgaaattatggctctaatacacaggtaagtcattttggctgcttcttggagtgacgactgaactttcaaaccaacatgagtatttctaacatgctttgtcctcactcgcacgcttcttaggaaaactttccaggaggtcacccatcccaaaaatactccaagtcaagtacacttaactatctaggtagtactaattaatctacttaagccttcttcaactatctagtcacatgcctacatagtctaagaatcatcacacgtgaccctccccaagcaatgtgagattgcacagcctcctcagtctttcgcattacaaattacgcgcctacttatgttacatctatagttctctagagattacaaaatatgaataatgaattgagtgagcctatttttggaatacgaagttgtatatttacatataaattaatagtaaaatattcaaataaatattttatttgtcttcaaattgatctgaatcatgagggcacaccatccaaatattgaccatagatcttttaagtttgtgttggattttatgccct

SEQ ID NO: 2530 - DNA, 6132 bp, Cannabis sativa
caaagaacagaaaatcatactctgctcacttattttcttctctgaaagcacaaaagttctttttcaaaaataaaggtgtttgatgagcctataatatagaaatatttgatcataaagtggcccccattataagttggctgcattctttggtttgacttgttttccagcatctttatatcctttgcctaaacatgttaaactcactacagtaagagtatgtggactaccaatgaataactttcttttcggggtccacttgttttaattgtagcgaaccaactattctttgtagataacagaaaatgaagaccattagaccataaaggtcaaaaaatttggctttggagtttgaactaagcttacaatagactagttccttcaactggtatggctttaatttttctttaaatttctatttctgtttttttatagcattgttttcgtttgtttcattatgggttatgtatttttcttaaaaggattagaaatgctgaagagaattggtctggttttggtgattgttttggtgtcatggggataccaggcaattcaccctccaccacctaaaatatgtggctcacctggaggaccacccatcactgctcccagaataaagcttagagatggaagacatttggcctataaggaatatggtgttccattaggagttgccaagtataagattatctatgttcatgcctttggttcttgcagacaccatacagtggttgcaaccaccctttctcaggtactctattatattgcatttgtgtgtgttgtgtgtgtactacatgtatgtaattatgtgcccttttatgatcatgatcttctcaggaagctattgaagaactaggtgtgtacatagtggggtttgacagaccaggctatggagaaagtgacccggatcctaaaaggacagtgaaaagtttggctttggatatagaagagcttgctgatcaacttggacttggatccaagttctatgtgattggattctccatggggggtcaggctatatggggctgccttaagtttatccccaataggtaagccatggcccattattccctttggttaacacccattgtggaaattggaaactgagtaatatctccaagttttcatgatgatagttatagattagtaatgggaattgaaacattaacagcaaaacaaaaagggaatatttcttgcattagtctaaacatggaataaaaataataaaaaactcctttcccactatacttcagcgtataatctatacagagtcttcaaatatgaaatttgttcaaaattataagtttggaatgttgacaggcttgcaggagcaggactcattgctcctgtgatcaactactggtggccttcttttcctaaaaacttgtccactgaggcctactaccaacaaccaccacaggatcagtgggcactccgagttgctcactacctaccatggctaacctactggtggaacactcagaagttctttcccgcgtctagtgtcatagcgagtaatcctcagacactttcaccacaagatatggaaattatgaagaagttgttttcagcttctggtcctgatatgaaaacatacatggtacttgataaaactgaattatgaactacatctttattccttacagcctagcctagtcttaaatgaaactagatcatgtagtaatgttgatttagctaattcatattgctcaatgattgtgtttgcaacaggtcaaacagcaaggagaattcgagtcattgcatagagatatgatgattggatttgggagttgggaatttgatccagtggatgatttgaagaacccttttcctaacaatgaaggctctgtccatatatggcagggtgatgaagataggcttgtcccggttatgctgcaacgctatattgctagtaaaattccatggattcactaccatgaattatcaggtgctggacacttgtttcccttagccagtggaatcaatgaagctatgatgaaggttttccttactggacagaaatagctttgcttttgcagttaaatattaatctctcttttaaggttgttaaaattcaaatcaatccatctaaaccagaccagatctgatatactcaattaaaattagattggatgtagaatttcgaaaactgggtagaacaatgcaatgatagagtgtattacaaatccattaataaaaaaaaatagacaagttgattgaattttaatatatatctttagtgtttgaaaagattacctataatttgaactgagtacatttcacgtatttgtttaaccacttaagtacacaataacatatactagaggtaattaaagagtttcaattacacactttaatttcaaaaccacacaagtccataaaatatttttcattaccaactcatttgccaaataataaaaataattatttatatataattatgatttgacattcaaacacacctaaataattttagattttaaaattctccgttactttagtattattttttgtatgcttttgattaagttaacctctttcctaagtcttgtaaatttaaatgaggaacagctcaaacggatagttcaaaattggtcaaaacatgaattttagtagtaattataaatgggagtgagccaaattttagtagtaaaaataaacaaataagtgttttatttatcaaaagcatatgttttagtatcaattgacagcagtacattttactatgttgttgggaaaaagaccatttgatattaattttagaaacaagtcttttactaaagatcaccatcaaaaggcaatattttataaaggaaccccatttgagatttctatttcaccaaaggagcaataaattacttattcattgatgcatcaaagaagacaatagtacaaactgttttggacaaactcagataaaccataaaaggattatctacactacatgagctaaaactccatgatcgctaagacaacagcctcagcttgacgataagaagatcaagctcaaggaaatgatgttttatacttatttcggcaacccagtttccgggttaagaagagcgtggctttcatctgaaacatagactggacctttcccaggtctggtacagataaaataactcacatcgcctcttgatttctgagaaggaatgttatccttgatttctggtggtggtggcaaagcttcaacatcctttaacccctcaagcccagcatcttgtagaattgacttgtcaccaacaatgtaactgaagataaagaaaaccaggaagaagagattgttaaatagtgtctccaatatgcaaagtgaagggagaaaatgtcaagtggtgacaatagaatccaaatattaataacctgctcaaatctgcatcagtgtttggaggaaagtggtacaggagcctctgcagcaaaagaccagcaacttttctgttgtgtgcaatcataacagcattcggccccgcatcaaaagtataagccacctgaatattcagtaaacatcagttgagctcttcacattggtagcttaagatttaagacagaataagaattagtagagtgtagagccaaaagggaaaactggtttggagatgaaaatacataaatcccgtgagaaattgacaagacaagtataaaatcaatgataaatcatgagattctatgagccaaataccagtttaaactttaaatatgagaatacagtgcttttccaagtacaatatgttcaagatgagtaaagaacactaaactgtcaaagggtaaatgtgctttctaatataacaaaaatttgataagagttacatttttataatttatgatttacttcgcaggtttcgattggcataattgtcattaggaacaaaaatcaatctacacttagctccaagattttaatttggaaagatatctcctttagaacataaaaaaattacataaaagagctgaaaaaattacagtgatgcgaagcactaaacccacagtcaagatacgttttattgagagagaaaacataaatttatacctggggtgttccttctgcacgattccacttttcaactaggctgattatcctgaaataagttattttctcagtatacaattcaagagtctaattttgcattcgataaacaaatatagagcaaagggacttgcctatgggatgtgtcattcatgtagaatatagggggacttgtgtctaggcacactgcgtgaaattggttgctatctgcacaagtcaattgtgcaaatgatgcaaaatcacgatttcttattgcttcttccattttcaatatacgttttggtactacttcctagaacaatgcagcagaaaagaagttaggattctcaacatctcagagtgtcaagaattttagcagactgtgattagtttgacaaagccttaactgtgtgaaggacaaagagaaaacgagatatacctttgccctatgctgtaaaagcaagcttgtttcaacagtctcgcgcattcctgatgtgctacttgtttccttttgccgtgaacttacctggatttaacatagtcaataaatggagtcacccaaaatgatactagaagaaccataggtcctaagacaaaattcaaccaaactttaaaatataattttgcctctgaaggacataatatacaagaatccctttctacagcagtctcaaattcaggatctgctttcatatcaggatttccaatcatcaacacaaatattccaggaaactaatgagatagtctaccctaacaactaatgtaagaaataattacttcacagtatcaaaaaccacaaaactataatatcatcacattaaaaccaaaactgggaaaacacacaagtctatcaactaatagaaacacttaaagggaagatgtataccacagcaacgattataactagttcatcccaatgtttctcatctgctagctgaactgcaacactgtcacttccattctcttccttaaatattcgaaaaaaaaaacagtatgaatattcaaaaagtatgaagtgttttacagtaatttagaattaaaggtaagtgtgagaaatcaaacatacttttcccatgatccacttcacaaatccaccatataaactacggcacgcactgcctgaaccttgcctgtgtgaataaaaaaaatcttaactattatcaaccagcatgcccaatatccttttacaaggagatattaaaccatttaagttgtatgcgtacaaacccacgaaattaacatcacaataatgataattagagaggagagataagaatccaaacacatctaacatcaaaatgttataaggctaacttccatcatactatgtacatgagtgataccctaagtaaagatagaagtgggttacgtccttgcgaaattatccatgatgcaaacttccagaaatttaaatgcaacataaaattattagtgaagaaaggaatcagtaccttgcaatagctgaaagcttgctctgatcttcattcacgttcattagcttagcaagggaaaaaactgcagataaagaacagaaaattctttaatatttgataaataaggtttatttataatagttccagcaacaaaaacaaaaacatgttatcgagctgaatatataaataacgagtactccaaaaaacataaaattatgtcaaataataaaacaaaccatactcaaaatttgttgcataatgattaaagataaatcaaatattactttacattttaaaatcaagttgattgtactttagtactatatagtatagacaacacagtgaaaactatggttcttttagctatactatagatgaaaacgaaaaaaagaaagaaaaactcttaaaacattaacattatatctgtatgaaaaatagaaagatttaaaattggtatttaccaaaacaagctaaaccagcagcagaggaagctaatccagcagcagtggggaaattgttgtatgaagcaatgtgtatatgcaattttccccagtcctcctttgaaattttgatacccttttccttgtcctcaacatcaccagcacgactgcgaagttcccttagacaactttggaacctgcctccggaaagggagatttcctacactaaccagaagtgtcacaaatcagcaagagaccaaaa

SEQ ID NO: 2531 - DNA, 1156 bp, Cannabis sativa
gggcataaaacccaacagtgacagtatcatgtatgtgaatgatgcttctcagatctcgtctgagttagaagagagatttcaccaaaaaaatgctcccagaatttttgaggttaaacgatcgatgcagagtctaacgtagggatcaagtgatgttacgtcctattatactcgacttaagggtttatgggacttattgcaggaatacagaccacaacctgtgtgtacttgtggagctttgaaaattattcaggagtatcaagatgaagataaggttcttgagttccttattggcctcaatgaatcttacctcaatgctagatctcagatccttcttcaagatcctttacctaatgtgaacaaagcttttgcttccataattcaggaagaaaagcaaagaggaatcattattcctcaaggagaaagtgcaaagagtcctcttgaaaattcaagtcagtttgctgggagtgctcaaggaaatcgaaactataatcggaatgataatagatctgataacagatctgacaacagacaagatcggtttgataatcgacctatttgttcacattgtgggatccctggtcacactattgcaaagtgctataggatacacggttatcctcctggacatcgactgtttggaagatttccaagggaaaatcctaagctagggaatcaacaggatcgttcatcagcgaacttttcatctggcagcaatgttaatgaaggagtgagtgaggaacaaatcttggctgtgcaatgttaaaggcttatggctatgctaacacaaaggatgcaggaaagtgctcaacaatctcagcaacctcaacaatctcagcaatctcaacagcctgagcagtctcctgttgtgtcaaatatttctggtaatccctatcctctttctaaatctagctggatacttgatactggtgctacgcaccacgtttgtttcaatcctaattggtttcactctattcaacagaacactaatttgacacatgttaaactgccaaatggaaccaatattaggatatctttcataggaactgtcaaattgcagaatatcaccctcactaatgttctttgtgttcctgaattcaaacataacctgatttcagtttgtgccctgactgattctgatagtttctcttttcttttt

SEQ ID NO: 2532 - DNA, 1019 bp, Cannabis sativa
atgacaattacacaaaaagcatgactgactttaatcatcaatatatgttacttattagtaattttttaggtttgaagtagaactgacatgaaactcatcaacactaaccactagacaccacctttcacactctcattctcatttaacctttttaaactctcactttttgtcactacaaacacatattttctttttcttattctcttacaacttattataaaaaaaaaaaaaaaaaattcatggctttgcccctaaacttcttgttactccctcttttcttcctagctatgctgattcttgcaaccacgtgtcatgcatcccgcggcttgttggatgatgtaaagaagccctcatcgaccatacacctggcagcatatgattcttcaccattatctcctactgaaattatgaatgtaactaaatttttctcatttccatccattccaaaaattcccacaatgcccacatttcctttcattccaaattccattcccttgattccccttcctcctggatttaagttaagtgcctctgattctgttcttttagaagatgagaaaacaccttcagaatctggtttcccatgaaaaccaatattaaggaagagccaaattgtagttcgtttatgaacaaaatctctataggtttctctagctctctctttcatttcttaaacatgtagtagatgatggttgattttatatcaatttctctataattaataaataataatagaataagtttctagatttgtagtagtaatctgaatttattaaaaaaatatattcatgttcatatatggagtgatttacttgatactatgcagtgttgatcctatggtatggaacaaaatttaattttgggactcttatatatagtttaattaaaattaaaataaaaattgttagtaattggtaaatttttttttactagaggagatacaaatttaagaccttctcttaaggagaagtgtagatccaccaagctatgtttatgatcccttttttagggtactcccg

SEQ ID NO: 2533 - DNA, 604 bp, Cannabis sativa
ctacggacccttcagatgacgccacgtaccccatcctgtgcggtccagatcattcgttgccaaaatcaaattctaattaattaaaaataaatttgagcaaagaagaaagagaaactaaccgagagatgatatgggagaggggaagagcctggttgattaggagcttagattttgagagagagctagccatggccattggatcacaattagctgtttgatatggtatgatccaacggctgagatcaactctattatgtattaatagtgaaggagaagagaaagaaagaagggttattctctctctctagatatctcctttaggcgtggagggacaggtattttttggtgttataaatagggaggttaaagttggagatgaatactgaatagtagtatttaaaaaaaagaattaagtggtgagtaataattataattagtgcttaattacgcatgtgtaaacgtgtttaagtggtcctatgttgtaaagacacgtggaactctatattttagagccgtgttgcttttgtacaatacaagcatgcatgtgtcaaaaaataaaaaattaaaatgttataaccataaataaagagaaatttgataccta

SEQ ID NO: 2534 - DNA, 1210 bp, Cannabis sativa
ggtacaaactttgaaccagctgccgtggaagaatctgcaccaggattcataaactcgagtaccatattatgaaaactgagagaggaatgaatcaagaaaaaaaatggaactgttattaactaaagtaggctgtgcatattgcagaaagaagaccaccataacgacaatccattacatttgtaataaccgttgacccaacagtcttaattttctatattactgactaacatcttaatttcagtatgtttattttagttttgttcaaattggttacttaggctctcctcgagctgaagaaagaaagttattagcaattaaatttttgagtgatgtaaaagagacacatacatcttgtgaatgccatggcgatgggatggcaactatttttagcctcagaagttcatatggcaaaagaggagaaaaagaacttgtaaatcaatgaagtggatctttttattgatcaaatgaatttaaatttgattcttttgagaatgataaactatttagtttgatttatatttatttatttaattcatgttgtaacactaattctctcctacgtaatgtatatattttggcagcaactaataatttcttggtattcactctttatttttggaagcatttgatgatattaaataatttaaatattaactaaaaattattaaagatctaaagattaaactgaaaattcaggatttttaaacttaaaataataaaaaaattaatcaagaaaagttaaaatataagttgctttgagttttgtttactttttagaattttaatgatttttttttttttggtttcaagattatattaacattatattaagattaatttttcttttttttttggtttcaagattagatgttatatatatatatatatttttttcttgagttttgtttactttttagaattgtaatgatttttacttttataataattattgaagtaaaattatttaccagtgtgttattttagtcaaactcaacacttaaaagagggtagaagggtggtagaaaaatattacaaaaaggattatttaagactgtttttaaagcaaatcacattctgagtcaattatagatagtttaagctatatgatgtatcaatgcaacttcaaaaattgtagtttgtgtcagaaacatcattagtagaaaaaaatataatgaagaaaaaaatgcatgcactgaatgaattgttgacc

SEQ ID NO: 2535 - DNA, 1051 bp, Cannabis sativa
agcataaagaagaagaacaggccaatgaaccatcttattcttatccataaatggctttcttggtccaataaggtccctgaacattggtttcccaatcttataacctctagattcaatagctgaaagaaggtcctacatgattgagcaaagactaatatatgaggctgataacaattaaatgaaatcccatatcagacattgctaaacaaatgaaaataatgaaggagaccttagcttctccaacagctttggaaacttgagcctggcgttgttcttgttcaaacttcagagaattaatctgcctcaaaagtttcttcagttcttggttatccgggtcatgtttaagtccattctcacaatgggatttggcctcagataacaagttcaatgacaaagacgctttcgcagctcgatacaatgcctagttcaacagttattgaaatttcttcaaacatgttaattattaaaaaaattatagagtgtttctacagtacacctcaaaaataagtgtatcatacaccccttcatgtttttgatattcgaatagttataatttgaatttatgatgatttatattgtagttatttaagacaatcagcaaaaattttgagagattccgtgtaattttcaatacataaagtttcaaacagttatttcacataaaagagttttaaactacactgtcatatacaaaaattaacattaaaactatttagatatctaaaagtgcaaataattatatatcaaatacagagcaaagcaagaacacaaaagggtaccttgacattagtaggagagagcttaattgcatcctcagcatcagtaatagcacgtctgtaattaccaagcaaaatattgacatgtgctctattggaaaggataatagaggtctcagaatcacctaaagctttctgattaatagctctagtgtaacaatcaacagcctctgaataatgctttttccccattttcacaaactcattacccttttcctgtgaatcccatcaaaaagttttcaacttttcaatacccagaataaaacccatatcta

SEQ ID NO: 2536 - DNA, 1692 bp, Cannabis sativa
ggctcctaaacttattgatcttgttgctacggtatgaatctcctgtctcaattctgtatggtccaaggaacaaaggacaacaaacaactaacttgaattgtccttacctctccttcctgcaaccacaaatgcaattcaagttaaatgttgtgagggagatggagcaattatccgaaactgcaatgaccaagtaattattttctggccatgtctaagccttttgatggtagattacagtcaaagaaatggaaccaaaagcagtgttctttggttcggtctggaaaccagtggtatcactttttcttcagtcagctgtccaccgagctgatgtatctcatcttctttcctgttttcctggacacatcaatcatgattctcaatctgttaatgagactgggaagaggaggttttactggttgaaagatgttgtcaaaaatctctgtacttggcattgaaaaagcgtgcgaaatcaagaaaaatatcttgctctttcctatccagcccatcgtagtttgttcttaagacatcttgaatatcctcaagaggaacttgttggaacttctccaattgcatttgccagttttctttggttggagaccgaaggtaacgaaggtgagagcccaaaattttgataatcaacggattgtgtccagcatatgtcactgcctttttcgacagctctacataatcattatccctcggagaattccctttgaatgctgtcaaattaaaaagcctaagagcttcatcctcatctagctgcttaacttcataagtttcatcagcttcaatagtttttagcacatttttatctctagtcgttactatgattcgactcccaatgtcaaatcgctcatcctcactaaaacgatcaccaattaagtactcgaactgctttgagttacttacatcatcaagaacaatcagtacctttgtagaacgaagtctgtctctaatatagtctggtatagatggtgctcccaaatctaagctttcttcttcttttaatagttttgtaataagctcttctcttaatttctctaatccatacttttcagatgcttccctaacatttttgagaaaggaacaacgttcgaattggtgaaagtaaagactgaacactgcatcagcaagagctgtttttcctatgccgccaattccccaaatgccaactacaccaatatttgacgagtaattatgactcatcaacaacttgatttcttcaatgtgtttttcaattccaactaaactcttgaaagtgttgtttgaggatacccgtcccagtttctttaagacatctttaacaatttcgtctatcaattttggctccgggctgcacatgaagtaatgacagtatccatagttagtcttgtcaagaatgtagttagatttgcaatgaatagacatataaaagtgtgacttttatatgtgtgctagtttgtactttgtataggtgattctgatcttaaggtgctgctcacttctgattaaacaaaaaccagtagaggaatttccgcaaatgtgagggatgccaagaacatcatatcatttgaacaattaaagtggtgtaaggatataacaatatagatgaacaggggtgaaacaccaataattttgtgcttctcacttaaatatacgtatgctgttcttgactgttgatttagttcagaataagtaccacataaaactcat

SEQ ID NO: 2537 - DNA, 1442 bp, Cannabis sativa
ttgcaaaaaaaaaaaaaaattagcaggtctcactatatgatgtggcatgaaaaaatagaaaaaaaaaaaaaaaaaacagtatgctccaaaaagaaaatcggggtactaaatactaatttaattaaaaaaaaataaattagtataactattatagttacataattattaagtagtcaccaactaattataatttagatcttatttttatttataattactttaagttagaatttaattttttttataacaaattaaaaattattcttaaataataaaaacttctactcatgaagtatgtagccaaactaaatcttggctagactttgtatatgtctatacgtaaaaacgcgtcacatgtttctcatttgcttcctcgatatatacaagtaaagtggctttgtttgtcctttgaggtcattgtgaagtgcactaacatctcacatgtttttgtccaatcacactttatgattgttgttgtgacacttttatgtgtaaatattatcattattagagtacactatagtgaaccaaactagattatgcctccatacaaaattcaatatagattaaacccaagaggataatgtgtattattagttatgtgtgaactaataaatatatatgaaatagtccgacgtgataggagatattttcaatattaacaaattaatcgaaaattggtggtggaagtggaaccttctttagtggcaattgatagtgatttatgtggactcttccgagtgcagcttatcaattccaatttgattaagatatattgataggacttgatgatgatgattcatatatgtgttttcatggccactttcatcaccatacagctttcaactttagtttatctaaccaattttcagaacaaacttatcgatataggggcttaaagacaaaatattcttacatcacctccattaatattctttggtaccatcgccaatccaaatcatccaaataatgcaaatttaacatttaaggttgattatagtccaaaaacgcccaaagagaaagagttatctttcttatcctttctattaattatcaataatatttatatttacaaattatttaaatattctttaattatcatattattacaaaaaaaatataaaattaaaacactcaagagtgattcctaatggtggaaaactcaataggaaaagagaatattaagggaaatcattcataatggacataaaaataaataagagaattaatagtacaaattatgagaatgcctgccaccaaactatatatccataaatgtaaatattattaatatacattgttaatgatgaaattaaataataggaaaacgacaaattgatacaaatgagaagaagaaaaaagttgatcatcaaccactttatgtatggcatgaggcctctttcttctatctattgaaaatcatttctcaaaaaaaaaaaaaa

SEQ ID NO: 2538 - DNA, 1387 bp, Cannabis sativa
aaaaaaaaaaaaaaaaatcctgccctacttaattattaacatctcactcatactttaatgtttacacataatggtctaattagaatcattaaaagaaatcattagggttaaattcatttagatactaataataaatactacagcagcttgaaaaaatgtaatgataattattacacattattggttggtcatatatattatatattatgtactgtgccattggtgcgaatcttagtaatggtaattagtgattagtaattaattactatgatatgactacaagtgagatagctttgtcattttttttttcttcctcttcttctttaagaataactactttgattgatctttttttttttttttcataatatgtagacaagagtgtataaatttgactaaagcatagccgtcatgttaattaacacacaaaataataattcaataaataatcgtaggtgtgatatttattcattcaataatgaaaaataagagagttgttggcagctagccagcactagaaaaaacattaaagataaatataaaagaagagggcacagatgtcaaaataaaaatgtttttggtggttccctacattctatattttgctaaggtttggaaacttctctctctctccactctcccctcttatttggtacctaacgtaattcgtaagcatcgccgaaccctctcttctttcactagtgtcgccacataatgacaaaatcattccattattactctctctatctagtctcttcccaacccaaattattattatttctcatatatatttacccttacctccttcaactcatccaattacaaaaattaattcttttactttttcccatttcatttctcaattgggttaaaagataaatggtactatagcgaatcacgtgcatgggacgttgtgctaactaagcctatatatatatataatacaccatatacatatacaattatttattttatttttcttacagaaaaaaagggtgtaaaaaaattagagcttttgtctcgtatgtatttacttttaagcctaggtgtccaaaaggtccacacagtccacaactcctttcaactttatgatcattacacatgctatgtgaacatatgtatactttgattttattttattaaaacaaaaaaagagagagaaaagaatatgcttcattcattcaccattgttcaatctaacccttggatttgcttcgcggtagtagatccaacggtttttgtgctagtttgttaaatcaacggctatgattcgctcgttgtggcgggaaaattgtcccctctaaccctcatcatcctaaaaagaaattgaggacgaggaaggacagatatttattaatttccttaatttatgtttggatgagagaga

SEQ ID NO: 2539 - DNA, 3103 bp, Cannabis sativa
gagattagatacacatcatagtgtgtaaattaagaatgtgtctatcattactcattcttttagggtgtgatctgtggtcctattttggttaaagcctaaataacaaaaagataattaaagatcttttcatggtgaaagaagtttagctcaaaaagaaaaataaagcagttagagtacattgattggctttgttgactcgaatggtgaatcttaaaggaccaagttgcattttagcggttcaatactgttactaatgctaatagtaatactcagaataatatttaatatcatcttagattgaacataatgttgtattgtttatgacaaaaaattattgtaaaaagcaatatatactgaacttcttgataatcttctagatatgagagcttcattgtctaatatatgtattcttttctaaggcagaatagaattttaggagctatgaacaacatactttaaattttgttacaactccataattatggaagactttcatatgaaaatattgatattattatgaatgaatgacatttggatcttataaccatattatactgcaggtttgcagatttttggaggtttctaagttatcatttgctccagaatatggtcctaagttaaaggaggactatgtgatggtaaaacatctaccaaaaattccaaataatgatgattcaagaaaatgttgtgcatgtgattggttcagttgttgtaatgataactggcaaaaggtaataatcctgttttgaaagtcgtttttgttttttttcctcctttagacatactcttctgaaggattgttgcatgtggctagtagcttagaagcttcattttagtcgatgtatgtataatttgttaccacaataagatatattgtttaattaagttaatattaattgtaagcatgatactatcgttattccaaagaagcaaatattattcctttgacatcgttttggatttggtgttgtgtaggtttgggctgtactaaaacctggatttttggctttactagcagatccttttgatactcagccattagatataattgtttttgaagtactgccagcatcggatgggaatggcgatggtcgagtatctttggcaaaagaaataaaagaacctaatccactacggcattcatttaaggttagcaacatctataattcctgtttgggtttgcgtgtagtgccttacatatggtattggtatctgaatttgaaatgtcatattgatgtctgctctaaattattaaacaagttaatgtgcatctcggttaggctttttcattaacttgtactctttgtaggtttaatgaattccttgtttctattgatgatattaatagatccctaattttcttggatttaaacttgattcatggttacaagttcctgttagagtacatttttaattaagaatagtcaagcggatttgaagcctcaagttgtaaattatgttggttaagagagggtttgagtctgtttcttgtgagataatactggtttattgttctatatgtcaggtatttgttgaaaatattaactaggtcccaattttatactcccagtatggctgctaatattttcaccctattattatgcgtttagaaactttgaactgcatcatgaatgacaatggaacttggcaagtagttaattatttatttggtttgaacttttacgtaaactaactttttcctgtgggttggatattttctaacaaataatgaatatgttctaaaggttacttgtggaaatcgaaatattagattaagggctaagagtactggtaaagtcaaggattgggttgcttccattaatgatgctggccttcggcctcctgagggctggtgtcatcctcatcgctttggttcttttgctcctccgagagggctgagtgaagatggtagccaggcacagtggtttgtggatggccaggctgcatttgaagctattgcttctgcaattgagggtgcaaaatcagaggtctgttctgttattttgccacactttaagcaactcatatagaatatttaagcatcatctttgagttctgaagattggaaatcttatgcagatatttatgtgtggctggtggctgtgcccagaactgtatttacgacgtccttttagtgctcatgcttcttctaggctcgatgttttacttgaagcaaaagccaagcaaggggttcaggtattgtgtttagagaaaaagaactttgatacatatcattatactcattcttatggtcaattaacaccgcaaaattccttaataaacttgggaggaggtcaacatgatctttgtcgctttttctaaaagaaaaaattaacaccgccaaatgcatattttattgctgatgcttgtgcaagatttcttaagttaatccccattccttaaagaatagaatttgcttcgtgattttacttttgacattgaaattactattgactgcagatttacattcttctgtataaagaggttgctcttgctttaaaaataaatagcgtttatagcaagaaaaggttgcttagcattcatgagaatgttagggtattacgttaccccgaccacttttctagtggtgtttacttatggtatgtattctgcttgcaattcacctttggagttttctaaaacacttgtgttttagtttatccttttatctatcggcagtttctgatcagaaaaattgggttaaatataggtcccaccatgaaaaaattgtcattgttgattaccagatttgttttatcggaggcctggatctatgctttggccgttatgatacaactgagcacaaagtgggtgattgccctcctctgatatggcctggaaaggactactataaccctaggtgagcatcatttttctaagatgggactactattcttaagagcatgaaaatatatgtgtatttccgctaaaacattttacttttgtggctgatttatatgtataatgtgaattctttgctgagtcagatagattatgtttgtgtaccttttttatttaaggccacacttgcaaaattagagtatgtttgttgtggcactggtatctccagagcattatatttgctctcattttatgttatgta

SEQ ID NO: 2540 - DNA, 2089 bp, Cannabis sativa
tagacaatcagattcaataatacaaggacaaagtgtaaatattcataatttaactacaataaaactaactaaataaatatatttcttcaataatttctaatgtattagccattggttagtaaaaaaaagtgataataatttaatgacataataaatgaggtagctgagaaagaaatatctcatttaataatttccatgatggttgcaatatttattacattattttaattgaatgtgtaatcaattgtgttctcttttttttttatttttttccatttgatagttaaattattttaaacactatttattaatttataattaagaaatattttctcctatttttatagtgtaaacttgttgaattgtgcacacgacaaaattaatatagtccgggatgtatactataactctgagtttatgtattagtgaaatatgcatgtgtgggatctataaacttacattattgataatataagtgtcagtataaaactacatcaaaatatattagtagttaatatttaaagtgaaaagttttttagagtgcattttaaagtatttgtataattattaggtagtaattacacaacataataattctaccatgttataaaatgtaatgtgtgtttggatataagatgttaattatttataaattcctaatgtcttgtttggtaaaatagttactaagtgcactgtaaaacaataatgtttagtagataatatttaaaataaaaaaattttagtaactgcacaatgtaattacactcaattctcatggaagagtatgagaattggagagtgtaatcgaggtctctctattatctataattacacagttacaatgtaatcacgaggttaaacaaacacagaaaattgtgtagttatctctaattacccctaattcaaattctctcttagctttccaaacgtccccttagtaattacactcaattcttatggccaatcatgagaattagagaatgtaattggaacctctcaattacttataattacagtttcagtgttattacatggtcaaataaacatacaaaatatcctgtaattaccttcaattacatcgtagtttttcaaacacgttaatcttcgaaagatttagtcttacctacttgattaatttatacttacataccattgaatatttatttcctattaaatcaaccttcaaagatttaatgtctgtttctttcattaatttaattacttatagtagtaactaatagtattgtcattaatggaacccataatttgaataatttttattactattcaaaagaaaaatgcacagatctctatgcttcattataatttataacataaaactaggtagctagtttataattatagcacatgtattgtgtggagatgtaatttattatagaataattaaaattaaataaaaaaaaataatgtgaattaatttagttaaaagactttcacatgcttatgaaatttatttgtatttaaatgacaattaagatagaactgtttggaatcaaggaagttctgagttgaattaataataagagcaaaaactggcataatgtagagcttgaaactgatagtctccaagcaactccaaaatagtcaaaggatatcttctacttgaaattgatttatttgattcaatagaaaaatatagatttattaattaaatttttttctattttattttatctatttgaaattgataaatttattggtgtggaaaataagtaatgtaataaattgatatttaaatttaaattatattcataacttaactacaagacaaccaactaagtaaatttatttcttcaatgttgattatgatcttcaagatcttccaaactactaaatgttaataatttccatatggtttttttctttttttattattattttagatcaaaatgtattaattaatatgaagtactcgtaaattataatcaagatagcttcatatgctccatttttttattaacatactaattaagaaattaatacagaaaatcaaggagtagctgtagcttacacttaaacctaaatcgcattttttatttttaataaatatacatatatgtatatatat

SEQ ID NO: 2541 - DNA, 999 bp, Cannabis sativa
agccgccgctgtggggcttgagcttccggagccgactaggtcagttgaggcggcggctgttgtgactactactgtggaatcggaaactcgattatcggggaatagattggtggtggtggttggcccttgactgctgctaccaccggagaagtttgggttgtagaattgcatccattcggatgggttatgcatggtttcactcatggccaactatatatgtgtttgtatgtatatatataattataatatatatatagagagagagaagggaaagatgaaatgcaattctgaatcggagaaatctctgaaaatttcactctttttttgtaagagggaaggggaaatggaacttagaagtttgtgatatttatggaggttttgctcagtcaaaccaaagactttctaaatcgatcttggccgttcctttggctaatatgaagattctgaatatgtcgtatggatgacacgtgagagtgacccaaaatgattctgactttttatatttttttttttatattatatgaaataataaaaatggatagaaaattccaagttaaaaaaagtagaaatttttttttggatgaatagtataaacatatgagtgctaaattttcactcacaaaaagatatacatgagacatgagtaaaaaatttgtgtaacagttcacatactagagttaatcagtaaattcaaattcaaccatgatggatcgtataaaattaaaactgtttatcacaaatataatctttagtctctagtttaatttatattatgtgcgtatatctatgttatttcataaaaaagttctttacaatatataaacttacattcataaaaaaaaaattataaatcccaaaaaacgcaatagacataaccattacgtagaagaactagaaattcaaaaataaaagaacagatcaactgaaatctcaaatataagtcggtggaacccaatattagggtcccacatataaaatacaattctttttttttttttt

SEQ ID NO: 2542 - DNA, 1905 bp, Cannabis sativa
catcacctacttcaacaacctccttcattctttccttattggtatgcctcctcttattatctaagataagaacagaatcatcattttgatattccaactgtgcatcttcattgtcatgattctcattaagttccatgatagtatttcctttatttactccacaatttggagcctgattaccgcccccattgacacctgaactatctccatcagatcgaatcctgattggataattaatatccatcgcctcctccatactccgggaaggtcccctgccagccaccacaccctcatcttcctcacgatctgagcgaaaccattgtgcaccaatgagatagttgtttttcctagtgacatctttcatccattcaccataaggcttgatggtttgatcaaaatgggaatcaaatctccggggacaaaatctatccgaatggccagtgagtccacaaatgaaacaaaatgtgggaacatgttcatatttgaatatagtccagatccaagtgccatcttttttgatcaatttcatacgcctctttagaggtttgttgatgtcaattgtaacccgaactctaagataatcccaccaaattccaatgaagtttttggggtccgacttaacaaactttccaatgtaatttccagcatgtttcaccacccaatccgacataaaaccatatttcaaatcatgaagttgaacccacatatccaactcatgcaatggaaccaatcgagggtcttctcccctcttcaaacgatgaaaaaccagttgcattctattgaaagtccaaggactcccatcaatcacagtttgaacatcaagttcatgataaaactgaaaaagatagcgatttgtatcaagctctttgacatagactcccttacccgacttccaaagagatgccaacatgtgtctcatagtgtcaaaatcgatcgttctatttgtgaggaatttaccaaccaaacatcacctatcatcaaaagcttgcacctctccctcttgatcatccgaaatcagaaccccttcctcctcctcctccaactgtaattgagcatattgatccgtccaatcacccacttcgtgactactcgaagccatcactgaaagatccaataaccacaagagacaaaccgagatccacaagaaataaaactagaaacacatagaaaaacaacccaataaactttcaaaacatgtcaagagacaagactttaattagttgcgtatacaatgtagaaaagtattagtttagagaaaaaatattaaatatatgtaagtatagaaaattaaattctcctaaaaaaaatactataaatataataatatcatcaagcatcttcatatcatctgcatgctgtaataggaatgctccagattaatagttgcgttctaaagacaagttatcagcattgagaaccgtaaagtgtgaaattgtatgtgattggaggaagaatgccaacaaagcagagagagagaaagcttccttttctcatacgccaattacagcaatactagcccttcaatcatcattgatttcattattattctctctccacaatcctaatccattttaaaaatttattttaatatataaatacaaaaaagccatgaaaaataaataataaaaaagaaaatatctgaaaaagaaaggttcagtgagagagaggcacaaaggaaacagcttgtcagtttagggtttttttttattaacccttagctgaaaaagtgcaatcattcatctcatcagacccttaaacgaatcaatttcaatttaattctctccctccagagataagctcctaacaatccatctctctggtatggaatggaaccttcattttcttcttcacttgtttttcttagcttttttgtaaatgaaagatcttccattttttctgcaattt

SEQ ID NO: 2543 - DNA, 559 bp, Cannabis sativa
aaaaaaaaaaaaatccaagatctagatgatcaattcgaataatatgaagctaatgtccataacaaaaattaacttaaatagaaaaacatgaaatttctttattgtataaacctatcaataaaatatattttttcttgaaattaattagtatttatggagtattgccacggtgatcagaacactgaacaaagacaccaacaagctcgatggaaggatcgtcatagcattcgccttgttcggcggagatacctggttatcagatgccggcggcgaagaccccggcggagaacctgtagaccctgctggggttggagtcggctgctcaggcgacagagacgtcgaagatggtggtgaagccgacggagcttcagccggggaattttcaaacggcacaggagagcctgtcggagctattgatgattctggtgacggggttggcgcagaggaagttggtgaaggcggagatgacgacggagctccagccggagaattggcagacggcactggtgagccaatcggagctgttgatgatgctggtgaaggcggagatgacgacgga

SEQ ID NO: 2544 - DNA, 1064 bp, Cannabis sativa
aaaaaaatagaaatggcttgaagggacgttattgctgatgaagtagagagaagaagacatgttaaccatgcatgggtttaattaacatttgattatataccaatctccattacttcttttcatattttggtgcttttcttttctttcactttaaattcatgtatagtctcgaaactcgtatctagaacaaactatatattggactttagaaaatagaaataaacaaaaacaaaagaaaactgactgaatttaactctaagttgagtgacgcaaacgcagtactcctaactgtcgttttcttcagattctctctagtaaattgaacttgtattaatttaaagatagaggtcgtgataacgtactagagtagtgcactcgtattctagttaacaatattttataaataataattaaattaaattatataaaatttaatatataattactataataatataaaaaaatatttaattaaattatttctaagttttagtatttttcttaagggataagttgacacactattattgaaaaatactattagtctaaatccatcattgtctatatttatattgatgcttattagtaattattccactaaatgctaataattaaatattaaatttaatatcttttaactaatattgatactatatagtagctagtggtgctagatacttcgtaatattccagtatatcatactgttataaagaatcatataattattaatgcaaaattatatattggataactcatattttaatttagtaatattatataaaattattagtcacaaaattttaccaagtaacataatggtaatggggtggttagtaacaatgctcactaattaattaccttccaccaccgctaatcaaataagttatgaggtcaaagaaacagttaccttttcattaattttcctttacacatttccaatcaatttttctaaaatgctacactgaaaaccactaaatagttatggtatatagctatcatcagctacctacctacctagctagtttagctatctcagtcattaactcaagaactattatacata

SEQ ID NO: 2545 - DNA, 1725 bp, Cannabis sativa
ttcctatacaagtccatatctttgaaaaaacaagtttagtattatacaaaacatattaaaaaaaatatatatgccctaacacttctcgtacatgaccaatagaatggcaaactatctcgttgaagaatctgttgatggaattgttggcatatatactaaatcacataataagctaatctcatctcacgtgcgccctacctacaacatcattgtattaacttatcatttggagttagatctttgagtgaatgaaaagtaacctttgaattttgcaactcggtattcttcttgcatgggaattgaataagcacgagtgttccctttttgttaaaaaaaaaaggcaaaacaaaactcccgcattactgggaatttgaatatcctgggtgggtagttcacaaacagacaaatttcgaggacatgatcgtaaataaacatgaagaagaggggcatttttttggttaaaaaaacaaaaggcaaaaggcagagtgaaaatccaaaacagagtctggtagaggagaatcgtagatgctcctttgaattgaaattttcatgagtcgagtaaagtgagtgactagtctagtcgtaacccaaaaacgacatctcaccggaaaccaactgccagccgtttgaaacaattgaaattccgatttagcccctggtgaagccccaattttacaacactaaaccctagcctaccaccccatttctaacaaaacgccagggacacaatctgggaaagggaaaaatatcactacagggaccccaaaacgacgacgtcgatgagcagcggtagcaggctcagatcccctgcggcaatgcaccaccgtagcaaccctacgccttcttcctcttcttctcttcccttggtcgtaaccctcaattgcatcgaagactgtgccttggagcatgagtcattggccggcgtcgctgccgtcgagcacgtccctctcagtcgccttgccgacggtaagatcgagtctgctgctgccgtcctcctccactcccttgcttacctaccacgggccgcccagcgacgcctccgtccttatcaggtgatcttatgcctcggctccgccgatcgctccgtcgattctgcccttgcctctgacctcggactccggctcgtccatgtcgacacttcccgtgccgaggagattgctgatactgtcatggcgctcgcacttggcttgctgcgccggacgcaccttttatcgcgccacactctctcggcttcaggatggctcggttcggtccagccactctgccgtgggatgaggcgatgtcgtggcctcgttttggggatcgttggtagatctgcgtcggctcgatctctggctactaggagtttggctttcaagatgagtgttctctatttcgatgctccagaggtacgattttgcaatattctttctaaatcttccatcaatccaattcaaattcaataccagtctttggttcttgctacaaataaacttcgttttcagcatagtttagtagcctatgtgtgttaatatgaataatgtagattttgtatatcaaatgaaatgaagaagaatgtcttttgttcttgtttatggaaattgtagtatagaaatgagaataacgattatttattttttcattccaatgtatgatccccaagtttgaattcgtctaagttaaatgactttcatatgattctactctttttgtttgtgatttcatattcaattggatgataagtta

SEQ ID NO: 2546 - DNA, 1562 bp, Cannabis sativa
attacttttataaaaaatctcaaaccccacatattataaaggattggtattgggagtgctgctaggtctggacagctggttcgacggctttcttttgactaggaaattgccaactgctggtgcttctctgtaataataataatatatactaactcaacagagagctcatcggaagagaaatggaagtcactgactaccatggcgccaaacgcaaacgacatgaaagcgaaaacatttcctcaaacgacatcgacatagacctctccattttggaggccgtcgagaaatcccaaagctcagttgaacttctcgatctcagaaccctaaagaagctcgtcctctcctttgagcgccgtctcaaggacaacatagccgctcgcctcaagtacccccagcagcctgaccgctttgccgattcagaactcgaactccatgaagagcttcataagctaagggtcctcgccggtggtcccgagctttaccctgacctcgttagtctcaatgccatcccttcgattcttaatcttcttggccatgagaacaccgacattgccatcgatgtcgttcagttgcttcaggatttgaccgacgaagacgttcttgaggacaatgacgaacctgctcgggtcctcgtcgatgcgctggttgagaataatgttcttgagcttttggtccagaatttgcatcggctttcggacactgatcctgatgaaatggcggctgtttacaataccttggccacgattgagaatttgatagaggtgaagccggccgtggccgaaatggtgtgcgagaggacaaagttgctgaagtggcttctggggaagatcaaggtccgggagtttgatggtaataagcagtacgcgtcggagatgccattttgctacagaatagttcggcaaaccagaaaaggttggggcaaatgaatggcgtcgatgtgttgcttcaggcggtggccatgtacaagtcaaaggatccgaaaaaccccgacgaggccgagatgttggagaatttgtttgattgtttgtgttgcctgttgatgccattggagaacaaggagaggtttgtgaaggctgagggggtggagttgatgatcattatcatgaagcagaagaagtcggcttatgggtcggcgattagggcgctcgattttgctatgactaagtacccacctgtgtgtgaacgttttgttgatgttctggggctgaaaacggcatttgctgcatttatgggtaaggcaagtacttttcctctaatcgtttagtagaacagatatgaaaaacagagagctaagagtatagaggaattatctgtgtaaggaataacaaaatacagagagaaagagagaatattgagctgaataatattctcattaatgatcaattgagcataaatgctcttaatatacagcagaaacattctgttacaactaactgtttgtaactaattacagccgtgatagttaactaactcatctacaacaataactaactaacagcttctaactaactaacagcagaatcattggttgacatcggaactgtgctttggttatcacacca

SEQ ID NO: 2547 - DNA, 2424 bp, Cannabis sativa
ttccgcggctgcattggttgcaagccaatgcgccaaagttgctgaagctatgggagctaagagggaccagctcagctgtgtcatcggctcggctatcaccggaaccaacgcaaccgatatctttactcttgctgctgctgctaaaacatgtaagagaatatgcattctgtttaactgtgttcgaagtcaaaatacatcaaattaatttatatattttaaaaaaattattgtataaatatttaaattgttgagtttgttgttagtaaatacgttttaaaaataggtataaatatttaaatattcttaaaataagtgattttgtcacacttaactgtttgttagtttcatataattggataccacatgccaatattctattaattattttttgaatttgagcgtttattaagaacaaataacttaataatttaagtatttatgtcgtaaattttcactttttatttattttattttaagcaaaaaaatttctaatatttcatttttgtttgtttgtttcattttttttcctatgtaggtgagaatggtagaagtttaataaaattattaatattaacaaatatagttaattattaagttttctattttttttcattaatttttttttaaagaaatgctataggggaacataattatttgatttgaattgatttagaaaaggaaatggggtacaattatttttagataagtgttaaaggacagagtcaatacatgtatgttttatattattattagtacaatttaatatcaagtcttacgtattaaaatgtgactcaatttaataccatttcgattattgaacttaattttggttttgtgtaaaaaatttatggatggcagcacttaaaggagctgctacactaaaagtaaggtcatcaggatgcaagaacaaaataaatggagttgcacccattttgcctattgaagaaaatcatcatgaccttggttttgatttgaacacttataaatcaactcttgcaaagggtgctgagcttggtgttgaaactccagatggtaattatatatttatatacatatatttatacacatataattgtccaatgatggaaagatatataatttgtttgtgaacatgtgaataggggattatttgagaagatcagtgtctgtgattcaaagtggtgaaggcaaggtatggatccaactttcttagtaaccaaacaaaaaatgaacagagacttgttatgggccatgactgttttcatatttgggaacctaatttcaactctttgtctcaattttcacaggtagtattacagattaaaaagctcactctcttcaaaaagaagaaagaaagtatgtcacattcatttaatttactaattttttcatgtaatgtgatttgatagaagaaatgtaataaagtctttatattattgtttcaggtattgttcttgatttacatgctgaactatacaaggattcagatggtgaagctacaaatgagacatgttatcttctggttttaacaacaagtaaagggatattcaaattagatatgggagatgattatcaacgttataagacatgggctaaaactattactcaaatgttgcttctctcttcttctatcaataaatatgagcaacatttctaattatgtaaacttttcttattaaacagtgtttgtgtcagattggaatgttaaaaagttgttatttggttgtgtaattatatcataaattaaatgattgtgcttaatgtataattagtttgttgggagtatagtgatttaatagtaacttatcttattgttggtaccattttggacaaagaaatgaataatcaaaggtatgaaaacaatggtcatattaatatcagaagtgattaatttactgtatatcatgctctgtaatttacctgttacattttgaagcagtgtatcaaaaatgacatcagtggaccaaaatttgaataatgtatgattacttgttaagcaagaaagaaaactacaccaaaatattcgaagcccgagagagagagagtgttagaagcttctgcaaacaccagcttattgaagatgatggtcactggtcagtcaaaacatagacaacaaccgaagcttgaagatcacgatccactttgaagtgagcatggaagaaccttttttcctgtaaatagtcacttgtcaaaacccagcctttacataaacaaaagttgctagttgtagaaatgtgaagagactttttacaatggaagagtcccagaatttacctgtctgaaagaatgtgagactaaaaagtccctcaacagtttttcttctggctcatacaatacaatatgactaggtaaagaccaatttttcgcatattcagatgtaaaatcaacaggatccatcatgaaacgatcggactcatctgggattccttttgtgtcactgttagc

SEQ ID NO: 2548 - DNA, 1829 bp, Cannabis sativa
tctctctctctctctcaaattcgaattcaaaagctcaaagatttgaatatggtagaaggccctccctcgtcctatttatacttaaagttggcaatatgcatgctcatcaatcaaggtcctagattttacctagaaaagcacaatatcgatccaataattgaggagccagaaaggcaacatttaatattccttgctggacttgaggtattttccatcatcaatattctctgatgttcaagctaacgtcatattgtcgtcattgtaataccccagacaccacatgttttccaagggcgcatgaatttcgtggaccaagaaaataaggacatgtgtgcattgcaagttgtagccccaaaagtcctcaacctttcacattctatgatatggaagatgaacatgcccctgtttcgaaatggtccacatgtccaaagtgtccaaagtcatacggaagaaagattgtaagttgtagccccaaaagtcctcaaccttcacattttgtgatatggaagatgaacatgcccttatttcaaaatggtccacatgtccaaagtgtccaaagtcacacgaaagaaagactgtaagcttctgccactctcaagtcctgaaagcttagaggtaaatgttatttatgtttctagatgggcaacaagtggcattttcaaataattggtccacataaatctaggcccaagccttcccgcatataacagcatagtccatatcagagatgggcccgagcatctaaactctagaagtctcgcctccaaagacgagctaggcccctcctcttcggaaagcccatccaactttcaggagatggaacaaacaaagccctccagacaatcgatgagacacatccagagaggaagtccaagaggcacctctgaaagcatcttgtgtgacgtggctgccctttaatgcctggtcccaccaaatcagatattgtctcctatgtcagaacatgatattgtgcgcaccacaaaagggagtatatcctcttttcctaacggtgcctatctgacattctcgtctactaaagcagcgcccgtgcatgatacctgtccagaccatgtgggccccattttgtacggacaccttcgtcccatgagacaaaatcttgcaatgagcctaaaagtcatgtattccatgtatttaccctaatagtggacctattttgcacaaaatgctaaatagatcacgagtatgcccgaatccgaatctaagcctataaaaacccctttacccattcatgtaaggggaaccaaaaaaactttcaggttctctctaagcttttttcttttaagaaaaacctagaagggaaaaaattatagcaagaattagtaagacctatttgtaatacatcaagcattcttaggccaatacattgactcatggactagggttcattagtatctgaaccacgtaaaagtcttcatctcttttgttttaacaaccatttaatttcttaatttatttagttttttttagaaaatctcagtaaacagaaatatttccaagcctaggattcttaatgaccctaggggatattcttgttcaagctgatcacgtcgaaaaaacataggaattaataatgcttctagggggtgatcatgctcatgtaagattgaggtggatacgcatgataacacagtgtctcgatgagcttaggtgtggtctccactctcgtaatctatgtgatatgtacgatggataaatgttggtatctttgagagccttagggataccaaaattaaattgaggaataaatgagttggccaagtcagtataatttctattacactcatttggtagagttttttttttttttt

SEQ ID NO: 2549 - DNA, 1693 bp, Cannabis sativa
tcatctgaaaagtagcatagaaatggaacttatttgctccaggtccagggcaattgtacaacaaaatgggtattaacgtttcatttatttaccaattcgtgggtattcggttccaacgatgatgagtcattttcaaaaagtctaatatgacaaagttcttccccagcttcatcagcaaacgttatttttttcttctccttgtttacagtagtttcacgttcaggagcaccagagtcgttttcagtcaatctctgtagaacatgaacaagagtgagacaaaaaaaaaggcataacacattatatctgagtaatttataaaagaaatttttgtaatcaacttgtaaataaagaagttaataacaataaaatcaagttaccatgattttacagaaacggctgcagtccctggccattatagaaagccatctttgagctaattgttccgctttgtttgcattcttaatggccattctcaactgtaatcagagatgatcaaaaaacatgatcaggatacaatcacatggaattgggtatggttacattatacatagaaataataataataataaagctaacaaaatgctagagcatatattccgattaagagaaatatacagggctcaaatttaagaaagtttgtatcgttgaagaataagttttatgttcatacacaataataagcgaatgtaagaacaatatgttctgcaaagtttgtatcgctgaaaagcctgaaatgtataataagcatacctcactgggcttagatttaaaggacgttgctggaccggcttcagggagcaatttatcttctacaatgtccttcagggtctttaactcattggtgagctttgttgcaagacattccatgtcttgcatctggcgttgtgagaaagcaattgcattttgcgaacaagtttctatggaagtgcacccagtactaaagcgtgggaatacattagaacgatgaggacccttatggtcaccttcggtttgggtgagtctcttctcgttctttggtttcacaacgttttgcttaaggttagctgaatatctaactctagcaacctgacaagacttttcagctttcgagattttggtcttcttctcggtctgttgtgtaaagcatagtttcttcttaggtcctgaaattacgaaggaaccaacagaaatcaatgaaacagaagatctactttagagttagagcaagtttgactggttaaacaaaaataatagttgaaacaatacaccaatgtaagttcaacatgaaggttcgcgagtccaattaagattgttcacttactgtaatgttcctccccgtgtaactcaattgactccacagcctgacacaatttttcttgagaatctggagaaataacctaaaacaaataaaaggaatatatgtgaaaacaacctccaccacagcatgaattaagtcaaataaccatccagtagagatgacatacctttctggttgacaggagcctttgaggaggaggatttaactttgaatcttggtagtaagactcatcaccttctgaaatcacaagctcccccaattgcttatcgtcatttgtaggtgattcatcaatagacggagcaacccacctatcaggactggttttaagattatgaactgtatcacctatggtgtcttcactttgtacattagcttcactttcgtgggtatactcag

SEQ ID NO: 2550 - DNA, 1373 bp, Cannabis sativa
gactcactacctcgccgtcgaactgggtattcgtcggattaccttctctccttccggcgcttttgccttggccgttatccaatctttgtggcgagatatgccgaaacgatcggacggtcaggatgaagtctttgagtttcctgagattgcgaattgtccaaaatacccttggtggaaattgtcttctctgtacagatcttacgttgagggagacccagattcggaaattgttagggagtcttttattgggaatcggttgagttggggactcgttgttaactcgtttaccgagttggaatcggtttatcttgattacttgaagaaagattcaggccatgatcgtgtttgggctgttgggcctatacggcccatgttagatgatccaaatgggcccactactagaggtgggtccaactcggtctctcctgaccatatattgtcatggcttgataagtgtgatgagaataaggttgtgtatgtgtgttttggtagtcaagttgtgttgagaaatgatcaaatggaagagttagctaagggtttggagagaagtggggtccattttgtgtggtcggttaaggtgccaactggatcacaagtggacggtgattacggaaaggttccgatcgggttcgaaaatcgagtgggtgaaaggggtttggtgattaaagggtgggccccacaagtttcgatacttcggcatcgggccgtgggcgcttttttgactcattgtggttggaactcggtgttggaaggtatcgcggcgggagtactaatgctgacgtggcccatgcaggccgaccaatacgctaatgccacgttgttggtggacaccttggaagtgggaaagagcgcgtgcgaaggtgatcgaattgttcccaattcggttgagttggctcgagtttttgcggaatcggttggcgaggaaaaccgagcccgaagacgtcgagttgaagaattatgtggagcggcgaaccgagctactatggaaggtggtagttcttataaggatttggaatcattacttgcccatttgaaagtcacaaccatttagtaaagaattttcttattttgcttggtaatgttgtaataaagctagtttggctaaatcatgtgaacatttctaatagtgtgctaaaaatgtgttgtattgctatattttagtaatttttaataaatgattggttataagagatcatcttagtaatattattaactagcaaaaactaataaataagaaaaagtaaaactcaattataaatattaatgatatctttaataatagaatagacccaaaataataatttaaaacattcttattggtaataggtttgaatagagagaatggaatattggaaaaatacctaatgcctaag

SEQ ID NO: 2551 - DNA, 1644 bp, Cannabis sativa
gtggctcatctcttgcaaacattttaaataatatgctactctcattccatcaactttaaatggtcaagaggctcacagacacccctgttcttagtgtctaggatataaagcttgcatgtataatgttgtgccagaatcattaattttcagcagaaaacttaattacaaatatatatgtactacatacactttatatatattataacaaatccattgtcattgcctgccattttcctttgtctccggtaacgtatgcaaattgtgaaaagttgtgttgtttggtgtagaggaactggtgaccggtctatcgcgagtgtcatgggaaaaggtggatgtcagcttccacagcagcaaagtgagatttgctgctcatagtatcatacaggtctcttcctgcccccttttgtttttggttgttgctgaaattccccaattttgttacttcctgataatgataatggctcatcttttttaagtgaaataatattagtatcaccagatttctttgaacattttacaggtaaaggatgaaagcgcacatatagaaggtgcagatgttatacgccatatgatcgaccattttctcacgtagaagccaacaattgcttggaacattttggtattggtctctttttttttcttttttgtataatatgtcccatttttcttttgtatagcttaacaaatgaatttgattggaaacttttgcatatgcaggtatacaaaatacagtcaaatctgtcaatgacacgtcaaggctctctttacgaaaactgtgattaagcaatttatattgtttattcattacccttgtatggcacttctgcttgagcatagtaatatttttattaaaaaaaaagtttaattgaaagatcgttgctttacaaatatctcgtcattgtcataaaaagaatgcagatttctataatcaaaacaaggaaaataatccataaataaatcgatgaaattcgctactataaaaaagagagaagaattaataaaagagaaagagaaattagttaacttcaagttcaaggtgtcttttagtaaaagcagagactagtttggaaaatgctatttcgttaatatactgagctaataatcataattcctttgcaagaaaactgatgatatgaactattcctaatccttgataccatatcacgaactagttagtcaagacacgaaaaatggagagttaaaagtaatagcataaacagcattgaggacatttgatcaaaacttctgttattatttatgagcagtatgcaacacgcaacatgcacacctttccaaatatataactatagaagagtagttctccaaaggccttacaaaaaatgcctttcatctaatccaacatgcaaatgcaaacatattgcaactaagacttctaagtgatcacgtaaaacactaccaactcaaataaatctctcgccaaaatcatgaataataactttcatatttagtttaagcctgctaacaaaaaggaaataccaaatgtcaaaattcatcatatttgagaattttacgttgataatgaataatttttgggatttttttagaggcactttggataagttagttaggttagttttattaagttagataatttgttattacaactgtttttttttttttttt

SEQ ID NO: 2552 - DNA, 1214 bp, Cannabis sativa
tgtgaatatgttttgggtttctgctttgctaatgggatattaaacactgtcatgcaggcaacatggagaaagttgatcaatcaacagttgacagacaattctgaaactttacctccccttccttctcgtcttgttacagaggatgacctgcaggaattctatgaagccatgaagatatatgaagtgccaaaagctgatggagggtcaaatgttggtggagttaagcggaagagtgaatatcatcttgatactcaacattatggaaggggcaagaggacaagagaggtgtactttgtggccttaacacgtgcttgccttgtagtttttgatttttttattaatattacttttaatatacttcaataggttcgttcctatgaagagcagtggacagaagaagagtttgagaagatgtgtcaagttgatgaggctcttggatctccttccaaagcaaaggaggaagttacagaaacaaactcaccaacagatgcaagtcaagctgtcgtggctgtcaaggcagaagtttcagttccacctgtagttgaccccccgacagccagtgtgcagccatcaccagctagtgtgcagccactgccagccagtgtgcagccaccactggccactctgcagccacagctagctgctgtgcagccatcgccggccactgagcagccaccacaagctactgtgaaaccacttccagccactgtgcaaccaccaccggctactgtgcaaccaccgccagccactgtgcagccacagccggtcattgtgcagtcaggagcgcaagccatgttgcatccgccacacttgcagccagtcaaagaggtaactccaccagccaagcgaggtcgtggcaggccaaaaagggtcacaacagatcaatcccctggtgcagcggctcaaaaactttctgtaactgcaaaggtagatacagggctaccaagaggaacaactgtcagctctgaaacaatctcaagttcgaataccttacaggcaggtattcctggacaagtgcaatatgccaatgttggggttgcaagctctcagccagtcattgccccctctattactccaggtcctcaatctagccctgttgtttcttccacccctggtcaagtaagggggcaaggtcgcagatctcaaagcggaacggaaacacctcgtcgtaggggtaaaaaacaggcggttgtgccaccagcggttgtgccacc

SEQ ID NO: 2553 - DNA, 2661 bp, Cannabis sativa
gagagagagagagagaacaccactgacataagataatcgtaatttgacgttagcaacacttttgagttaaagattatttccttcagcaagagacagagaaatttatacaaagagtcacaaattttcacagccattcaaactcaccatgtgattttgaagaatgatatccataaaagcatcaacaactttcaagtactcatcaaagctgtcatagtgactgatgacctgaaatcattgtcattaagaatttaagacaatatatgtataagtgaagaaaaaatatatacacatatatataggcttaaacaaacaccatgggaaacaaatttttccctaaaagcaaagagaaagaggaagagcaactacatagtctaactaaatgcaagactttcacctagctacgaaagcaattattgacatgtagactctacgcaagaatcaaatcaagctcttggtaacttaatatcatttaaacaaataaaaggggagaaaaaaaaacaataagtatggttctaattacctggataattttatcaaccacagcgctggcatcttctatctgagatttactttcaccaagcctaaatccaagtaatctgtaattcaagcacttttcaccaacagacaaaaggaaatcagtgctgactgaagattgtttttgttttgttgtgtctttgttctttagaattatagagaaataatagagaattgatggtgatgaaaaaacttgataatcttattcactgaaaacaatgatacatataggctttacaagaataaaatacataaatgcaaaatatgcacaattaattctagtactttactttaaatcaagaaagaagatacatatactaataaataggtcagctctactaaacggtaactacaagatttcctagttgcccatgtttttctggttgatttaagcaaagaaaagaaaaagggagagataaagattgtattagatattaaaaaaagtttacagcagattataagatatcgtccacttcaaaggagaaggagcgggggaacaactttttttacacccaaaggctccaatatctaggtaaatcattaaaagaaaatgtggtcgaatacttagtcctaaaggtccaaacaaccactgagaatataataatattctcccacagttgtatacaatctaatattgtattctgaacgaccacattatacaagttgcatgtatggtagtagtccagccttctattagaatgtgtttaccattttgttgaaaaatattaaaatttataagatcaagtacacctttgacaaatgaaacaagaccagtggacaaaacttcatgctgaagataaaagatgaaaataaaagcccagtcaaggatttcagtactgagatgattactcttttgaaaagaaagaaaaaaaatcagcttcaccaatacctgattgaaggaacaatcatagttgcattcaataagatgaaggactttcactgcactagagctaactatttcaattggaagcaccttgagtagatgatgaagaaccaccgaaacacatggaaaggctccaaacaagtcgtcttcgttctttcctagtccaagctccatgactacagtttttgcctgtctcttttatatacaaaacatatacaaacagccataagaccctgacaaactatccaacttaaaccaagtcaaaataactaatcatcatgcaacagaaactccatatcaactttctcttatgaataaaattaacatatatatatataataaactcatgtgtagctaaaacagtaaagttatagctagctcccacatgcttatggagaatgacggtcttcgcagttctttgggttgtttggttagaatgaaatactagaatctttgaaggctctgaaagctcagcagaggctctttgggaaaaaatcagattctagactgcttcatgggagtacaagacaaagcattttgaaaatgtttcacatttagacttaattagagaatggagagctttgttgtaagcttctttggtaaagcctcataggtacttctactgtgagggatttagtttttgtttttgttccctagggaaacaaaggtaaattgtttattcagggtagcgagtttgtcttaggtttcctagttttggtttcatgttctcgaactcggtttatctttgtaaccacggtctttcttcgccacaagtgagggcttttatccatatcggggatggggctagtctaagacaaaggcctcattctctttttcaaaaaaaaaaaaaaagaaaaatagctagctcccacaaggtttgattttggagtcccttttgagtacctatgtaacaattactatagttccctattcttcaaatattatagggtgggcaagggacctagtttcattttagaaaaatgatggaagtgctaaaatcaaaatggcaatgctatatgttatccatatttacggatgaggacacgtgtaattcccaaagccggttacaactcaattacttcaaagccaatagcaagaccaactaagataatgggccatatccattagcaaagtcactcttccggatgatggcgaaacgactcgtccagacaagataattcgccaacgcagcgagaattcgaaagacatcaattggagtatccctaggatcacgtccgagaatc

SEQ ID NO: 2554 - DNA, 1208 bp, Cannabis sativa
cgaggagcccttttccaattttgatgaccttcgacaggctttctaagattactatttcttataactcttctaatgactccactcgcacttcctcaaaaacttgggggtctagttttgacaagacctcgtcgctctggctgggcccccccatgggtgatcatcattgttggttcttgaggcttcgtggcggtccgaagcgacatgttatagcattctctagcttcatcctgatcctcttttaatgtggcaacacccccaggggttggaaatttcacggtcaagtggtacattgagatgatcgcttacaatcggatgagcgatggtcttcctagcataatgttgtaagctagcggacaatccactactaataaggtggccatcactgtggaatgctaggtctcctccctaccgttagcgccagttctatcactccctatagttggattggttctccggtgaacccgcatattggtgacgtataagatttgagatcctcaaggcccaaccccatctccttcaaagcggtgtaatataggatattcattgagcttacatcatcgactaatgtttggtgtacccaagtgttagccatttgcatcgtaagccccagcgggtcgttatgtggaaagtgtattcctcttgtgtcttcctctataaaagtgcctggggtgtttttccattaataattcttcaggggcctccgctccgaattcaaagagtgaggttctcgccttacctcacgggtgtatctatctctcctccttggggttttgcctccttcacaaggccttcctatgactgttgtgacatcttccaccgctcgagggactctccttggcactttttgtaagtgttttttgtctgttcgtgccctgttaatgttcgcctcccccttctaacggtgcatggtgataggtcttgctttggttcaactagtcattcttcatcaaggtttgtttccctatccaaatgacgatgagagcgtctggtcattttgtattaattgtgtttaaaggagcgacttggcttgagcttgtcgttcccatagacagtgccaaattgttgacggagagagcttgttaactaagttagtggttggaaaatgcaaggttacccagatatgtgataaagataagataaggctgaaggtaaaaagatgtatgaatgttcctctctatattgaatacaatatctgagttacaccaaat

SEQ ID NO: 2555 - DNA, 722 bp, Cannabis sativa
tccaataatagtaattaaggataaaacaaacttcgctcacttagagtttgaacaaaacttgaattttgacaataataaatcaaacaaacctaatcggctcttttcatatttttaacataaatatttttgagtttttttgacaactagcgttcgagaaattatttttgacaaaatttagtcttactaattaattttttaaaacaaaatttcagataatgttgacataaaaaaaattcaacaatttgaaagatattgtctagaaaaaataattaaaaacaagaattttctaaataaataatgacttaacaatgacaatttattttaggaaataaattgcccactattataaaaagcactattttcatctgtactcaaattaatttatttttaaataacgtcgctaattaaaataagtgactatttaagaacgttgattataattaaatataaccacaagactataattaaatattcccaatatttttaaactatcatttactattttagatgggttaaaacaattagtgctaaaataccttttgtataagccaaaaaatacaccattatttttggatacttcatacaagtacaacatctatctaccttaaatacctataactttctatttaaatgtataaaaataaaaatatttgataaaggcaaatcctacaaggaaaaaactaggaagcatttaataattaatatatatccaaatataaata

SEQ ID NO: 2556 - DNA, 999 bp, Cannabis sativa
atataaattgagcagaaaccatcggaatggaagttcaatattccaatctcaagtattggaataatgtttccactgcacaactatatgaaaaaaatgtactttaattttcttaatagaaatattattttattacacataaaaataacttataaagatacttttgtctataattaacttattttattattttaaaagccattaaagctagcttgagagagaagaaaaaaaaaaagaagacataaattcgaacccaaaactcttcatttttatttaattataataccatttacactaaaaaaaacttactccatttcaatatcaaaccaaataaaataataattaataataattaggtgagagttcattataaaaataaaaagcaagcaatataatattatagctagtataattttatttcatttccactattattctaactttattctagtaaaccaaagttcatccaactcaaacttatcctattttaaactacatttaatgtgcacgcatttgtattttgaattcaatcttatctaatctactcatttcttcaaaatcattcgattacatattggattagatacttcaaaaatagttgtaatattttcttattctaatttataatcctatttttcttttttctaaaaagacaaaattaatgttaatattttattatataacaaatgattcaaaattaataatatctactgttttttgtgtttctgaaaatgagatagacatatagcatgttcagttcgaaattaatcaactagagcctgctcagtaatcttgacaagataatggaccaagacaacccggaaggatatgcctcaagaccatctgagatatcagataattatgtccagaattagatatctctgggttcggaagggcgccttgcccaaatacgaagaatcattaaagatcctttgaatgaatatctgagatacattcggaagggctttccaagagacgccttggaagccaacctgaagatga

SEQ ID NO: 2557 - DNA, 719 bp, Cannabis sativa
aaaaatagaagaaaaaacatcacaggggtattttggtaatttgacaggatgccggttcgtagatatgcatttgggagggcagacgaggcaactcaccctgactcgatgagagctgccttagctgaatttgtagccactttcatattcgttttcgccggcgaaggctctatcctttccatgggtattttcgtaatttcacatttaattattttatttaattattaattaattaactaattaattaatttttaattttgtttaattagacaaactttacagagaaagaggtggaataacatcagcttcagagctagcaatagtggctttagcccatgcttttgctctgacagccgccgtggccgccagcataaacatctctggcggccacgttaaccccgcggttacgttcggcgcgcttgtcggtggaaggatttcggttgttagagcctttttttactgggtggctcagttacttggtgctattttggcttctcttttgttgagacttgttactgttggcatggtatgaaaaatattactatgtatgttttagggttagggtttcggatgtaatcccgctctaaatttggtctttctaccagtttcgagcgggatcgtccctgaattttagtgggtcttaagaaaaatatttttttttgaaaataattttttttatttttttgttgagtctgtttcaatttaaggtcggtcctgattca

SEQ ID NO: 2558 - DNA, 1457 bp, Cannabis sativa
actccgatcatgcatctcttgctccgtcccgaaccttctccgcgagcacatcgttcctggcctcttcagcatggattacctccggaatctggcgttcggaaccaagatcgagaccttgagccccggtcgctgcctgacaatcaccgcggaaagatcaccgctcgggagcaatgagacggcgtcatctaagatcttcatttctggcttggagataacgcaaccggatctgttcagtaatggtcttatcatcgttcacggtctcaaacaagacggcagtttcgtttctcctctttctccactctcttgcgatatcgagaggattacgagtactttcaacatcaatcccgatcactatcgcggtggcggccaacagcggccattctcttcaccttcaattcagccgtcgatcatcactcgcctcatgcttagagacgccatgctcagactccggaacaacggtttcggcatccttgctctcgccatgaaaatcaagtatccagagctcgtaaatctaagcaacatgacgatcttcgctctagatgatatctcaatcttctctggctcccaatcttatatcaataacatcaggtttcacatagtccccaacatttacttgagtttcgaggatctcgagaaattgcctctgggaacgcttctgccgactctggtccaggatcaaacgctagtgatcaccacctctggtattggaggattgaacccggcgccaatgaggatcaactatgtgaggattaaaattccagaggtgataaagaatctcaagatcgtaatccatggagtgttcttgccgttcccacatattcatccagtggccgctgtgtatgatgaaattcttggaggatctggcggatcaggagttggaggatcatcatcagactcgtcgtcagctcgtgtcgaaggaacgtgttatcctttctttggtgaaggagcttgtgttcaggtggccatgcctcctccgaccaaaccgacggtggatatcgaagatcatcatggactgtgactgtgactgtgagtgtgagtacgtatacgggaacagatagctagtgttctgttagtgtcgtgaattttaccgtcttcatattttaggtttctttcctttgactttggtcaacgactggtatgtgtccgtacatacctgtattgctttgtaacgttttgtgtacgaatcactgggctctctctatcttttgttgaattttaatgaaaactaccatttgtttcgcaaagtaatgaaaagtaccataacttgtgcgttaaaacttaaatcaataaatccatttcttgtagcttatcttttaataggcaaagggtataatttaaatttaaattatttgttcatggatttttttaatttgtttccccttttggcatgaatatgatcacatatatattttctacctatacatatgtgtgtcacaggatttttttttttttttttt

SEQ ID NO: 2559 - DNA, 755 bp, Cannabis sativa
gtcgaagatccgacccgattcacctgccttcgtttcgctccatcgcggcgttgtcgaatccgaggacggcgaggttttgtacgggagcagagatagggtttcggttggcgatggggttaggtttgaggtttatttgagggaagagaaggttttgaaagggagtttctggagagattatggcgatgagtggagattggagtgtaagtgtgttttggagagtgagatttctgctgccggagttgattcggtggaggcggaggttagggttgttgcagagggacacgtggcgatgtgtgagagagtggctatggtggcgaagaggaaacatgggttttgtaatgggttagaggaaattccagaagagattgaggttgacgatgatgatgatgaagaagaatgtatgtgcggctgtgattgttcgtctggggaaatggagagtggatctgacggtggagattggaggagtgaaatggactatgatgagatggatgttgaaggtgttaaatgggccgtggatgtgggcttttgggttatgtgtttaggtgtgggctttttggtttctaaagcctcttctaagacattgagacgcagaagaattgtataattgttttggttttttttcttgtaaatatcataataatgtaacaattttgtaaagcccatgggcctgcttgctaaccttaggcccaatacccaaaaagctgtaaaatcaaaggtgttgggagaatagagaagaacttttttttttttttttt

SEQ ID NO: 2560 - DNA, 1224 bp, Cannabis sativa
ttattcgccgaagtgggaagaacacctcggaagcaacaaccgggacaaccttcttgccccgcttaatctctccctacgaaaactcatcctccgctgcggagacttctgccaagccacatacgacgccttcaacaacgacacaaactccaagtactgcggctccagccgctacggcaagaactccttctttacaaaagtcatgctcgaaaacgacactcactacgacgtcgtttcattcctctacgccaccgcccgcgttagcctccccgaggccttcattctccactccatgtcacgcgagtcatgggatcgcgagtccaactggatcggctacatcgcaatcaccaacgatgacgtcagcagagccttagggcgccgcgaagtctacgtggcgtggcgtggcaccacccggaactacgagtgggtcaacgtcttaggagccgagcttgagtcagccgagtcgctactgagtccgaatacgaaacacgaactcggaaacgacaccagcagcagcgacagcgacaacgacaacgataaaagtcacccgaaggtgatgaagggttggctcaccatctacgtatcggcagatccgaaatccccgttcgttaaatcaagtgctagagttcaactattgacgaaactccaagaggtgagagagaagtacaaagaagagaaactaagcatagtgatgacaggtcacagtctcggagcgagtttatctattgtgagtgcttttgatttagtggagaatgggttttcggacattccagtatcggcttttgtgtttggatctccacagatagggaacaaggccttgaagcagaggatggagcggtatccgaatctaaagattctacacataaggaacaagatcgatctgataccgcattatccggggaggttgttggggtacgtggatgtggggacgagagagctggtgatagacacacgcaagtctccgagcttgaaagagtcgaagaacccgagcgattggcataacttacaggcgagtttgcacgtggtggcagggtggaatggggaggaggatgggttcgagctgaaggtcaagaggagcttggctctggtcaacaagtcttcggcgtgtctcaaagaggagtgtttggtgcctgagtcttggtgggtggagaagaataaaggaatggtcattgataatggggtttggattttggctccacctttggatgaggacctacctgttcctga

SEQ ID NO: 2561 - DNA, 1877 bp, Cannabis sativa
aaaaaaaaagctatgttaaactgacgagatagaagggcaaagaggatccttctggacattaccaaaatatcctggcttactcaccaaggcatctaaaccaattcaaacaacaacttattattacacagcaaaaatccaatgaacacagttccatctttcttataatgtgacctccaacaacgtacgaattcaacaataatcaaccaagtagagttttcaaatcaaccatttaaaatacgacacgtgttcaactactctagaatcgagacagagaatcacagaccatctcgatataaagtcctgaatcctgggattagagaagcccaaacgtaagaattcctctctctccacaatattctagactcttcttcctattagggtttatctccgtcgtcgttgcaaatctcctcagccgtcacaaaaatggctcgtcgtagctcaggttcttaaagatttaattttattagctctgtgtttaatcaattagcttcgcttaatttctctcttattgttgtttttatacaccttgttgaaatttagggttaggagacagaactaattggaaaggtttacgccttgtcgtgattggatttggggtttgtttttgctttaagttgcatattaaatgattgttttagatggatttggtagttattgggattattttcgtgtggcttattcttatttatggatgagattcaatcgtgatgtcagtgtttaagaatagtgaattggaggcgtattgctaagagagatgtattaccttctggggtttgagttttgggcgcggcttagtgttttttcggtgggtattgtgtcctgtaaaaggagtgtaaaaggagttgtgttaaattggatgtctcttcattaataatatagtaacaacttgagttgtaaattgtaatacagttacagtgctatactgttataattcatggaagtacatttcgcttgcacaagctgtatggaacttgctatgtagcatttgaaatgttgcaggctcgggtcggttggcttgattcaaatgcctatctgttatgcttaagcttgacttaattttagaagcgttctgttttgttgtctttcttgaatgcaaactaggaaaggatgtattttgtataagttttagtgtcctgtctactccactcatcatagacttattgtgttgctcttaacttttttattaggaagatctgcccctcgtccagctgcacgatctgcacctgtgcgcaaccctcctcagccaggtatttttcgtttttcctttatgtatgtcatgataggcattttttttccattctaaatttttttatctgtatctgtaaatggcttgatgttattcttggcacttgcatgagcatcttcttatatgggtttgtgttaatttttttctttctttttaaattggttcagctagccgtgctcctcctccagctcctgcacagcaaggtggcggtggaatgctatcagggattggatccaccatagctcagggtatgcgaaatgagatctatattatatttgatggtatgagcttcactttcaagaggattctcatgttcttatgttttgctattttgtaggattggccttcggcacaggaagtgctgttgcacacagggctgtagactctgttatgggtcctagaaccatccagcatgaaactgtagcgtctgaggctgctccagccccagcacatgctgcaagcagtatgggtggtgcagatgcttgcaacattcattccagggcctttcaagatgtaagcattactttgccctttgttattgaaccttttttttaaaatcaaatgcttgaattgattcatatatgttttaatttattactttcttttaaatgtttagatttaaagaaactgt

SEQ ID NO: 2562 - DNA, 794 bp, Cannabis sativa
atgtagatgtagatcaaattgaatatataaatataccattggtgagaagttgcatgcaaagcgggagctcgcgcttgaaggcatcgatcttgagacgttcttcctctaggcgattaagatagtcttcaagtttgtgggtgtgatcgtgctgatgaggtacctggtgctgttgctgttgctgttgctgaagatgatgatgttgttggtgttggtgttctccgaacgattttaggagcattgaatagctgtgagctggcttacattccaacgagagctccgaaggcgatgccatcatgattattaattagctagtacaattaatctctcttaataattattataaacactcctatttactcccacaattaatatttatatggataaagattaattatataatgatcaaaacactgttctttcagagattattgatgatgatcgtggtggtggtggtagtaatggtactaatgtttcatgtgaaagaaaaacatgaaaacccaaaataataataatataagttaacaaaacaggggatattgtgggaacaaacaagggcacctaaaagacagtgtttggcttctttccaaaggatagagagagagagaaaggaagagtctgttgtttgtgaacacaatgaggatcgtgggaggatcgtcttctttttaggggtgagttcaaagggaataaaggagagagagaagaaaagaaaaagcatgaaagagagaggtgataaagaaggatggtaacttcttgcaaacaataaagccaaaaatgaatgagagagagagagagag

SEQ ID NO: 2563 - DNA, 2632 bp, Cannabis sativa
atttgcttctctaaattattgtactcgtttgctttctttttcaacactcatttgcagtcaccacagaaaaatatgtaaaaagataaaataaataaagtttagattcatatcttttgattcttactggccttcattgctggttatatctatctctatatatacatgtatatttaccttctctctttcctctccataaagaaacatagaaagtaattgtttttcccgcttctctactctgatgccccagattagtatctctctctcctttaatccactcaacggggtcatcttagctttctttctccacccttttggagccaccctttgattcgatcatcttattttaataatttttttgtttttttggagtggtggggagcttagatttgccagagtggtataaagtcttaaactttcttgagcttattaacttccattcagctcaaagttgggaattttcatatggggtttgctttttcttctctgagtctatagtttatacctgtttggtatcagatttctcattctttttccaagattctctccgattctgaaagtgggtctgttttttctttagattctttagtttatgctattaggcaaaggagattcctgattcccattaaaatattctgaattcaatgcttttaaaaacaattgttcaagcttcaacttttttctgcctttactctcacctctccttttctctctggccaaactttaaccaattctgaaatgactttctgagattataatttactcatttagcatggaaactctacacccaacttcgtttatatcgacttcgagttggcttttccaaggaagccaaagttcggaatggactaaagaagagaacaaggagtttgagagggctctagctatatatgatgaaacgacaccgaatcgatgggcgaaggtggctgcaatgatcccaggaaagtcagtgtatgatgtgattaagcagtacaaggatctagaagatgatgttagtgatatagaagctgggagggtcccaattcctgggtaccttgcttctccttttccatttgagttggttgatgatcgtgattgttttagaaagaggcctccctcatcagctcgaggttctgaccacgaaagaaaaaagggtgttccttggaccaaagatgagcacacgtgagtaattatctatcaaaaaagcttagtattgagttaagaaatcattttttgtaattgggttttctttgttctgttgttgcttaaagctaattgatctgagatgttgtgttacaggagatttttgctggggctgatgaaatatggtaaaggggattggagaaatatctcaaggaatttcgttatcactaagaccccaacacaagtggctagtcatgcacaaaagtattatttaaggcagcattcaggagggaaagataaaaggagaccaagtatacatgatttcactacttataatctcactgaaaccactactacttcagaaaacaacactgcatctttcttggaccactcctctgtgatcccatcactacagatttctgctgaagaagcacaaaaggtattacgtgactggaatattcctagtgatgaagaagcactcatggctttgggctctgcttgtggcaatctattcatgtcttcttcttcaccatatgatattgcccccaatggacttaaattgcctttaggccaaaatctatttgggggtggcgcttgttatgcagctcattcaaagccacaagcttcgatttttgaagtgcaaacctccagatattaaatcacgtggatcaaacgaaagaaagcactttagtagccagtcacccctctctgttttgtatttatgaaaatagaatttgtcatctgaaaaaaaaagtgttatattgtaatttcggttgtcagtaactcttgtcatatgattctgtatgaagtagaaagttgttgaacaatcaaaagttgatgaaatttgataatgttctaatgtaattgtctctgaagaaaaaccatgaaattgaattcaaaagtctctactgctcttgaaatttagccacgaaagaagccttaattacaattacaatttgcagttttgaagtttcaatgataaagccagacatgtttgtagtgatttttcattcaatttagaaaatcaagacgactagacatgacattatccaattagtcctctataaacaacagtttgactaaaccaatatctttctgaccatattacaagaactagtattttttttttctttttcaaaggaatgatttaaaaccagaataatctcaatctacgcaaaggatagttgttgtataataataaaagaaataactgcacaaaatgagacatgtcattaggctatgtggacaaaataagaaaagaaatgtgagtcactaagcactcattatgaaatgtccactgtatctgattgccttacttttctattaaaaaaactttccacccttgtttgctttgcgcacccaatatggccaagttgaccgtgcttcctcacaatcactacactaatctacttatatttgatgctgagtttgcattccacttaatataagcatccctttgcttctatctattatctcctctctcgaatatagaatgatccacataacattaccc

SEQ ID NO: 2564 - DNA, 4099 bp, Cannabis sativa
agagagagagagagagagtctgaggaagtgagatttcaagaaagagagagatagtcagggagagaaaagagatagtggtgatggtggtggagccaattgtatgaagaagaagaagaatgaagaacaaatatggaataaaacgaggtgagaagaaaagaaagagaaaggagaaaagaaaagaaaaattaaattttaaattttatgattattttttatttttaaaactaatttattttttaattttatatattttttaatttaacataattttaaataactttgttatgtagacccgtgtaaatgtgtcgcgtgtacaagagtgtacacgttaaaatatcacgtacttacattttgagtggcatggaaatcaggtgttgacctagcactcggtctatcaagccacataggcaaataacagggttaaatgaacaaaatgagattttgctaattgtatcatggttttgggggatttttagttaaaatttgagttttgaggattgttattcgtgtttccaacaaaggacacgtggaatctaggtcagcatcaaaagcccaccagtgggtcccaaggaagacaatttgggccaaccccaagttatataggaccttttaggaacgtatcttagctccgtgatcaaatgatcttccgctagtgacaatttgtatttggaaaaagctctagtaccgtgatgccagaagagtcagatagcgggttcctagaagactagtttgtttccccttttatacaagcgcacgagaaagaaaataaatgctccccggatctcaacagaagatcgtatcatgctaaaagggaaaacttcataaacaaagatcaagcaattaattcacaattaattgcccacgatgataggacatggctttgactgactggacttcacaagatagcccaagttatgtaattcaatgtaaatagaagaaaaaagaaaaccaagtgtaattctcttaacattataaatacccaatgtatccttcaaattaagggttgaactctctgacaatattttcttagaaaacttgagaacctactctcattgtattccttgagaattttctagcttaagttacacaataacattgactcgtggactaaggttcgttaatgccccaaccacataaaaaatgtttgtgttattcttactttttctctttcagtcttcagttctaattatttataattggttttctgaaaaatctcagtaaatattttggtgcttttattgagagttgaaggaagcagtgataccatctaaaggttacattcagtaatcatggtgctcacccaaaacaaatctagtcttcacttcattgatcctaatgctaaggcaggaaatgcagaagatcaaaacgaggtgaccaacagtcacaaagatcaagttggcaaagacacaaatctggatgctcttgtatttagagatgacgattcagaagaaaagatgttaatgacaatctcaaagagacctcaaaagatgatcctcaagacacgccgaatgatgattatcaagataaacatactaaaagtggtgctagaggaaaggacactcccgacgagtcaaatcttgtggtcgccatggcaaaaaagttccagttaactgaaagtagactatctcattaggatcagttcaacgagatactgctcgagaagatgacagaatagaagtcgtgatgacagccctaataaaagggaacactaatgtgaaaatacctccaacaattgatgctaccaaaagaactgattcaaaatatcttggaacctcaaatcctcgcaaggataaagggaaaatgataataggcgaaactttgaataaaattcttcaactaaacagcaaaagaagtctcaaattaatcaccaactcaacaaaaaaagaaagggaaccatgattcaaggtagggtgaccaaactaattttagaagaagagttgcacaaaaagataagactgatgtcggagtcaagaagtctgcttctaggaaggataagcataatcacaacaattccataagtcaaagcgatgatgtggatgagttgtatccaatctcagacgacaacaatggaagtctttccatgactgatcttcgaagaaaattaaataagaaaaaaaaaataaagcaagaacagaaaaagccaaaccccgtgggaacgatttgagaaatcatatcaatgatcgtgttcatagaaaagaatctttgagtgacaaaactcaatgcttaaaatgcaaattcaaagagttgatgaagctcatagagaagatctctagaaagcgaaatggtaattgtatcagattctaaagaagaagacacaaaatcatgtgtgaaaagaatcatagatgcaccactttcgaagcacttcaaaatgccacaaattgaattgtacgaaggcaggatggatcccagggaccacctttctaagtaaaattgcatgatgcaagtttctaaggccagtgatgatgcaaaatgtctttgcttttcactaactctaagcaagtccgcaaaagactgttggaagaggttatctccgggattgatccacaactggaggggtctacaagcaatgttaaaaagaaatttgtagcatcaaaggcctttgacctggaagctagttccctgacaagtgtcaaacagcaactaggggaaagcttgaagaagtacatccaatgtatgatggatgttgcggctaaaactaaggttactaatgatatgaagatggtggctttaacatcaggattaaccaaaggatccttgctatggggagatctccaacacaaaagagcaaatactttgactgatttcttgacgagagctcaaggattcataaagttagaagaagattatgcttaagcttatggggtagttccagcaccttccacatacataaaaatagcccaaacttcacaaatgactactgcattcattttccctctaggaactgcctttacaattcctaccatttacggaccaagtgcttccacgcagccagttgtacaggctagtttttccagacttggaggggtacaaaccgaatttagtgctgctcctgaacaaatgaaccaaaaagtggaatctctagagtccaatgtaagccaatcacggagcaaaaggagttcaaaaggtctaagccaaaatgattttatgaagaaacgaaagacccaagagttcagatattctgagtacacaagccttgtggatactcgagagaatgtttataaggcaacttgtaatatggtccattataagaagcctccgttgatgcacaagggaaaaagataaaaaagagatctaattaagaggtgtgaataacaaaatgatattgggcacaccaccaatgagtgtgactacgtaagggatgaaattgaaagattgattcgaaatgggcatttgtctaattgggtaagaatactagtcatttatcctagatacggggttgcccatggacaactttttattcctagacaacatggagtcattaatcctctttagggagtaggacatccacaagctcttggaattcaagctttcaacgtataaactcttcaaggagttaaaaatgctccgatagcaaggcatgttgtagctcctagtcctagaaatccatatcctcttggagcagcctagcttgtgctaaatggtcacgtaaccaccattttaggtggaccatacattttcggaagcactctaaatgcacaaaaaaggtacttgaatgagtttgatcaagatgaaacttgcaattggtacaatcacctgctcagcattctcatatgatgaatttgccaatgaatttcacagaagatgatgccaagcttgtgcattttcccacaatgaccctttagtgatataaggtcagattgaaaataaaagattttctagaattcgcctagataatggaagctctgtcaatatcattttcaaagatgccttcaaagccattggtcttgtggaagctaacttattaccttgtccaattcaactataaggcttcaatggagacacgccgatcccaatgggaaaatacaacttccaatgacaataaatggagaagtcactggaagcaatgcagtgtcttctttcaagataagaaactaagaag

SEQ ID NO: 2565 - DNA, 1735 bp, Cannabis sativa
acttagtaattgcacaacaactttcttaaattaagagaatagcttgtatcattttcttcattaacaatactgttttcagtctattgtttattttccattttagaaaatgtgtaataattatttatttcaggattcatgccgacacaaacgttgttttgtttggtactcctagaaagttttgatttttataaatagaaaataaagatatgaccacttagcaaagaaatccctttgtataaaaagccttccattttcagctctacttgtatgagtatagaaagcattatgtccgtaattaaaggtaaatcatagtctctaatccaactttaagctaattaaattgagcaaatctattgttattttctttatatacatataatttataaactcatattgatttcaaaattatgtcataaatagcataacaggaaatagttggacaagactaaagttgatacgtaaccactcttgatagccttttggaaaaagttttaaagcgaaaaccagttttttattgtggaaataatattaattaatagaaaagagaaagggatttgttaattttcttcagaaattaaagaaaaaaaaagaaaaaaaaagcactaatctttgcaattagttaacattttaaaaataaagattaattaaagagataaagatggagctttcaaaagagtaatcgagtgcttaagcaacttaattaacacaacttttccattgccacttatgcatgcagccaacgatcaacaactacgaagtttctaaagttttgttcattattaagtaaagtaattatgagtttataaaataataataacaatcaaagtggtaaaatataatttcatgacaatgggatgaatctcattggacaaatattttaattgaatggcaagttgttaaggaccaaactaggtttctatatatcattattattgttttagaagggtttgaaagaaaatcttccttattaatatcattattattttgagaaaaatctcttaataatatttttttagtacaaccatacataaacaaatcaagttagggagtgtatcgttcaggtagtgtcgttctctgaagaatggccgcttgtttactttgattgcatgcagaaccgataattttcccatagtacagcacattagtgtcctgtctttcaaaaaaaatcaagttagggagaggcaactctccatcaacaatacagacaaccattaggagaaccctccattttaaaacctagagctcttacacaatagaacatatccttaacaattatatgagcaacaacattagaatttcttggactgaagcgaactcccatcacggtcgcatctctttggtttcaaaaatcaccggtgcgaccagtagctccaaagagccactctactcatgcaacctacccagcatacccattgcctcactacagttagataaaacccaacatatatgcaatcccagcgaagacactaggcacataacctctctaatggcaatcagcttagcaataagaggggcataagggagtccaaggaacgtatgtttcgacattctcccataatgatcccttatcacaatgcctaagctaaaatgtaacgctctaatgattaggcatgctacaatgattttttaattataatgcacacctttgacaatcaaaggattttatcgaaaaatcgtgataatttaaactcttgaaaacattatactttataattgtaattatatatataatttt

SEQ ID NO: 2566 - DNA, 1484 bp, Cannabis sativa
aatcaaagcttgaatttttatttttatattctttatttctttatttcaatctttctgttgttcatattttggtgttttgatactgtttgtagaaatgccaagaatcagtgaccttccatttgaactgggttttgatgaaaaagtgaattgcttgatcaattttcaatccaaaagctttaatctcaaaagtcaaagcttgaattttttattttttttcttcatgtcttcagttcaatctttctgttgttcatattttgtgttttgatactgtttgtagaatagccaagtaaccagtgaccttccatttcaattggttttgatcaattgcttgattaattctcaatccagaagctttaatctcaaaaatcaaagcttgaatttttattttctatttttcatgtctttagatcaatctttctgttgttcatatttttttgtgttttgatactgtttgtagaaatgccaagtgataagtgaccttccaattgaactgggctttgatgaaaaggtaaattgcttgattaatttgcaatccagaagcatatttcataaggttgaaggtggtggtttaatggcattgttgagaaagtgtttggaatcagaatccgataatactataagtgttttatctggttatgttgatcattttgagagccttgagtgtgaggatgttggttggggatgcgggtggcgaaatattcagatgttgagttctcatttgtttcatcaaagacaagaagaagtaaagggtgttttgtttggtgggaaagggttcattcctgatatcccatcactccaaagatggcttgagattgcttgggaaaagggttttgatcagcctggatcagaacattttaatgggaagatttatggtttggaaaaatggattggaactactgaatgtgctacccttttaagatcttttggacttagagcaatgattgtggatttcggtcctaaggagcttgagtctctttatctaagtgtaccgggttcaagtaccggggtagaagggaagagtgaaggtaatggagttaagaggagagggattcaagtttatggaccaatggatagatttgtagtgaaaaagaatcactgttcttcttctcaagcagattctaatgtgcaggagaagtcttgttcttctagtgatattactaataaaaatgagggtcagcaggttcttgttgattggatctggaattacttttctgactcgaataaacccggtaatggtcgtgtaattgttagtgagaaagcgtaagtctttatctttttgattgtgtttgtcagtgttttcattagttttcttgaattttgcattgttatgttctttttaaaagaaacaactttgtgttaatatgtgaaatatacaaatgaatagagatcagaattgatctcagagcatctccaaagccaaaaaacaaacaatttaaccattctctactaaggtctagaaagtatagtccctcaaaacacttgac

SEQ ID NO: 2567 - DNA, 1810 bp, Cannabis sativa
catcagcaaaaaataaatgtgaaaccgataacccattacgaccaaaattaaggccatgtaaccttcccgcattttcttcattagtaatcaaactagtaaaagcctcggcacaaaagaggaataaaaatggagataggggatctccttgcctcaatcccctctcaagaaccatattacccacaacttcaccattcaacaaaaaagaaaaactcacagaagtaatgcaagccataatcttcccaacccaagcactatcataccccagccgtagcatcattgccctcaagaatcgccactccacgcgatcatatgctttagccatatcaagtttcaatgtaaccttcgtgccattccgaaacctattcttcctcatacaatgtaaaccttcaaatcccacaattgcattatcatgaatgagacggccctgaacaaaagcactttgagaggtagaaatcaccaaattcaaagagcttctcagcctattagcaaggcacttggaaacaattttataaatcacattacacaaactgataggccgaaactcctccactttctcaggcttctcaaccttcggaattaaagcaacaatcgtatcatttagacaatcaactggggcatcattattaagtatattaagacacactgcaaccacattctttctaaccttcggccaaaagcgctgatagaatagagctggtaacccatcctttcccagagctttagacgaattcatttgtttcaccgcaaacacaacttcctcagctttgaaaggccttcccaactcctcattcatcgcaggtgtaactttctgaggcacaacttgtagcacagcatccgtcacctgctcatgttcctccgaagcagtaaacaaattgcaaaaatagtctccaatgatctcctggactaggaacttatcattctgccaaactcccatattatctaacagccccttgatctcgtttttcttcttttgagctgtagccttctgatgaaaaaatttagtattgcaatctccactttgtaaccacatagctcgacttcgttgatgccaatacttctcatctttgtctaacaatccattcaatttcttctcttcaaccttaatacccaaccaattacttgggttttgagtcgatgtcaactcattcaaaaggtgtctaactttggaaatattcctatcattctccttcttcctctttttattccagtgatgaagagattttgcacaatcatccacccgcttcctaaaattaccagcagcattcatttccattccatcataccaaaactgatctattgcctccacacactcagtctcctcacaccacgtctcctcaaaatggaacctacttcttcgtctaatacacgtatccacggaatcccaaagtggaacatcaatcacaagggccctatgatccgactgaaaccaatcgagaacatcaatatcagccccatcaaattccctatgccattcaacattacaaagccctctatcaaaccgctccataacaccattaacttcatggccattacaccatgtgagttctgtcttattagaacaaaaaatcaataaggcaacaatcatcaattacctctctgaaattatccatggcacctgataacctatcacgaccacccactttttccgaagccgaaacaatttcattaaagtcaccaacacacaaccacggccccgacacctccctcttaattctctgtaataattgccaagaaaaatgtcgttgagaagcatcggagtgaccataaaaacctgtaaaaaaccatggcaaaaccccctgcctagccactc

SEQ ID NO: 2568 - DNA, 1756 bp, Cannabis sativa
aaaatgatcgtttcacgatccaacaatttcattatctgagacatctcagcagaagaattttacacctgtgttgtgccaaagggaagatgtgcacaatgctatatgtaacaaagagatggagtatattagagtataattgcaaacccacaactaatatttactcaatcaatattaaaattactttgcaagtattaataaatttataaattaaaactagaaatatacttacatcttccttttcttgtcatcatcatcataaatcctaaccaatagaaaggttgggaacatgagcaatcttatgccaatctggtcctacttctcgtttgcatctttccttcaatgcattacaatcttcaataaccaaatgtgtgagggaggtgagcccttccatcccattaggaagggacaacaaatttcgacaacaaataatctcaagcttctcaagtgagatgagttttggcaaccactctggcaatctcgttaatttggaacaatcttcaatccttaaatttcgcaaagtcttagcagcttgttcgagccattggggaagatctgttgtctctggtaacgaaaaaatcacaaatgtttggaggctcaattgaacatttttattactaaattcacttgccaaattgagttttgcacaatcacctattgccagagtacgtaatgtggtgcagtttatcgagtcattcgacaacactttcaagttatcgcaactattaatgtacaaaaaacgaagagatttcaagcttccataacacaaaaagctctgttttgtggttaacataagagtccttaggcttactaaactccctatgtcgtcgggtatttcctcaagctccacacatccatcaagaatcaaagtttgcaaactttgcaacttgcaaattgaattaggaagtctcttaatcttttcgttttccctcaagttgagatatctcaactgcttcatggtgccaatcgaacttggcaacacctcaacagataattttgacaaatcaaacacttgcaagtgtttaaatgttgaaatgcaggtagaaaggaataactgcacaacttcatctttctcatctttggcactgttaacatgaatactctttagtttctttagcttgctcaactttgttaagttgatctcattgataacaattcttaaatatcttactgtatcagaaatcattctgtcatcattagaatttacaattgagcactcgttttgggtgattgagcatgcgagattgtgaattaaatcatgcactctaaagtcttggttgagtccaaaataatcttcaccgtgatcagcttgaaagaaagatcggttacacaactctacgcagcatgactcgccgatttcttccaactcctctttgttcttaggtgaaggaaggattctgagagccatccaaattctaatcaaatcaaatttccacatcaaactatcctcttcaaaagttgaacaataagcaaaacattgttttaaggacggagacattgcgttgtaacttaatcgcaatgcaggtaaaatgtgaccttggtttcgttctagctcccaaattttgttatctctcacagttttccacttatgagcttcagttgtctgtcgaagccgactccccaaggtcttcaatgccaaaggaacccctccacattttttcacaatttcttcaccaatttgtttgagctgtggatactcagctactaatgcttcacttccaaatgcacacttgaaaaacaaagacaaagattccttctc

SEQ ID NO: 2569 - DNA, 614 bp, Cannabis sativa
tttaatacttgcttgtattgtttttccatagtaattgaattccctatcataatcatgttacttgtttttccaaagtaattgtagattaagaagttgttgtattttaaagaaaattgttataattaattcgttatataaaataaaaatatttttaatgtgggtgacttcaccaatgcttcggtgagttcaccaaagcttattttacacccttatgcatcatgtcatagtaaattaattcaaaaagcttaaccaagttcattttaggctctccagtgtcagaccacactattcatattcaggccgaacgcacacctgctctttccgtctctctctctctctctctctcaggtgtgtatgcattgctagtaatattattctactatcatcatcatcttgtgtacctaaacatagtttctggttttggtgtttatgaattgaatccagttcagtcataatctgattacgctacttgtacaaatatatgtatattttgtaggtttagttagttgacaatggcgggaatagctatggccttggatctgttgaggaaaaccccaacttcatacaatacacttcactcttgtgcgttcatttctgccacggctgctgcctct

SEQ ID NO: 2570 - DNA, 1289 bp, Cannabis sativa
ataaagagaagaaccaaagcaaagtatatagtataaaattataataataacaaaaaagatattgaatggacatttttggaatgaattatgaatagtaatcaatatagtagctaaaaatttggatttctttttttagggaggctctcccttaaaatgatttatatatatatacatgagaagagtcttattttgattaataacaatgataataatggaggaacagatgaaagagaatgagacagccataagagaaaagagtagaattggagcaataatagttgagtctataccatatattatctgcgtattatgtagcttttctggtgcaggctattttttggtctctaaagtttctctaaacaaaggtatgagtaggtatgtgcttgtcacctatggctttgctattgggactctatctactgctctacttgcctatctctttgaaaggttttaccttatttctcaaactctatatgatcatctcttgcttcttcttaattatgtttttttctctcattatctaattcttgtagtactttctctcttgcaggaaaaacactagtaaactcaccatccctgtcttgagaaatgtcttctttctaggtctgcttgggtgagtaaatatttaacttgaaaacacatactataattatatcaccatcctaataatttttactaactttatgtttgtattaattaattgtttttcagagcattagggaggacaatgttttatgtgggattagaatacacttcacagacttttgcttctgcagtgtccaacatatttccagtgtttacctttgtcttagcagttttgttcaagtactatacatcttaatttgttgtcttataattatatctaaatagtgatattttaatattatattttagttttttgtggtgataataatatataatgatgatgatgatgatgatcagaatggaaaaattggagatttcgaagaatagtactcgagcaaagataggaggaagtatagtttcatttgcaggagcaacaatcttgaccctttacaaaggcatgaaagtactatcagtacacaataatactcaaagctctcatgatcaatctgttacttctacaagactctcttttgagaaagatcactggataaaaggctccattattcttgtagcatcttacttctccaccgcagccttttatctcctacaggttcaattttttttttaagtcaaaaacaaagattatatattataatcattattaattaattaaaaactgaaactaatttatattggtaaataac

SEQ ID NO: 2571 - DNA, 1620 bp, Cannabis sativa
ggcaccttcacccctccacccatatatatcaagtatctaagaagatttattgtggtcaaactatcttatttagcttgaacgaccaaataagactctgtatttggccttatgtaaaagtaatgattctattttcctttaacgtgtggcattaaattaaagagggcatataaatatgacctctagtagtggaaagggtactcgatacttatgagattatttttatcaatgaagtgttgaatgttcatcatttatctgatgtttgtcattctacacctgcccatttaacttgttttctatacttggcatttcaaatttccaaagtaaataaaatagaggaacaataaaaagtacaagttaagtaactacctcgcatacaaaaaaaaaatactcttcaagaatgtaagaattgactactcttgtagtccaagagagtaacagcaagaagcaccagaaccacctcatggaaataagcctagaacaacttgagtcaactagccaaaaatgatcttgaagagatgcttgaaaaatcttactatgcataaaaacaagaatgacacttcttgaacaaaagttataagcaaataagaggatgaatatctcacatggatgatatgtccttagccataccaataaataataggatgactggtcaatagggtcaatacgtccttagctctcaggcacacacaaatgctcaaaacaaaaataaaggaccaccgacgcctgaagggttaatggctccttatgtgctcagaagggttctcataattaaaacaacttgcaaaagaaaatttatcactaagagagaactcatgaaagagtcctcaagagaaaagatgattcgtaagggagcaaccacatgaaaaagaagttgaggaagcccgattagcttaacactcactaaagtgccacgtgtccttaaagaagtcaagcaactaacactccctcgcctaagagatatcatatatcaaaaagaggttgagaaggcttaaggagctaaaaatccttcactcaaaagagagatacatattgtaaaattatcattataggagaaagggactcatgaacgagtcgtcaaaggaataaataaagtatggaaagggtaatatctgacggagagaacccataggatgactctcatcaaacaataagaaaaaatgtagttctccaataaaagtctacaagaacacttggaagaattcttataaactagtgggcaagtgataaccccaaaatttcacaaagtataatcttagagttattattaaaatacgaagtaaaatattatggcaactaaagtgggtcccaagaggtaactacccctatatagctctctccattttctttatttctctcttattggcacctccaatccccttggcaccaccaaccactttcctctcttcccttctcttctctctttctctctccttggaaactcgaatcccatcggcaccaaggaccatttctcttcctttctctctccttggtaccccaacccccttggtgccaccaaccgctttcctctcttctcttctcttctcttctcttctctctttctctctcattggcgcctccaactcccttggcacaaaggaccacatctctctctctctctct

SEQ ID NO: 2572 - DNA, 1477 bp, Cannabis sativa
aaacttttatggccaataaatgattaaataaataaattaagaaatggggttttgttaaaaccagcaaaacaaaataacccagaaaacatagttaaatttttttattaattaccttctaaactcagaacaaaccagacaagagataacccagaaagctaaatggatcaaagcattttagagattcaaaatgccattcttaagcacaactcatattccactaatgagaatataaggtcatacagagaaagaaagagagaaaaaattatgaagagtcaaagtttagaaaaagggcactgagtttcaaagtgggaaaactctgatcaaatactcagaacaaggtataccgtacaaatatagtggcatgcaaaagaaagaagagaatagtaataataacttatagagaaaagaataaagcttgagtttttttagcataagagaagatttaaacatgaaaaacttacttacccttgaagttagagacaccagtggaaagagaaagagagagaaagggtccaaagattctttctttttctcttaaaaaaaaacttatttttttttttcttttagagcacacccttttttataaagtttcaatttttccaatttgtaacataattttcattctgatttttgttttaattacatcagaaaacaactgggattatctgtttctctctctttcacgagaaaaggaattggattctctctctctctctccttttctttctttgtttctctcactatattgagtgagagagtgagtgaatgaatgatgagtgatgacatgtggaagagagaaaaatagtacaaagtctaaactgtgtgttaatttttggtgatgaaatgaaatgaaaaaaacactcttcaagaccaacaaacaacaaggttattagattaaactatggttaaagttgaaagtggttcccttaacatggggtttccatttttattttaataataatataattgaaactgaccacctaactctctccatgtttggaatctagaagagggctcacttaaaacaaaacactttggcgcgtgtactacacgaactaatcattagacttattattatcatttatcagatcccataatgtatagtctttaataagtaagttgtcaagtagttttattcagcaaaacaaagttgtcaagtagttttctttttcttttctagttttcttttacactcaagaaagcatagaaactaatcattattatactcaagttttatatgtcatcatttttaatcatattttttacttggttaaaactaaaactataattacaaatatgcaatctcattatgtgtgaataggtgtaaagtgtagtataacctatttctttaaaaaatatatttttatataaatattattttttattttttattttgtaaaagttaccgattaaattttttattttgttaaataataaattcaacattgtattttttataataatataaaataatact

SEQ ID NO: 2573 - DNA, 3236 bp, Cannabis sativa
tgacatacttgatgtgctagtgggcggttgacctaccaaagtacagacatacatggcattaggttgagtagcaaggaacttttgaaatgttctgacaatgcagctgtaagagccaggtgaaggaatagttgcagtagtactaaattgttgaggtcgaatttagttgttaaacagtggttggttacccatatgaggaggcttggactgatatctctgttgttgcagagcccgattcacaagcttaggacactgagctttccaacgacctttctatttgcaaaagctacactcatcaatatcaatctttgtgcgaggtttgttctcttgtgcaagaaatggtgtagtaagaggaactactaaaacagaagagctaggggttaagagaatgcctttccttaacttagacttgagacgaatttcatctgctaacaatatattgactaacaatacattgactactgaatcaattaaaggaagcgaaaaacgatgtaatatagaaccccgaagtccctcaaaatcacgacgaagaaccattaaaaattgaactaatctttgttcctctctacgagcaatataggtgtaaaaagacgtagctctattgattctgtgagtgccaattaatcccaaagatctatcattacagaatagaactcttgaatgctcgtatctttctatttaatagctctaaatcattgttccactaaaacttctttgcaaaattggactatgtatatagtctcgcaagatggtcccaaaagttcttttgttgtctcgtactttactaacggggtaccaataaattgctcgacagagttatttatttaggtgagaatttttaaattgtctatttctcaattttctaacggatttgtattaccatctgttggtttcctttttgttcaagaaatataaccccacatctttttttcttttgaatttttttttcataacataattccaatacaaataattatttccatccaatttcacactgatcgcttgaagggaatcatctttattggtaacaaattgcaaaaaaaatccatatacaaaactgatgaaaattcaaaattgtgctgcgaaaatcaatacccaaattttctatctgaatcaagaaaaaactgaaagaaattaataccaaaaattggaatgtcaaactatacagatgacaattgtacagacgcctgtgaaaacttgctctaatatcgtaataattatttgtgaagagaacgataattaagaaagagatgcagaaaaattaggattttatttaattacaaaattaagaataaaaaatacaactaataagaaaatcttatataggtaactaacataaaagattaaaataaccctaaataactgtttaacaatatctaaagtcccatcatcattattagggttgtacataaatttttgtaaaccgcccaacccgaacaacctgcccaaaccaaaccgagataacccgacgaaaatacaaccgaaaaacccgacgaaaatataacccgcccaatctttatattggacgggttgaaaataatattaacccgctaaatcaacgcgaactaacccgaccaactcaattaagagagttttatatatatatgtgcttttattatatataatctatatattatataatttatatacatatttataaaaataaaaaattcaaattactatattttttttttatgacggatgatttaaactttaaattcaatctttatatttatctcattatcacaataattaaaatataacaattgaatgtgaaaaaaaaaaaacattagtgctcggtttgaatgggttaacccgactaaaccgaccaattcattgggccggttgaatttttttttttcttaattaagtaggttgcacttaaataaaatataatataaactaacaaaaccgactgccgtagcctcctaatcattaggtataatgtttcaatttagtgaaaataatgtgaggacacaaaaagttgtagctagctagccactacttgaatacatatgaaaactggatttattgatgagttgccttgatttttccatgtataaaatcctgatcaatacatttattggtgtttctgtcttttgtttttggacagaagtggaagttgaacgatcaaatctgaacttgaagcaaagcatagcaaagtgataagagttcttgggtcattctatccaatcaaggataaaaaagataatccagagaatcaattctcacaataagtcaatgacaatctaatcttactttttttataaaatagaaattgccgtgagcggcaggattcgaacctgcgcgggcaaagcccacatgatttctagtcatgcccgataaccactccggcacgcccacttgaggttagtttgtcatgaataaaatttatatccttcttatttcgcttctcaattcatattataacctctacaaattatttctattttattttattttttgaaaaaggaaaattattttactcttcaaccattgaattagttttctttttcattgtcaaaactgacaattatgaaacaataataagaacaaatagagggtaaaaagttttcttctggatattatttcaaataattaaagtggttttgtcaaaggcaaaaacataatgtacaatattataatttgtcaagacataataaaaggagccaaattagcttgtgtgatctacaaaaggtgtatgaaacttttgattgggattttcttaaagagatacttgaaacattaaatttttcttagaagtttgtagatcacattatggttttggttttcttttatgattatggggccttgcacttgtacctttattctaaaagaggccttagaccgccttttgtcaaagaaaataagtacttagtcaggattaatagaagagttgcaaaggatgttgattttaattttcatcctgaccatgatttgttattctttagcaaaggaaataacacaaatctgccaccttgttacttcgaggcttctagttgttttccaatactttagggctcaaatctaatattgcaaaattaacaattcatggagcaattatggattctgtggcatggatttgaatagtagatatctctggtttctaacgtaaaaatcttgcccttaagtatctcgatatgaaaatatgctcgaataggatttcaaagtttaattgcagttgactggtagaaaatatgacaagtcaaatccgcacttggagttctagaaatctttct

SEQ ID NO: 2574 - DNA, 1480 bp, Cannabis sativa
attcaccaatcaccatcctaatattcctaggcatcttcttagtgcttcatctgttagggactctggtttttcagttcaatttcatcagagcagaatttgaatatggcaaatccagtggcaccccagatcgccattcttggagctggtatctttgttaaaacccagtacattcccaggcttagtgagatctccaacctagtctccctcaaagctatttggagtagaactgaggttattactatttctctttcttcttcttctttttcaagaacccttttttatttttattttctttaattttactgtgtttttggtttaggaatcagctagaggtgcggttgagattgcccagaaattttttcctggagtagagtgtaaatggggagataagggtcttgatgagatttctcaagatagttcaatacttggtgttgctgtggttttagctggccaagctcaggtattatcaatcgtatacaatttcttataaccaaaaaaaaacatcttctttttgatgtttatgtgtaaatttagatgcttgaagttgaaagatttactttttttgtgtgaggtttatgttttttgttcatacaattggattgagtagaatttggtgagtgtaaaatgttagtatatttatgtctaaaattagagtaagttcaattgttaaaaattaagaaggtggcaatagttaatgttacatgaaagtggtataagagtttaataggaaattgttagtattgtctagtttagtataaatatgtagtgtcattttacaaatagattttcaatgaaatgaatgagaattagaagtattcctattggagtttggcactaactcgaacaatgtctcccagtacttgtattcgagtttggcactaactctcaatgaatgtactaatgataagtaacgggtcctcttcaagacagaacaaatctcccaaacgaaccaaagttcttttttctcatttcatatccattaatcactatacaattacatatttatactaagatagacactactaacaatttactattaattctccaataccactttcatgtaacacttaaggtgttcaacaccataccggcgtatcacctcattattggtaagtggttaaccatatattattatttatttaatcaaaatgtgtgggatttgatgttgaaatgcacaaatagctatttgtcactttttatggtgcttagcatcttaaagtaccctaagcatttctcgggtggtaatgatcaagactcttgggtaaactatagcattttctcttctgtaatgaagataattttttgaggcaaaaatgaatatgcagtgagtttccctactttggtttagattgatcactgcttgcttatgctgtgagtttccctacttttgttttcaaatgaatatgtaacattaaagttggtcctttagagtagtaaaatctgagcacaccaattgatttgagcataatccttttgtttt

SEQ ID NO: 2575 - DNA, 5950 bp, Cannabis sativa
  modified_base (1719)..(1723): a, c, t, g, unknown or other
ctctatttctgctcagctatcataactgtccacttataaataaactcctcagctctacactgaatactacttcaacacctagacttattctcaactgttcagacttctctctcttcctcaagtccattctgtcctagaaaattattgagtgaagaagggttgtataaggattccttgtgtgtgttcaaggttttccaatgtgaggcattttgttactggggttgaacattattgataagtgtaattgaggtataaaactgttgtcataatgtcccgaatcaattaataaagtttaatttttctccactatcgttcaagataagttttttggttttttttttttttaatttattgttgttggttttaatttgagttgattatgtttgaattgttctacgtttatgttctaacagtgagaacatagtgatttaatccataaagctataataatgcatgacaattacagttaatagagtgaacatataattctcagttgatgtgctaaaacataactatttagagtagaaataacaaatgtcagcgatgacctttttggtagagagacaaacaacaagggaataaggtagattatgaaagttaataaaagaattaacaacaatagtcaataatagagagattgccttgaacagggttacattggatgagatggatgattgagaagccagttgcttttttaaagtagcattcaaaatgacataattaattagtgagtttttaattgaatttagataaaatataacatttggagactacaatgagaaaaaaaaaaaaagaaagttaaagacctaaacacttaaaaaaaaaaattaaggacctaaaatgatttacttagaataaaccagtattttttttagaataaacccataatttactaaaataataatacttttttccatctcacccccaccaacttctccaatttcttgcatcttcaatggtacattcaatttttttttttttttttttaactaaaatagctaaaaagttaaaataagagccatttttattattcaagctccctactttagttagtatttgattatttgattatgctactatctaaatgtagtctttctcacgtgttgtgctttcggactagtatattcttgcttacatgttgtgtcttcgagtttgtcatatcatgttttgattagaagttgaagatagcagtgcttgttttctcttgatgcaagacttgtagaaatcttcttctgaagatagcgtgttgttagtatttgtgccctgaaaattctgtaaaaacaatattaattattattagttaaacattgtgatatttacttgattgctaaattattaatattgaatattgaataatttatatatatatccaaaaattatatgagcatgtgatttgtattgtatagagaattaagatcacttagtcatgaataaaataattagaaacatattaaagttatgtaatctttaatcaacgattgctagtactgttcactaatacttgttattcgatgcaagcaatctcgattcaaattgctgatgtagtatgacatctaactgattgtgatgaatacaatagagattatatatggcatgaattgatatgtaattaagttgtctatattaaatatgtcagttactataaagacctaattcatatcataacgatgatcaataatagatagacatgcatcttgagtaatcatgaactcttgttcnnnnnattagtttctttgattcacttgttaatgtttttcaaagaatgattcttacaacttctattttgggaatctaataatatggatggctgggaacttgatttagaattatggaatcttaactttcctaatgggtcaaatgttagttccttttaagtgttaattctggagctgaaaagttgtgcacaaatttaaattggatcttattgactgatgttttcggtaactaataattagagttgtatgaagtaactaatgaatgttagaagagatgatttttatgtggttgagacattaacaagccttagtctacgagtcattgtattgatgagagtatttattacaaagagtttttttgaccgatcctaatttttgtacatcattgggttatttataagctcataaaggtggtaaaatatcaatattttcgtgtttgtttgcatcatacttcgtacaatttctcaaatccgatcttaagtcctgattgcttacttttgtgatagattttagactatctataggtgtttagtaggatgacttatccctcatttatgacttgacgactcatttatacaaccggcaattgatgtatggggtctcgtgaaattagggaatgatgaacttaaatccttaaacacacttaccagagtaaggtgtcaaatgctctttcccatgccgcattaaatgcgtgtacaatattttgatcctcgagtgacgttttatgtttcatcagtactcccgtacccttctccgagtagacttcactcgtagagagggaaagataagagatactcgttctctagcaagatcctctgtcattaatcctccaaaataatagacttcgggagtaattatagtgatgtgtctttgttaggtgggtgttactgccatctgactcactccttgtaacgtcctactcagaggaacaccacgtgttgcgattaactaactaatcccgttaattggggtccataagccaagtgatttaaaactaataataaacttactttaaataaataacttgcaatattacaaacttatttcaaacaaaagatatttaaagttacataattgggatctcgtaaaatttatttttaaaatattgcaagtcatttcttataggccgacctaagcggcaaaattaaaatttctacataattccctgttggacctaaccctcgtggtctagcttggcttgaacatgtacaactcatcttcaaaaccctcgaactcatggctaaagcaacaccaccaaactagtgactgcaccttagaacacccgtgagccaaggcccaacaagacagaataataatacaatatgaataattataacaattacacttcatatagtatgtcactccgtatataccgtgccactgcagtttatatcacattattctatatatagtaatgtcactataattaatgtctatgttgcatagacccatgtattacgctcacacgtttcttttacatttaaggccttactagagtctgcctcagttataattatcgagtctaacttggttatgccttatctgcataactctactcatatatacataattcatacataatgttcttacagtggtttatcctaatgatgtttatcacgccaaacccaattatgtcttatacacataactcctgacatatatatatatacatacaacacattcaacatatactttactatatgaagttttaaggcaataatactaacttgcatacttctaagcatttattcggataacatactatcgcatgctcaagactatacatatttagggtaatgaccatattaaaaaataaatgatcttagagcgaccctagtctacaataaatatattttgtataataattgtaattcacaatatatttacttagagtacgttataatcccgattctcaatataataatatttatggtaataatcctagttcacaccatataaatttagggtaataatcctaactcacactttaatcaaattaatcacataatatgaatcgcgccattgcgctatactctatgtgcataattcattgtcttactagatttctaacgtatgcagagaaattccaatccacaagtaatcttgtccaagtatcggtattcctagtcacaatttttaagtttaaacacaatagggttaatccccaactttataaaatatttttataaaatcaggactcacatattggatcaaatgatagagctttttatgagatttctatggatataaagaacgtccaaaatagagttcagaataaaaaattatggcaaaaataatttatgaaatattcatggcttggttaagagaagtagcttcatacgtacgtatagggttgagtatcggtcgatttggtcagttttttttttttatataaaaatctagagttcgattttcggtttggattggtgcaatctaaaagctgaccgtccaatccagaacctatcttaaaaccgatcgttttgaaccttggtacgatcgatttaaaccacccttaccgaaaaaaaaaaatctttaaaatttgatccaatttattctataaacacattattctacattttacaactacaaacatacaaattaattgttcaaaaactaattatcttatttcttttaactttaatattaataaagtaataatatattattatatattattggtagctacaacacataaaacaaaaaaaaaaacttaataaattaatatatatgtataacaattagtttcggtctttttgatcggtttattactaaaaaaaaccaaccgtttaatggcaattttaatcgttagtgattttttcgattttcggttctgttagttttggttctaacattgttcggtaggtcggtttgaacggttttttcaattttctaaattttatgcttagtcctacgtacgtatgtaaattactaagtgtaagtgtatggactacaagcacaaaagtttggttaaggataatttgaagattttaaacttggttatttgagctaaagtttcacttttatttttttgggtctttaaatatttttttagttaattttttcttatagttatgtatgttataattttttaagatattttgtaaaattttggtaaatttaaaaaatttaatatgttgaaaataaggttcaaatattatattggacgcttgactattttattttatacgcatgtgaaataaattgtttgaacatttatttctatattataaattacttaagttttttttaaattttataagatgtcaaaaataagtataatgtatataaatatgaaaaaaaaaattctaaatgctaaaatagataaatagtgtagtagtatatctcttttaaaaagagtgtattgtaactgaaaatttataatttattcttattattcccatggaaatataaggtaatatactcacatttacatattatgttaaaatggtaacaaccacatcatttttatcctacaactttaaagtctgcttaatcaatggaacaaaaaaagtccaatgggacaaaataagtgttcatacctaagagttaccctatatatttatacttatagatataattttttgaatatattaaaatatatacatgggcaggcctagtggataatttgttcttttctattaacatggcaataaaaataatcaaataaagaaagaaaaaaaaagttttctcctgacaagaatctaagctctctaaaactataattaacttaaaatgacaaaactgtgcatctacattagaatatatttagtaattctaaaccaaaaacctctcccaccgttgaccttgatctttgtcctatataaacagccacactgcttggtcaaacctttactaatctctataataatagttagcccattattttttattattataatattgaataatatagatcgttacattgtaattaccacttgaaaactgtaaacttgtctggtattcagcttactgtgataaattatgctcattaaagtagtagacaaaaacaaaggcaaaaacatataaaatataacaacttggagcatctgcatataactactgtaaatttttattgcttaattatttcccccatttccatttttattcatttcaatatttttgtcttgtttcttcattaaaagttgacatttgtcattaagcatattttaattagtggattgacaaaatgaccatgtgaatgtttcctacatatatgtaacatgtatttttttttt

SEQ ID NO: 2576 - DNA, 2793 bp, Cannabis sativa
cccacccagtccaagagcccaaaaaaatccttttgaaaatacagatacttttttagtaattttttaaagtatggacccgaaaaaatttattttcctaaagcctaacaaaactcagggccgaccctggttgttcctagattgtttaatgaacaattatggttgttgcagaggatatatggcaccagagtacgcactatggggttacttaactgataaaagatgtatacagttttggagttgtggcaatggaaatcgtagccggtaaaaagaacacgagatatcacccggatgaaaactttgtgtgccttctagattgggtaacatgtttagttcatttcttcttctttctatttccatattggtaatgttgttgttgtaaccttatttattatacatgttttaggccattttcttacaacaaaagggaaatctaatggaacttgttgatccaaaattgggaacaaaattcaacaaagaagaggcaaaaagaatgattgaagttgctcttctatgcactaacccctcaccagcgcttcgtcctgcaatgtcaaccgcggtgagcatgcttgaaggccgaattcctgttcttactttgagcttgcaaccaagtgttcatggtgatcaatcaagattccaagccttgagtgaatacatggatcatttgagagacacaaattcagaagcttataagcttttctctagctattcatcattttctacaaggactggctcttcctctgcatcagactaccctgtttcatcaaatcagtctttaaagtcttaattctcattataaccaattagcaaaagtctcttaagccatccaaagttttgattggtaagaaaaactatagtcaatttttttttcaaattggtagtaatgtgtagaagttttgatcacaatatggtgtttaagttacatatatagctctttgtgattggcttcacaatcatctctttttactaagaatataagttagttaggagttaggtggtagttaagtctgttactcttaacagatttgtcttggtcattatgcttatgttatcaaagattcagagatatttaattagtattgttattgggtaccggtggcgcctagcatcttctagacgtgtcattttgtaattagttagcgatactctctacaagattacattaaattatataggactcgatatttaattacaccattagcgatattaacacccagggccaaccctaaaatttagtgggtgatagaaaaaaatttattttggacccttaattagaaaaatatagtatttttcaaaatcagtaaaaaaaatataattttaaaaggagaaaaaaaaattgggcctttggactaggtactctaggcacaagcccagttcgcctatactcggagccaggtctgttgacacgtataggagagcgctaggcatcattaataccttttagcatttctcacagttaatctataaatatctctaattccttactttgcaaactcccaaacacattgtaatcataagctacttgagaaataaagctaataacattaattcaagttcattttatttttactataagttgtgttcttgagttctgtgattggtgttctcgaattgttcttggagccattcttggtatgtgagatcgagttcgagtttcaataattgacttggcacataaaaaagaactattaatatgcagatgaaagaaaatctagacaatttgaacaagaaaaagggtgtggaaaaatttcagtgaccactaatgagcagtatagattttcatatccaaagcatgtaaactattgtgtgggactggtcattgtcaccctccatgcatggcgggatcaccgccatgcatgagaaatgacagaaagaaagtgaatttctttccactatgttccaggcacaatttgagttgatagtagagccactatattagaagcagataggcacacacactataatttgtgcattgtcaatgtagacatttgttccgagaggttggattgcgatgagcctctcggaacttgatatgttatgcgtgtacacttagtcccattgggccccccttaatttttttttttacattttagccccttgattataaatttctgccagtgtcgtatataaagtgttatatcgttattggtgtaatctaatattaaatttcattcattttactttaataataattattataataaattactaaccaattataaaatatctacttaataatattaatgctcttgaaaaataggtgtaacacaaattatccaacttcttggaaattcttagtttaaatgtgttttgtgaaatttattggttcaaaatgattttctctcttggttatcaagtactttttatatatgatgcttaatattatcttcttcttatcatgaaaacaaaataaaatatataagataaaattctcacaaaaatatttaatttttcaaaagtaagatcaaaacaacaaatgacacataatataaatctttaaaatgataagacttatgaattatatgtcacatctctaaaaccttatatataaaatctttttgtccataataaataaattttctaaataacactttgtggttggaaatctacaatattattattaataatatattctccaaaatttctcatataattctcttggtcacaatttgatgaaagagtctcaaattgatcaaaaagtgttttgtacacataatcaatatgatcaagttgccatgaacatgtggaccatatacacacaattttggggttgaaattaattaattgaaaaatcag

SEQ ID NO: 2577 - DNA, 869 bp, Cannabis sativa
aaaaaaaaaaaaaaccatatactagagagaaaaaagagtgaaaaaaaaaataacttaaagattttgaaacaaaaaatttttatttaaaaaatgtaacagatattaaagatggtcctattaaatatgagacaagtatcaaaattagatattacaagttttatactaatagccttttcaaaaaaaaaaagttttatactaacagtatataaaataacagtaaaaatgttgaaaaacgcatgtcatagtacaaaagtaaaatggtgataaaattacttgaactcccacaaactgaatggtttaactctctaaaccttctttttattagttatttacccattccgtttaaaaagctctattaaatgtcaacatgtactgccgatgcgtacacaaatatacatgtggcaaaatttaaatggtccacattattttaaaatacttttaaaatataaaataatttaaaataaaaataaataataaaattacaaaaacataatttttttcttttcccttcttaaaataaaaataaattaattttttttctttttcttttcgtttttctttttcttttttttttcttttggaaccttcagacccccatcccctgttcctcctcctcctccttcttcaattcttcttcttcttccttcatctgctcagaccccctgttgtttcttcttcttcttcttctttgcctctgttttttggctggtcttgaaaaagacaaaaagagcaatttgagtcggtgagaagagacactgaaatcgactcgctgagtaactgcctagggctagccaatcatcctccaacgaccctgaatctgaaacccctaatcccagaaaccctagaatcaatttctctctctctctctc

SEQ ID NO: 2578 - DNA, 1494 bp, Cannabis sativa
tcacatattaaaaatcaaggattgttgttataataataataactaatattttcatcatattctaagaacttgtataaaaacttaccccgtataaatcatcccatctccaccccatttgacacaggtcacggctagagtgtgaccacttagacacatgacacatttctttaaagcaacgtcccatatacgtgcatccccatctttgctagcacttacaaatcgtcgacatggagcacttaggtgaactggttcccaagagatcccagtaatccattttttgtgtccctaaaaaataggagaaaccataccatcaattgtcgtgaaagtaaattaatcacagcaggtccgtaactataagatagtaaactgtcagaaccataggcaatagatatgagcttcattatgtttgtgacgacgaaaagaatggaatttggtagcacattgacccaattcatttaataagttaagtaaataatcgagtgaaaacacagtgcaattcgatagacctctcacctatttatatacgcagagggccaagaatgctattgctgagtgctgactcagcagcagggaatagcagtgctgggaattagttgtgggagttgggttagagtgcggttgagtattgggtatagagtgaacagcatagatagaggggagggttattttgaaggtgtggagaatttgtgtgggttgtaacccagggagagaaccaatctcaaactcttggatatttaaatacatgtccatttcttctctattttccatctatttctactgttctaaccagatttgcagggataaatcctatcaccaattctaaaaataaaagagaactatattaatccaaaccaaagatacgagactttacattgagcggagagccattaggctttcctgtttgtggatcccaacattgaagttctccagccttgctcccactcactagatacttaccatcaggtgaccaggcaatacaaagcacccaattcctatgtcctgaaaaatcagagacataatggatataaatgattaagaaacaatgatgattataactgggttgtttgcaaacccttgatactgcatgaagcgtgcttttccaaaatcaattctttataatttcagaaaaagagaaggatcaaacatctataaaagataattagattaaaactgaaataagttccctatcccatacctgtacatgtatgcaatggagtctgggtattcagatcccacaagcgaacagtagtatcacctgaaccgcttgccaagtgcagaccatcaggactaaatgcgactgaaagtacaggctctgtatgacctgcagtattaaagtgataagaagaaaacaagacagcaaactaaattatcaatgttgtaaatttagaaagaaaaaaaaagggaaaaatcgttatgtaggaaggcaagaggaaagaattatatatattagacatttgtcaattaattattgatacatttacactttgtcaatgc

SEQ ID NO: 2579 - DNA, 1379 bp, Cannabis sativa
taccgtattcaactatcacaccaccaatcctcgtagtgtacctagagattaggaaaaccaggccatgggagacccacactgatgtcggcattaaagagaggatgggcttggtgatcagagagatgcgaccataggagtacctctccaaaggacactaggagatgctaacgactctaataggagggcttcaattcaagttatttgggttttatgtttatatatatactagaagaattgttgatgatggaagacttcgaagataattatgttagtacacacataactttggacaatcttccaaatagaactcttttaagttgagggaagaatactccatgttcagtgaattacttttcctttcactcatgaatattttaaaaatgcaaaatttttaaagattaaaatggcttacacatgaaaaggccattagagtagaattcaaacttactacgatcaaactgttgtatccccgaattttaagctttttgaggtatagtagttgtctaagcaaggagcaacaacttcgacaaaaatgcagacacacttttactacattcgaaagaaatatgatatcctaccaattggagaatgttgtacttctctgtatcttagttggtgtgaggttagaaggcatctaatactttcatttctttttgcaaatcatatgtgccaatggcaccaatatcctatctcaaaattagcccaataaaatacttcaaccaatgaagacagtcaaaatccaatgaaatataatatctgcaacaattaaacaaatactataaaagcatgattagtttattacaaatagatacatttgtttatgtaataccaacaaaaaattattctagatccaaaaatatgtatgtaagacaattataattgtagagaaaatattctctgatacgaacaaagagaatgtttatcactgaaagtttacaactaaaaatagttcgtgtcatttggaaaaaaatgtttctaacaaccaataatacttacactaatcatatatacaaatacatacccaaatattctaaaggtctactcattccttaatggttttaaaaaattgcatagatctaatagttaaataatcatcaaggtcagtcaaaataaaatcaaaagattcatcttagctaccactataatatattttacagtgcaaaaccaattgagcaggaaacttacaatgtgattccaaacaaagtattttctaacattaaataatttcattttactatgaaatctttgataagattacgtatggcttcttaaaatttattttatcctcaacaaagtaattcattcaagttttccaacagtcactcatttaatttgatgcaagaaactcattatcaagttgaacaaataccaaactaaaa

SEQ ID NO: 2580 - DNA, 681 bp, Cannabis sativa
gtgctgtattcggaatgcatcctgacaagagccctggtcccaacggcttgacaccggctttttatcaaaagaattgggctgctcttggttcggatgttgtgaggttagtacagcgttatttcacaagtggtaaatttgaaaatgatgttaataaggctaacgtggtgcttataccaaagacaagaaatccagagcgcatgacggacttacgtcctattgctttgtgtaatgttttatacaaaacaattacaaaagtaattgctaaccggttgaaaccggttatggataggattgtttcacactatcaaagtgctttcatacccaggaggctcatcacggataacattatggtgtcatttgaagttcttcactacttgaaaagaaagaggaggggaaaagagggttgcatggctctaaagttagatatgagcaaggcttacgatagaatagaatggagctatttagaagcaataattgtgaaactggggtttgatactggttggataaatttgatgatggaatgtgttcggtcagcctcttattctattgtccatgggagtaagatgatgggtcctatatctccacaatgaggaataagacaatgtgatccgctatcgccatacattttcatattatgtgcggaaggcttcttggctttgataagaaaatatgaatcgcggg

SEQ ID NO: 2581 - DNA, 992 bp, Cannabis sativa
aaaatgtgacatccatagtgttatagaccctttttgtaattggggaataacatttgtactctctttgagtgttggaatacccaatgaagatacactaatgagactttggattaagtttagttcttttgtgatcataaatatggaaaaaaattgtacaattgaagactataaatggaagatctaagaagaaggctgcgagatgtgggaatgttgcgagtaacagatttctcggggctttgaattgtggcacacaactaggcatacaatttatgagataggtggttgtgagtgaggcttctccccaaattcgtttaggaacatgatttgaaaacatgagacttagaaactttaagaaaatgtctggttttctttttctttctcagccacttcattttgttgcaaagtatcaacacataaactaatgtgattccttgctctaacaagtatggaccaagaacagagttaaaatattcctttccattgtcaattttcataaattggatctttcggttgaattgattttgaatcatggaatgaaatattataaagattgaggcaatttttgatttttcattcaaaagaaaagtccatgttgttctagtgtgatcatcaataatagatacaaaccatctagatccatcaatacttgttacccgtgagggtccccaaatatcctatgaatcattataaaatgttgtgaaggtttgtaaggaagagtcgaataagagtttcaagtatgtttggcaagttgacagacttcacaatgaaaaaaatttggtcttctgtggacaaatgaatgaggaaatagtttttgaagataaccaaaatttggatatccactgcaaaaaaaatgccataacatgataagattttcattcaaaacagtgaaaattgaacagagaatctaaatttgattggttaccacaacttgatttctgaacttgtttacgtttggaagaatcattgagaatatagagtccatcatgcattta

SEQ ID NO: 2582 - DNA, 2366 bp, Cannabis sativa
atactaaactggattagatgttgttgaaagaacaaacttaatcaaaagcaacaactttcacaattttagggcaaaataaatataattttgttttgaaagcataattataaagtgtttttttttaagaaagaattacaaacttgttttatatccaaaagaatgaatcaataatgaaaatggaatgataaagaaaggtgaaaaaaattcaactctgaaacatgtattaataaatttttaaactcttagatagatcttgatctagtgattgattacaaattatttataaagggaaaaaaaaaatataatactcgttaaaaatgtactcataactttatagtaagtaatgtaattattattttgaatcactaaatgatctgatgaaaatatgttttgtatagatttttatgattaattttttcttacgcaaaatacattattttttattaaatgcaaatatgcaatggtaaatagtaagtgctatttttgtgtctttttctcttgttttaaattactaataaacattgcatatttttcggtttttgtttggttttgtttgcatttcttttattgttttccttttggtctttttatgaccattcatggcgcatggtggagagcaaaaagcttctactccatgatatgagtgtgttaatttcttcatgttctcaaatctgggtatgtttattttgtgtcttcttgttttcttttctccaaaaattcccaggaataatatacgatgagcttgaggttgtgggtcttctctatactgtatatttttttttattgagtgtatcttgtgattttgatatttttcttcatgattttgggacaatgtatataaatttttggtattttcttcataaactgagcatttagaaattctcatattgtctttctgtttcagtttcaattatcataatcatctctctttcttattttttccccctgtttatttttgtggggtccctgggaaaacaaatggagtgttgtttaacttttgggattttgagtacttttattgtgattcttcctttctttatggtatgcataagtcatgcataaagttttctcctttgagtgtgcattaccccaaagaagaaaaaaacctccttttattggttatgactaggatatttttcattccaggtggggttttaaggttttctttttatttaccttacccttttattaatgttttgaggtttagctcataggtcattcatttggattatacattgatatcccagtagtcaacacattcagaaatttatggttcttcatgattgtgtatttgttagtctcttaaatttctttttcaaaaaatagctttctcatctatgaattacatttcaaaataacggcttttctctattgacaatcttttgtactaaaatgccattatcttttttatttaagggagaaaaagtacactggaaaaactgcaccaaacattcttaaagatgagtttggtaaggttgacattaagaaacaatcatccctatatccttctaattctgttgaaggtaaaaaaaaaaatctttattgtttgtttcttaactcactactgacatatttatatgttcattgtgcatttttttttattgttttattttcttcttttgaattgtagatttgaagagcttagatatggaaaaggggaatcaagagtcaacatctcctagaggagttttagatgcttttgaccctacaactaacaaatattctggtgaaaacagcaaactaatgaagttttcattatcaagggggcttttttattggaataatcttttcaagttatggaatagaaggtctattaaacgtttagcttcctttcctgctgttagtttaccaaaaacaccaaaaagaaagagcagaagtgcaagagagaatccattgttttgtaccttatatgacttcaagacttcattggtcaacttcaccatttctgaactacaagctgcaaccaacaactttaatgctggtaaaacaatgcttctgaagaaaaaagttattttattgttgaaatcatttattcattgttgtgtttgttttgttgacattggattctaatttctttagagaacataattggaaagggtggctatgctgaagtttacaagggtagcttgaaaagtggacaactaatagcagtaaagcggctgactaagggaacaatagatgagaaaacatcaggttttctatccgaacttggcatcatagctcatgtaaaccatcccaacactgctaagttggttggtagttgtgttgaagaaggaatgcaccttatttttcaattatctccacttgggagtttggggtcctacctccatggttggtctataaaactcctattcttgtttttcaaa

SEQ ID NO: 2583 - DNA, 924 bp, Cannabis sativa
ggagtattcttaatagacttctgtccatacttcctccatttatatccatcatcagtcattccgttattagtagcagaactcttaatcttcaaagtatacttattatcaatactcttactactcatcatcaatcctctctccaataatgaaatcctgcaaattaaattaacaatatttatttaaccaaacacacatattatttatgtatatatatagaagaaaattaatagtataataataataataaaggtatacacctgctggccggggcaggtgaagaagaagaaataagtgtttgttggggttgggataattttggagaggtgacagacaaagcattctcaatatcttcaagtgttgggtctgagtataccttggccgagttgatcttcattacaatttcatcactactgctactactaatagtatcatcattatctaataatgataataattcatgttgattataatgtgattcatcttcttgtaccacaaaaaatggcgacacgtcatccaaaagctctctcactagctcatcttcatccgacgatattgatgatgaccaacctctactactaccaattacttctaataattccatattatatatatataagaggtgtgtattaatgaagaagagaaagagagaagagggtgttgattatatgatgagaaagatgattagggtttcgagtgatgatatttataaatatgtatatgaaataaaaggatatggtagaagatagagtggagtagatatatggaagaagctagttagggatgagtgtcatgtatacgtgtttggcctattgacttttgtttaagtattaataagagaagagatcgtgtactgtacatataatggtttatgtttgtatgtatttgcgtttgacttttgctatatctatatgtattgacgattgt

SEQ ID NO: 2584 - DNA, 2712 bp, Cannabis sativa
attaccagtcatatatttcataggaaattatcaaagcttaacagtagtagatcaatgaggagaaatgccatcagcttaaaaatatagatgaagagaaaaagaaccaacaaaagtcaaagatcaaaaaaagaatattccatcattgaatttttcattttctgaagactatatgtacaaatgtatatttaatagtatcaaaagagaaataatagtagtagtgcagtgaacagcatattaatttcaataaaatggaataataaattctcaagacaacatatacacttaattcactgtgatatattgatgaggtcgaaccaagtgaagctaattatataaattccatagaaatatttcttgaatcacgatacacctaacaaagaacaaaagccaagaagtataaaactagcctgatgagtttcaagttagagaagataaaaatgttatcttagcagtagacttcctatgattatcatcctgtccatccaagtacttatgaatttaaatcagctaaggttggaaggcaggtattagcacagttgccatgccactaagtgggttcaaaagagagatttctctaagttaggcttatgccatattcaacaacagttgcaagacaaaagattttacttgtataattacaaaagcaaagttatgacgttatgttcaagatttaaatgacagaagcgttaaccttttgggaaaagacaggtgtatctaaagtttaatgctaaaaaatacttagcacatactttcatcaacgacatgtcaatgcaaacacctccattgggagacaaggtgtgtccttcaattgatgtggctccaccatatggtacaataggaacctgctcatgaattaccacaaatcatttaagtatctgatgaaattatttatcaaactccagcaaagtagagaaagcaaataaagtctggatacatagacacaaacaaagcactatcttataaagcaaggagtaagaaccagacatttgaaagaattctttgtatatggaagaaaagaaaacttaaaagaatgcagcaaactaatagaaagtggagaagaccaaaccttatgcttatcacatagcatgactatcttggacacttcctcttcacaactgcaaaattacagcaaatttggtagagaaaataagtgaagtatagaaaaacatgacaagaccaaagaaaggctaaatggacacatgcaatagatcacaaatttaatatgaaactcaattagcaatactaaagatattttatgaaacaaaggaaccactcaattagctttaagacgctaggtacactaataaactgcagataaacaacggtcacctgggaaaaacaacaacatcggggatgttaacggctttgtggaagctatgttgtggtttaccatgggtatacctctcatcatagtccatggtcatgttatcctgcaaaatagattatattatacatctgcaaaaatgggaaatggtataagagataccatgagtttcaaggtaagatataaacacacaaaagattcatagaaacagtatactcttacttatcttttcctatcttaaaacaattaaatcaaacatctattaataaattgaataagagtaacaatgatacttggcatatagccttcaattcagcaataagctcttctggaacttccttgtgcgagcccttcaccacatagtcggtggagctacctttgccccccaaagtgacacctctgagattaaaaaagtaactacaactcatgatgaaccaaatatttcataaaccgtgagctgataaaataagtctttttattcacggtatatctataaaattaatttatttattacttaattgaccatagaccaatttccctttttacttaggagtattgaacaatcatcccataattctgagtttcatgttacttataccaagaaacatgtcaaatatggaattggaaaaccctatttcgattgaatgggataacattttttcattctatcaaattcacataccacttaattatactaaggcaaattgaaacacaaccaaataaaagaataataaatataactatgttgatcaactaagagtaagaacaaagtatttaaaaaaagtatgcaaaacaatacaaacatatgaataatcaatcattaaaacaaatcaaaaataagggaacacgactcactcaccgagaatcacaaaaggaaggattcgaatcagatgtgagggaaagtgagccagctgagaatgcaagcgccaagggaagcagagagctggaccaccacaatgagaatggactagaattcctgtaccgaaaatggaaatcattgatggtgggcggtggtggtacgttgagtgagctcctggtaaaggtgtgggaggcagagcttcggagattgagtttgagagagttgtataagcatttggagtaagagcgaagtgaagaaaaccatgaggacgatgacgacgccattgatgaccacgaaagccttaccttaattgaatatgagcttccatctttaatggtttaaaagtctcaaaaaatgtttcacgtaatctaaaatcatttggtaccttttatttacaaattttagacacgtggtacctttttcttacacgaaggaaaagtggagggggaggaaagggtatgagatataggagtgaaaagagagtcaattttgacttgtttagcataaaacaaaggggaaatttgatttt

SEQ ID NO: 2585 - DNA, 2258 bp, Cannabis sativa
aatgctaatgcaatcttcttgatcatatgataaatcattttccctctatcatagacaggcaacgatatgcatggatttaatactagctagctaaagccaggaaatctattattgtaaaaactaaaaaagtgccatttgtttcaagaataagctgatagttacaaacattaccatagaaagtcctccaccttcatgtccagttgcaagcaacacatttgacagccctgggacaggtccaattactggttttccatcaggcactgagacattcagggattactttgttagtttcacataaccgtaagctaaatcagctagatctggctctctcaataggttaaacaaaaatggaactcactgtatggtcgtagtcctactctaacttcacgtctttcgataaaatcagagagggtttgttctcttaatttgggaaagaaatccatagctcgctcccatatgagatttatcacagattcttctgtttcagtgttgaaacctgcaaactgacggctactccctgaaggcaaacaaccaatttgaggaacagggcacttggtgagattgaaggctgaacagccacaatcaatgcattgaaatacagaaaaagatggcattacaggacagagaacacatactaaatctgtttaaaaaaattatcttcaaatactggaattcataaactgagagcagaagtgaagaaaagtttaccgaggactacattccccattgaatcaatggtggcagtcattgaaattgacaagttttgatcatgatcagatatgactgaagttgaggtatcaggaagttgagttgcagttttatgatcaagatatccagcctccatcataccatgattcagttgaagaaaattgaaattcttaagcactagcagatgaccctgtgatataaattaattatagttagctccagctaattttcaggatacacaatgtcatctagattatgtatgtgtgtctcatgttcaaacaaaaggtatggctccccaacttacaatagaccaattctttatacataaagactctaatccttgttcctactatttagtcatcaaattaacaaccctttgaaaagattttatctgtacctggtacaaattaattctgtgtatccctaattctgcagaacagaaatgtatggaaaaacttatttgtataagagattcagccacctagttagcacgggaaagaaaatcaaacctttcgaggttttactgggacatccaatacaattcctgaatctctaaacaggtcctgcaccaaagatccactccaacagccagccgcaactataattgccttgttacagaacaatgtattctttgcagtcttaacacctatgaccttgccactgctacctgttctgggtacagaataacagttatccaagcaattagcaggcccaccaaattgtaaattaaatttgtatctcttgtcggcccttacaactttaagtatagggagaataggataataataaaccttattagagttgtaactggatcataaaagaactctgcatatctgccttttgatataaaatgtctgttagcctgtatatggatcataactatagtgagaagacaccagatcagagggtagataacataaaacacagagccacaatatgataattcatatcacattacttcataagaaagttaaagaaacctttagaataaggtcaactgcacgatgagcatccagttgacagtctccgggcagaaaagcagccccaccatcattttcaatcaggagagaaggttcttttgaaagcaaatcagtagcagacagaaactccgatcttaccccagcatcttgtagcgacttcacctgtttttttaaaacatctacctccttaggggttctaccaattagcaaacttcctgtacatgaaatcataaataaacaaccacacaagatttcaccataattatcatgcttccttgtctatagtacatttgcaaaagctatccatgtatcaacaacattgccaccaccaaccctcttttcaatactaacagaagctagatcacattactaggtgaggctatggagaaatctaatccatttaaccctatctatggttattgagcttcaaaaccttaaaaatatcacaaaatgaagactagaagctatgaaaagcaactcaattgtaagctatacatattacacattcataaacagataagatttttattgagtatacctgtgtttttccaacccatatgctcttgagga

SEQ ID NO: 2586 - DNA, 2026 bp, Cannabis sativa
aatcgaaatatagagagagaaagaagcatcgggtttacgactactgactgagcaccattttgtaacagaatttttgcttggtaatcccgatgtcaactccgggaggttcaccggcgccgtcttcgccgccggctactaactcgacttcgccaccgccttcgactccaagcgcaccgccgccggctactccaacgactcccgcctcacctccaccagctactccgtcacctccggctgctacatctccgccaccttctacaactcccactccgccggcagctaccccgcctactccctctccaccggcacctactacaccggttccctcgcctccgtctactacaacgccgcctccggattcatcggtttctccgccaccaccatcgacaccatccacaactccatcgaccccatctacgccgtcgattactcctccgcctccgtctcgtaccaacactccttcgacgccttctaatcctagccggagcccgcctcctccgtctaggtcttcttcagcaccgggaccttcaagttcgccgtcgttgtcgactggggttgtggttgggatagccgtaggtgcagtggcgatcttagttgtgctgagcattctatgcgtttgttgcactaagaagaagagaaggagacgcgaccaagaaagttactatgttcctccaccaccttctgggcctaaaggtaatgttttttcttcttatatttacgcaagtgatttttttttcaaaaaataaatatatattatttaagttttatcttcatcaaattttctataatttttttaaaatattaggtcatgcaatctgactttcgaatttttcgaatctcagaaaaatttgatgaagaatttgaattttttttggttgggaaacatttttttagatctggtcattgacaagcattcttatgaatttgaagtttttaacccgtttctgaaatggtgcttatattgcctgaatttaaattagccgttaaagttgttcaagactaatgctgattcagggatattattatatttttctgctgtttatttttaagagtcatcaattttgcttaaagttttactcatggaaaatcattatttttctcctttttttaagaaaatgttcccgggaatcatgggaccatcgattgtgggtgtctgatttcatgggtttacgaaacattactagtgtggatacagttttcaagctctgtttctaggaagaagaaaaagaatgtgttttacttttattaactttttgagtcttaaaggtgcaacttcaattccatgttctaataagtcattctctctgctttttgctatattctcagttaacaattatggaggacccccgcaacattggcagcaaaatcctccgccttccgatcatgtctatatgcaaaaaccatctcctccaccggcagctgcatcgcggctttctcagcctccaggatatagtccaaaaccacagcctccgcctccacttttttcaaacagcagtggaggctctgcctctaattattcaggatctgacaatcctcatccaccgccacctccaccaggctattctttaggcttttcaaagagcacatttacatacgaggagttagcattggcaacagatggcttctcagatgccaatctccttgggcaaggtggttttggatatgtccacaagggagtccttccaaacgggaaggaagtagcagtgaagcagctcaaagctggaagcggtcaaggggagcgtgaatttcaagcggaagttgatattattagccgagttcatcacaagcaccttgtttcactcgttggttactgcatgtttggggcccagagaatgcttgtttacgaatttgttccaaacaacactatggaattccacttacatggtacattttttttctgctttcaattagtttctaataaaatgtatctgaaatattataaaaacatttgtatgttgaattgctatttagattttgcactaagatgattcaccatttgctaatactgtaaggtttggtggattat

SEQ ID NO: 2587 - DNA, 1644 bp, Cannabis sativa
aaataaaattcttacacatattacgtatatgttgttaaagtttgctccaatgtaccgtgctacatggcatgacatatatataatattgtaattataatttataattttagtatatatattataaattaataataaaaataaaataaattaaaaaagaatacataattttggtattgttgtgattagaatgaaaaagaactttgttatgaggtatatgtattagagtgtctagcacctctatgacatgacgttttataattagttagcagttctttataatttttgttaaattaaaattagtgagattcaatattaaattatactaataaaaacactttataaggatactaagcaccacaactaccttttaacatttctcatgaaaaaaattatagtgttatatatttgatgttagttcaacagaatatgatacactcaacatatactaaatttacaaaaattatcaaaagatataatatttcaaaaacacattaaaaagagcttagtttataaccatacttttattctgttaagtgataatgatgctacaaaagcaatatttggacttgttttttttttttaataaaagaaaagtgggtgaggtttggtgagatgtgttagtttacataagaaggcatgcatattattttgggtttgaaaggctcctcttccaatatttgggcatgaatttttctgggatatacataagcatgaaatatatatatataagtcatgatcaaatgaaggcatggtttttgtttgtaatatatataataaatcatcactttttcatgtgtagctactatactgttatgtctttaagcaagctcttcataaccttgccgaccaattctcatcacaaatatatataaatatatatatatatatataaaagtatatatatatatatatggtggaaaacttaatgatgatggtaactagtaactatatagtaattaattaattaaaagtaatagtgtatttctgataacaaagtttatttacggcataaatacttaaattcaattacaggtacatatttaagtttaatggccacatgacaatacttaatttatttatatcgatcaataattaaacttaaatatatacccaaaaaattacttttatttatgatatatgtgtgttttaactttcaactaagtttttaggaggggtcgtatatatgacattttgtcttatattgtctaatttaattattattacctaattcaatattctgttattgatatgatgttaacatgattttgttggatcatgcatgcatgttgaaccttacttgtttcatattcatatatagtgtatatgtagtcagtagtagtgggatatatattcacgtgtatcttctttttgttttttttcttattcttttttcttttagaacctaatttaatttcaattggattatattagtgcttaactccaaaatcatagaaatttgaatcttttaattgctatattgagctactatatagctcatctcaaacaaagtggttatacaatattacttgtatattatgttgaggatgactctttacaaactaggaggttaatttagatggttaaatactttgaatttttaaaaatattacttattaagttaatttaaatggttagtaataaatg

SEQ ID NO: 2588 - DNA, 3067 bp, Cannabis sativa
caaaatcaaagcccaataacttgactaaccacttttggtgttccgcgacaccaagtgttgttccaaaagaaatttcaagctttgttgatcagttcgcaccaaaaacttccgacccaacaagtatggccgccatttaagaatagcgagcactatagccatgagctccttctcataaatagacttcaattgagcgcggggtttcagcacctggctgaagtaagcgagtggcctgccctcttgcattagaacagccccaagaccatagccagaagcatctgcttcaatcacgaaaggcttagaaaaatccggaagagccaatatcgggacagccaccaaggcttgtttaagagcttcaaaggcggtggtagcttcagcattccaacaaaacttgtctttcttaagttgctcggtgaggggacgagcaatggacccgtacccttgcacaaacttcctgtaataccctgtgagacccaaaaaaccccgaagctccttcaaggtcgtcggtaaaggccaatcttgcattgcttgaaccttgctagagtcaacactcactccttcgcctgaaataatgtgacccaagtactccaagcgccgttgagcaaagcaacacttcttccggttggcatagaactggtgtttttccaaggttgccaagacctcttgcaaatgagagatatgggcttccatagttgggttgtaaaccactatgtcatcgaagaaaacaagcacgaaacggcggagataaggcttaaagatctcattcatgttagcttggaaggttgctggtgcattggtgagtccgaatggcataaccacaaactcataatgtccttcatgagtccgaaaggctgtctttggaacatcctcgggccgcacccgaatttggtggtatcccgacttcaagtcaagcttcgtaaacaccttggccccaaacaactcatcaaggagttcatcaatcactggaataggaaacttatcagcgatggtttccttattgagagcccgataatccacacaaatacgccaacttccgtctttcttctttaccaatagcaccggacttgagaatggactcacacttggttggcaaattcccaccttcaacatctcactcaccaatctttcaatctcatctttttgaatatggggataccggtatggccgaatactaatcggtgttgttccagggtgaaggcaaatagcatgatcacgaggtcgtggcggcggcggcagtgtgtttggcatgtcaaaaaccccagaatattgctgaagcaattcagccacctgttctggcattaaatcatcaccttccgtggcacttgtatgactcaactctacccacaagccttcctgcaccacttgtatcgttttcaccatggttttgagagagacccgagtcttatggagggttgggtctcctcgcaactccactgatcttccccccactttgaatcgcatcaccccttccttccaatggtgatatgtttcccccaaagtctccaaccactgaacccctagaatcacatctgtacttcccaaagacagaggaaggaaatcttccacaatatctatggattgaagagtaatgggtaccctaacacaaattcctgtcccctttactgcctgtccagttcccatttgcactccatacgagtcagtaggtgaaatagagatgttatgtttggccaccaatgaagaagctatgaagttatgagtagccccactatcaattagaacaaccaccttttgaccataaacactccccattaatttcatagttttaggggaagttaaacctaccactgagttcaaagagacctccaccacctgcgcttctgtctcagcccccttagcttcatccatggctgccatgtcttccaattcttcaaaaccatcttggaccaagatgatttgtagttccggagccttacactggtgaccacgagcccaaggaccatcacacttgtagcataccccctggctttcttttcctgaacctccgactccgtcaaacggcgatacccctttggtggtgcgtctctggccactgtagtcgcagggaagcggctgtaatttcctgggctgtaattcccttgcccattttgacttggtcctttagaagaagaccaatttcgtggcccactggaattaatgttactgggcccacttgaattaacattagttaccttgtttgggcccccattcctattcggcccaactcaaaaagcccgtaccacctttgggttggcttcaacaacctccgccaactccatcgtcttctccaagccaatgggttccagcaaacgcagagtcccctgtatttcctcgttcagtcctttcatgaaggccgactccaacaatggctctgcgactgtcccgatcgtcgccgtcaaggcttcgaactgctggcggtactcttgtaccgtggttgtttgatgcaaggccagaaaccggtcatacgtgcttccctcgtgcgctggcatgaatcgtcggagaaggagattcttcaattccccccagcttctgatttcccggcgaccgttctcccatcggaaccaacgaagtgccggtccttctaagcaaagaaccgccgcctccaattgttcctcgattgtaaatcgttgcaagccaaaatacctctccgcccgataggtccagtcatcggggtcagatcccgtgaacactggcaattcaatcttcctcggatggaactcagcccgtcgcatcccaacctcctctctgttttgatttcccgacccgctcgacccaatcggagatggagaattcttccctactgggcttcgcggtccatcagttagctcggttgcaatccgagcttggccccgtaagatcaaatcaagcttctccctaattaccgcgattccttggtcatgggcagtgatcttctccttcattgaattccattcctctgaagctggtgcttgcgattcctcatcccctgctaccgattgaacctgctccatcactttctttgagcttcgcgtgttcgtcattcaccaagattacccgctctgataccagttgatgtaccctgctgctatgaatt

SEQ ID NO: 2589 - DNA, 1722 bp, Cannabis sativa
tctcaacagcccctctcaaacgaaggggggattgtttgactccaagtttgctcacgagaaattgaaaacgggagtgtgacagaccctttgtaaggcagtctgcgatttgatcatgggatggtatgtaattcacttctaattgcttctggatgactttgtctctcacataatgaacgtctatctcaatgtgcttggttcgggcatgaaaaactggatttgatgccaaagctcctgcactaacattgtcacaccaagctactgatgtcataaacagaggaaaattgagttctttgagtagtgattcaatccaggatatttcagcagctaaatgagcgagtgcgcgatattcagattctgtactcgacctcgacacaaccgcttgcttctttgaggaccaagacacaagagtttcaccaagaaagacgcaatcccctgccactgatcttctatcatcagggcagcatgcccaatcggcatccgagaagcctgtgatgttaagtctactgctgcaactgatgtgaagtccaacattcatggttcctttgaggtacctcaaaattctttttgcattgctccagtgtactgtggtgggagattgcaaaaattggcttagcttgttgaccgcatatgctatatccggccttgtatgacagagatactgtaaagccccaatcaaactcctgtatttggtttggtcatgaagtggttctccatctgttgctgatattggtttccctgctgctataggagttgggcaaggcttcaaattactcatttcaaatctatttagcagatcttctatgtacctggtctgagttagataaagaccagtttggtctctaaaaacctctattccaagaaagaaatgtaatggccccatatccttgagagagaatttcttgtttaaccgagtgatgaactcatttagagtgcttgagttgttgcccgtaataatgatatcatcaacatagattaacacaagaacaatttctgtagctgttttgaaaaagaacagtgaggaatcggctcttgagtgactgaaaccccaatttagcagagtgtttttgagctgatcaaaccatgctcttggagcttgtttgagtccatacaaggacttgtttagcttgcaaacaaaatgctctttccctttctcctcaaacccttgtggttgagtcatgtaaacctcttcttcaagaattccatttaagaacgcattattgatgtcaagttgttttatttcccatcctctcgaagcagctatggtgagtatcactctaatcgttgaagctttaataaccggactgaaagtttctttgtaatctacccctggcctttgatgaaatcccttggccacaagacgggctttgtacctttggtgtgaaccatccgaattgaacttgtgcctatacacccacttgtttccaatcaagttgtaaagctctgaaggtggtaccagcacccaagttctcttagcttttaaggctgcaatttcggtgtccatagctttgttccagttctcatcttgcaaggcttcttcaatgtttctaggctcagaaaagtatgattggaatcgtgcttgactgagaaacgtttttggcttaaatatacctgctcttcccctggtgatcatgctatgagtggatgcgaaaggagctggaggaggttcagtgctttgagtaggactgacaggaatgggatgatcaacaagggtatccaagttat

SEQ ID NO: 2590 - DNA, 1040 bp, Cannabis sativa
aaaaaaaaaagtagcaacataaaatttgtaatttttaacttggaaagttttaattatttttttattaggatttagtacctacctaaatatcagacttaattttgaaagaaataattaaacccccgatccaattgtgttgatatggattcacatagtaagcaaccattagaaaagactgaagaaagatgcacaaataatgaacccaaaattacaagaaatgggtaaggaacacccctggacaattaacatgaacaattaataaaacgtcaccaaacaaggaaaataaataatcactagaatttcttactcttttttcccaatcctaaactaaatttgtttgtatggtaaacccaacagcaactactcacattaccaaaagaaacagttgccagtgctactgccaggaattgtaaacaagaacaaaaccatatcaacaacagtcaatcgtagagaaacatcaatcaactacatatggtgaaaacgaaaaatgcaatcagtagagttaaaggcagcctcaagaattcccttgaaatcgaaatggccgaattatgtttctgttccctgaaaaacatcaaacaagaatggagttaaaacttgctaccaattatgatcattaaggcagataagaagtacgaaaattgacatacttttgcaaataggctaggtcaccacagaataaaacattatcaggctgagcaaactctgtttcgccattttcatccggattgatgattctcaagtatgtttcttgcccaagataccatctgtcaaggttttcagatcgtatgttccatactccaacattgtcaagagatatcagaactgctgtccatgcctccgggtataccttcacagtagtacaaacagcataagagaaatgtttgtatagtctgtaatgtatttatatatatgaacatgtgtacactaacctgaatagtggcacgagagatggcatcccacttgttatatctacctctactgtcctctgtccaattaccataatccatcctgaaatcaaataaataaaagtttatcaagtt

SEQ ID NO: 2591 - DNA, 1154 bp, Cannabis sativa
aaaaaagagcttaaacaactaaaaattactaggaagcaactgttcataataggattgcatataggtcagtccactcacaattttgtcaaaaagctctcctccagtaacaaattccaaaacaataaaaatcttagttttgcttcccatcacctgaaaaagaaaaaagataactctcacatcaaaataagcaggcagcatttcatactaagcttcatcaataccattttccttcttatgtgtctccaatgcaggttacaaagaaacagtaaagaactgaaaagacaaacctcatataaccgaacaacatttggatgctttactaacttcattgttgccacttctcgtttgatctgagaacattatacatgttagataaaagaaaaaaagacacaattgtaataacagatctaaaacaaaaacaaagtgtgaatagaataacactttgagcattccataacaattgtaagcaatcagttgaaaaagacaagaatggattgttatgaagggaggtctaaaagaagagacctgttcagccattttgtgcttgagaactttctccttatcaataatcttaatagccacaggctctcctgtctcagaatttcttgcaaacttgacttttgcaaacgttccctctccaattgttctccccaattcatatttacccactttacgcttaacttttgtgtgttgattcattcttggaagacctttgcttgaaatttgaatcttctgataacttttgcagttttggtggagtttctcagagacaacctgagggaaaaaaaatacataaacaagtcatataagtgttgaagaaccacattttcaacctaagaaaatcaagaaaagaagacaaaaaaataaaggaaccaactttttgagttgaggaaatttaagaaagtaggattttgctattggtttgaactaagcaagtgggtagtagtagcagtagctcattgagctaaatcaattatagaaatatttaaagcttttgcataaagaaattttcctcattgagacttggcttacgtagtaagtgatcaaaatggcagatcaagtggctcctacttgcattagtttataggggttatgctaatatacaaacaccacgtgatgcatatcagaggtacaatggactcggtcagacatta

SEQ ID NO: 2592 - DNA, 2235 bp, Cannabis sativa
  modified_base (793)..(795): a, c, t, g, unknown or other
tatatatatatatatactaagtatatgtatgtatatattcaagtgaagaaagaaagaaatattattaaatgatgataaaggggagctcccttcagtccaatgggtgagctaagaaagtggaaggagttgctcccacgccatgcacttggccaaaacccttaacatttaatttcaccattacataatatacatacataaatacatataattggtactaattagaatattattggaaacattaaggatagccaaaatgcatgaaatggcagctctacacacttctcagccctctttattggactaaagagagctccttctacccttttcccttttccatataatcttacatatatatatatatatattatattatatatatttgtatgtatgtatgatcaaagttatatgtagaagaaagtagtaggaaggtaggtagaggatatatacatggtccttccttcctcaacacaagttcatttgccttcttatatatactaccattttttgtctcttagttaggtcattacataaatatattataatattaaaataccttctattgccaatgaattttgtcttatttttttctttcaaaaaataaatgaaaataaagcagaatacatcttattatgtactgtatttagaaaataaataaacccaaaatatatataatctaaaacacaataaaaataataataaaaaataggctaactaagatttttacccctgaactttaacatgtatgaaatcatgtcccctgagcttttaataaaaattctccctgaactattgnnnttgttgaatttaagaacttttgtcaaattttagtaaggacaatctaacacagatgaaagttcaggaggcttgatttagtacatgtcaaagttcaaggggtgtgatatggtagatatctaagtctgataaccacaaaattagtaaaattgaatgaaattgaacaaaagtctttaaattcaacaacctcaatagttcacgaaggatttttaatggtcttaaaagttcagggagcatgatttggtacatgtcaaaatttagaatacaaaaattctaattagcctagaaaataattaggtatgcgtacctgattgattcatagcaattacctagatttgatagtgtcatactatcaactaagttttcctccctagatctctaaatcagaagcagatttattttatctgattatcaaaaagtatacaattgtgatgagacaatatatatttatagagttaggagaacttaactacataaccctagttggattgagtctgctcatcaaaaacttttgttaactagaaaagctcacacttctgcttaaactaaatgttacacgcacaggtgttaagcccattaattattgataactaatgatataaactaacataacaaagaactatccaatcaactcgtattttattaaaatcaataaaaattattgtaagcctaaataaaaagtgtaatactatatgtttgttttaatgtaattttatcaaagattaatgtatataaactttgatgtatttagcttctaattattattagtatattagtattagtattatcattaggttaattatgattttcccatcaaattttgatacaaattgaatcgcgcttttggatttttcatactattaattttttttaaaactattaaaattgttagatttaaaaaatttcatccaattcttttcaattttactaatacacgtctaacatggtgattttcatgtacttaatcgtgttgattaagttttgacatgtactaaatcattctttttgaatttccatttacatcatatgcccattagtaaaattaaatggaaatctttaaatttaataattttaatagttaaaagaaaaattttaatgttttaaacaaataaataagttatataatacattaattatgaggtggtagatatcaaatagttttattgttttgtacacattgttaaacttttcaatctcaattattaatcttttacattcctaatttttatattatcttcttaagatccttttcaatgaaaagagcaatcacatgcatcattcacaaatataatatttacttaaatatatgtagatatatattctagtacatatagtttacatcatcatgatgtatcacattttgtgttttagtaatcttatctcacctttttctttttctctttttggtgttctataatattctgtatgctcttgtgtttaaac

SEQ ID NO: 2593 - DNA, 2546 bp, Cannabis sativa
aatttgattgtagattctagttattggtctgaacatctacaatattgtatgcatgtatggtgcagagggaaagaaagtgtctagatgttgtgtttgtatggaacctttaaaaggaaaaatattttcatcaaatatgacatctctagaatgaaatatagtattgctagcaatgtcaagaagagtgtatactttcatgccattgggatagtcaatggaaatgcaagcataaaatcttggtgaaaagttgtgcattttgcttaataaggaagaagcataaacaagagaaccaaaggttcttaaatggttaaatcaaggaggtttgttgttcaacaattcaaaaagggtttaatattgcaatataggtgtgaggtttctattgataaggtatacttcagtgttaatcaaatatggccagtatacgaaggctatagaagattggaaaatcaaggctcgggccacattcaggatgtgttggttttttctcttaactactaagttttgttgaggtttataacacacggattgtagattttgatacctttttgagtatgaaaggaagttatattaagttcttttgcattcttacacctaacaaccttaatattgacgtaaaattgactatgcataaggctatagaattgaggaataaagtgttgcacatcatatttggattttaacatgtaaacccaagtgaatctattgtgattatcaacaatagtaagataatatctaaaaccttcaatgctactaatgtgaaaagggccaatatgtcaagataattaactcaaaatattattcgacaatattatgttgaaaactaaaaggtaatctcttttatttagtcaaatgacttacagaagatggagatgcattagtagaaatattgaaatgaaattgtttatggatgaattttgttgtggacatgaaggaatgtccaagtctagagtgccaaaagaaagtagtattacataatttattacaattcaaattggtatcattaaagctagaagatttggtagaaggcaacagaaaataaagatggccaatcatcttagctattccaatcttcttgctctacgaaccctaaagaatgcaataattgtgagtaaaaaaaaattgaggtgaaaatcaaaaacatatagcacattctataagaagagaccattgaagaatctaatgtttccagacttgttaaccttgatcttggtaccatttggaagagatacaaaattagcaatgacaatatcatgtaagttagaaaagactaaaatgtcacaacatatgtggtgagtagcaccattatcaacaatccataaacgatgaggaaattgaagtttacaagtgatattggatgcaaaaggttgagatacatctgatgtgaaaggtgttggttgtaattttttgctgagcaatgagatgagagtttggatgtcttcgtgtttgtttagattagacaaaaactgatcaacagaggtagaaatattatgagcagaaggttgattgtctaatttattttatgtccacaactaagaggaaaactaatcaagaaataacacttgtctttcaagtgacatgatttgtgacaataagaacagtaggacctcattttcttattgcgtcctaagttggttgtagatattttgagcaagagcaacagaggattgaaaagtgttaagatcttggatagaagcaataagagaaatttgaggattcttgagctttctctatctttcttcatgaataaacatggaaaaaactttggacagagaaagaaaaggttctattaatagaatttgagcacaaacaagaaagaaagattcattcaggtctatgaggaattgtaaaacttgttcttaatttagaaaagccaagttattagctgaagcagcacatgtacatgagattctaggcctgagttcttgaatctcatcccacatacacttgagtttagtaaagtatgcacttacaaaatcttctccttggcgtaaggtgaccagagtttctcaaagatccaatgtccattaccttgattaaaatgcaagttgagctcagtccacatttcagtagatgtgtcaagaaacatgatgctactcttgatctcggatgtcacatcgtgtagaatctaagacatgaccatttgattgcaacaaagccagtgattgtgtagaggattaaccactggggttggggaagagctcctttaaggaagacaatcttgttccaagcaccaacagagagttcaaagtcacaacgccgtggttggaagttgcgatcaaataatggtggagtaaccaagatcaagccaggatggtcacttaagctgagaaaatatagactggaactatcttcgtgtgtaggacgaggaggaggatgaagatgatggtgttgatgttcttcaaaaatattggaaattggaggaatgatcgggatatctattgaatgagcatctggaatggaggaggaagtatgcggcagaaaagtttgaccggagttcgactagagttcctagaattagtagctcatgttctgaccatggtgaaacaatg

SEQ ID NO: 2594 - DNA, 2134 bp, Cannabis sativa
tggattgttaaaactattctatatcagaaattaacagctggggaaataaagagagctgcttcagatgacaatcactctatgtgttaacaccaactacagtggttttataaaagcactcaagaaccatctcttttgttgtctaaataaatatttcagtggttcaagaagatcaatcacagatgcaccagataccttcgaaaacactggttgcaaaatgccatgaacttgccgtcattgtacttcaacatgaataagttcctacacaatcagatctctagaatgaatccactagtcatttggaaatcaaacaattaagagttctaaaaaaagcaacagttggtcaatggtgtcaaattttaccatacaatcaatatcaagacatctaataaactaatcaaaatttcttagggtagacacagaagaatgggaatgcaattaaaactatgtatcaaatattattgtagtcacgttacacccgaaaaagaaaaaaaaagtcaatcaccgaatcataaccagtccaagttgtaattgagggtattcaaataaaaaattactcatatatgaacaaggaaatcaaactaactcttcctgaaatcccagaccaacctcaacaagatatgtcacattgtcatggctaatagctatgcatatgatgaggagaaaaagaaaagattatttaacaaagtctttacggttccaaaagtctcgttcacaaatcagcagaaaagttactgaaaatggaagataaataaatttaatacgcacctgtgcagatagagcaggtttttctaggtttaagatttttaagggggaacatgagcttgactttgactttcttgtgtttgagcagcttgctgtttagagagaaccaatgaagaagaatgaagcttgtggacagcagcttgctgctgtctgtcctttaactgttcctcaaacaaaccatattccttgggcttgtcccactgcagattaattttcaagtccttatcctcataaattacagatacgagtctaagaaaaataaacaaggatgagcaaaagagcataccaagctttcacgagtgatacaattataataatacttatgcccatcagggcaagtatgctcactccaatcacattctggaagttcgggtgtctgaggatttgcaagcactgcagctctgggaatattgtaagcaacttcctgggaactgcttgctgttggtagaggctgcattaaacatttcgttaaaataacatataaaaagttctgatttatttgctttttaaaatgaatgcaaaaggaataaatatgacattctactgaataaaccccttcagatgctgcagcactcttctggccacactcaaatgaacaccaaaatggggcatatagatagaaattactataaattaaaaacctcacataacatgcactactaaaaaaaactgtaaattaactagccaagattattgttgatttggaataccgattgtccgctagcctgagacagcttttgctgctctagtgtttgtttcgaaggttgaatcagatgcaactgccttggaaaatcatgaacttcaccttgaaattgttgagtggatgtttttatattttgcatctgcgacaactgtagaggttcctggtttgccaccaaagaaactgcttgtggttgtgtcgttaacgagaaaagttgtgcaagataaggtgcattaggccggttatgccccaacatggattcacccaggttggttgttgccctggtacatatatccacaaaaataaaatttaaatgcattcaacaaggaaaattttataaaaggaagtaacatgaaaaatgttacctaacaactggttcatgagaatgggggccaaagggcattccactaaacatcttattgttcctggagggaaatttaaatggaacacttaacaccgagtaaaaagataagttaagaaaacagaggaaagggtatgaagaattcaagttcgcaaattagttgaacagaacaagaccttccttctccattcctaactttcttaggttctgcaaaacgtacggctaatggcctatcacaacccttcagccacaccaaggggaaaacaaacagaatgaatagaatagatgactttgcaaaaaaaaaaaaaaaa

SEQ ID NO: 2595 - DNA, 1311 bp, Cannabis sativa
agagagagaaatataaataacccaaaaagcaaattaacataagttgtccaaattatccataatacaaagagaaaattacgtcgacggactctcccacgaagcaagtagacatttttttcgtctttgtggagtaattaagacgacaattagcccccaaatacagacacacaaatctgtaaataaagggcaaagacgacacaagcagcaataacgacaacacaacgacacaaacattattaaaataaaaactaaagattaaaagacactgacagcagaaactatataaaacgacgtcattttgaaacgaaaaagtacgacttgtgtttctggacaaatatctaaatatttagagaagccacagacacacagtactacttattattcaatttatggatgcatctcaatttgttgaagaaaggttttccaggcagatcatctccatcagatccatctccttctttacagcctcaccaggtcctcgcataatgctctccatctcattcctcatctgtaaatccacaccaccattgttaatctcgttagccacatgaccagacccatacgacatttcctcaagcaaagacttaaaaccataagtctcagagtaaagattgttgtcgtttgtaccattctcctccatatgatcaagatcaacattgtagaagttatcagtccagtcttcatcatcgtcttcatcttcatcattatcataatcattctggtcacgatgctccaacagaacaacagcagcattggattcataaccatagtcctgactattaagatcaggataataaaactgattacctgcaccaggttgttggtggacttggtgatcatcatcgacattgttgtcgtttgaggaattggtggtggaattgttggcgtttattattgggtggaggctccttatgtagtcctggagaagagtactggctttgtggtttgggtctctgttcttcttgttcttggaggtttgcctcctcttggtggcgttccagtggttcttgatggtgttctcagaccttccatccagcctttttgcaatctcggcccatcgatttcccagctctttgtgggcctcaatcagaattatgtcctcatcttcactccatgtatctttctgtaataacattatgaattttattatatttatatatatataatgacgagagaaaataataaataatattttgggtttagaaaattaatttatgtgtgtatgtatatgtaatttacgttacatgcatgtttcatcgtcatattcgaagtctatgctagcttacgtaacaagaatatatgtatatatat

SEQ ID NO: 2596 - DNA, 1457 bp, Cannabis sativa
aagcttcacagtttcgagtctgaacagtcaattctaacttctaaggcagagctttactaatgaggtacaaacattgacagaaatacgtcataaaaacattatacgacttcatggattctgtttgcacaaaagaagtatgtttttatttacgagtacatggaaagagggagcttgttctgtgtgttgagcaatgatacagaggctgtggatttgagttggagcaaaaggatcaatgtcatcaaagacatagcttatgcattatcttacatgcatcatgattgcactctttcaattgttcatcgtgatgtacctaccaccaacatcttgttgaactcggaactagaggcttttctctccgacttcggtacagctaaactacttgatcctgattcttccaatcggactatgattgctggtacttatggatatattgctcccggtaagttatatgtagttgcatgttcattaccctattctctaaattttcagtgtttaattcattagtatattttctatttgatgttgtcaatgcagaacttgcctacactatggttataacagaaaaatgcgacgtttatagttttggagttgtgatacttgaaactttaatgggtaggcaccctcaagaacttctatcattgtctcaatcttcatcatcaactgctcaaaatatgttgctaatagatattttggacaaacgcttgtcaagaccaacaaatcagcttttgacacgagatattgttcttttagccacaatagcatttgcatgcttaaatgccaatccaacgtgtcgaccaacaatgaaacatatctctcaacaacttcttgcttgcaaaggattattaaccaagccttttatggatttttcacttgagcagcttatgatcccagccaatgctgaaataaaccaaaatggtgcaaatgaaattctttcttgatgttttcccgtgagcttcgttcttgtggacaattgagttttaccaaaatagtggtaaactaagcacaagttgggaaatttatggcataactatccactgttttagtgttttaatgggtaacgacctattgattttttttagccacagatctatccaatgttcttaaaagtgtaaatttgtccaacaagattaataccctgtattaatatatatatatatattaatctaatccttaatgtatttcaagtacccaaccagacgaaagaagctttagctgatttgtgccttgtagatatggcatggcatcgtaggattacattacgggtataacccgtaagtccattcaaatgctagcttatctgcttggtcaaattttcttttttgagtaaaaattaatacttggtcgaatgtcttgtaaaaacaaataatgcaactttttgaaagttccgaccactaggatggaaggaattattgtataaaaataagtcgaaaagctaaaagtttaacgttaattggcta

SEQ ID NO: 2597 - DNA, 1917 bp, Cannabis sativa
ttttctaatggagaaacttcttgattatagctaggaacaccttcaatggcgaacaagttggaagaattctctgaaacttgggtgcagaaaggttcaatatataggtctttgccatccatcccagcagttgtatgttctattcgtggggtcttcctaggtcttcctctaggcctctttattacatttggttctgtgttggtgacggcacttttcttacgccctcgttttggcttttccataggaggaatctctgcctctttctcacaaatatttaaaagagaccatatttgaacgagtccttttccagaaagtggggcacctatcttttgataagaagatccaggaggatgagcagcaatagcaatgaactcacatttaaaactagattcgggattctcatggactcttggacaccaatccaaaccccaaacagaccctccaacatataatataaagtctttaggctccctagatctaacattcccaggtagcctctcttgaggaactgttgctgaagaaaattgtggcaagttgattctactagcaacaccttcagcttcacatgcgaaatttacatctcttgcttcataattaaataccctcctccattcttttaagaaagtgattgaggacgataatcgctgagtttcgtactcatcaagtccactaccttccttcactacctctccacaaagctcagatattttatccatggcattcaaatgattctctactgagtaatcaaactttgaaatcctaatctttgggcgacagccattgaaattttcttccatgatagccgcctctacctctacctctaccttcctctttaatgttgttatttcctttctcacactttcgacagactgaacagaaattggaagctcaagatagcttcttcttcctccataacttctatgagaaatagggtgaaggatattaccacagaagcctatgtcttttctcttcagctccaaccaaaatatgaaattgtatgtttcactgtattgtatgtaacataaagaagagaatttgagcaacatgtggtcattagtgacacatcccatatcactaatttaacagcaatataacacattgtccttcaaaaagttactcattaaacaaaacaaaaatcattgttaattgttaaagttcagaatatttaaggttcaaaatccataaaagttcatagttaatcttctgaatagtagacattattaatcttctgcattgaatcacacacacaaagcagattccatcagatcattatctcattgtttaagcagattaccacaagttccttcatcaaaaattatattcagtaatcaaataaatctcatttcacaaatcattattgaagcccacttaccaaaattttcatacaaatgcttaattgtgtaaagaaaataaaaaacatgggcatgcaataatcgcttgcaaaaaactatgagattcagagattaaaactaatcattactccaagtgttccacaaagccatactgaagatgtttgccctactttctatcaaaaatactcaaaaggaaaccacaaaaaactacaacgaatttcatcaaacaggtggtgtgcaagagagttattaaagtgatgttgcattccatataatcattaattccaaataggcatttaatcaaacagttggtgactcttaatgggtccatggatagaaagacagagtagctctacaacagattaaatagaagagaagagaagagttgggtgaggcactgacctcctactgggtgtgtcgctttgctgatagtgagaatgaaagatgggtatgttggattggttgaggacgaggagaggagagtgagactctgagaataagcttgcttctgcagtttcaatggagtttctgtcgtcaatagggattttccagttttgttttttgaaaa

SEQ ID NO: 2598 - DNA, 2065 bp, Cannabis sativa
taaccttacagttttatcaaattaattacaacttttttttacatgaaaccaattcttttttttaagtatgtattttattagctgtacatatatttttatttttgaagtgatatgtatatttttggctttttgttaaccactaaatatttacatatacgggtgtaatattaataaattaaaatattagatgaatattggtacgtagggttgccccaactagaagttgatagggttgtacttatatatctccccatgtggagtgtaaagtaatgggtttgagagcataataggatgccacgtcgaaaacacttggcatgtactccaaacatatataataaaagtagtatagtagtagaagaagaagaagcatcaaatttaaactagtgaaaattatatcacactttcgtttcttcattttttgaaaggtagatatgtatatatcgatagatggcgtacaactctcatatatattcattttttcatatatataaaataaaagaaaatattgcttttacttattacttcatttcatgctagacaaagttatcacgtgacgtggagtttttcattttttcatgtaaattatatttatatgttaattatttatgcatgtcattgatcacctgcttaacttgagctttaattaagtgtgtatatttcacctcatttgctaaaatatttcaaaaaaatatatatagctatgttttcttgttttttaaaccaccttaatagatatcacaaaatcacatcgtttgttgcgtatttgactaccaacatttaaaaaaacagtgacaaagcccttttttctttctttttttttttttgaagaaaaataaatattcatttatagctctttatcccaaattccttattgtggagaaggtatcaacacaggaagccacttgacgtggctctctacctttgcttttaaaaccaaatcacctttgtgttaagcatcttccactcatatctcaacacgtgtaactcaaaagagaaattctaatccaaaaccaatgttcttaaataaatatagagggatggctccaaaggagtagtcagcatcaaacaacttgccccctctctagttccactttctaataaaaatttattaaagattttgattagatttagtaacactctatgtccatcgttcattttacacattatcacacaaaaatataatatctgcatatggaccccaacattattatatatatacatattacccgaaaataaaaattgaattagtaattagaatattaatcataaaagtgtttgaatatagtatactagcttaagagataaggccacgaaaatatttccatttagagaaaattataaggtcaactcactcaaattgggggagaatatatataataatatattttagatagaaaatattgttgcagttgatgattctacgtacatgatctattaattgattaattaacatatatattatattttttatatcttggtgatattaatatttcggctaaaaatgccttgtgagattggaaactacttaattatattttacataataaacaattcgagaagatgagttagtcaagccgtcggtgttataatatttataatatttcttattaagtgacaatacaactccaattatatgaagagagagagatattataaagtaaagatatgatgagaataattgagagagatattaatcatcgaacaaagaccaatgctatcccatcgatcgaagagacaagaaaaacaaaatccattacaaatcttcttttgagagattgaaatgagaaatagatgtaggaagtaaaaaacaagacaacttctcttaaatacctcaactcttaaccatgagtaatgtagctcatcttctaattacatctaattaataatacatattttattttctaactatatataataaataagagaacataaattaatagttattgcatagttttattaataaatttggtaattaacaaattctgaattttttaaaagttgaaccatatattataactttaagataatttaacttcggagcttgttagaacagagtatttcagag

SEQ ID NO: 2599 - DNA, 2498 bp, Cannabis sativa
atctttgcttctaaaatgtttctcgttgggccaacacttcaaataacttctccttcccttccttgtgttgttgtactgaataggatctctgccccaatttgaatttctaatttcacttttgcattagttaatttgttgacggaaattcccagtgatatccctgcccccacttcccaagcacctccccacatttggtaattttatcttgaatattagtgctacccaaacccaaccaacaaccctcaataatctgcttacataaaggttcacggatccaagcattctcaaaacggaaagaatgatgagtagccgttggaaagttaactttaaagattaagaataaagggcaatggtctgaagtagaaagctccaggttgtacaaaatcgactatggaaataacgacagccatccattagtcaccaacgttttgtccaaccattcttcaatccaaccgctactattccttcctttttcccaggtatacgggtatccaaccagaggcaaatctatcaaattgcaatccctcaaagcattgttgaatccttcaatcaatcgatcagggtagtttctcccacccttcttttccgtttgcgatcccaagttgttcatatctcccataaggcaccaaggaaggttactatcatcttcaagagaacgaaagagattccaagtttgaaatctcagctcgcgttttggctccccgtagaatcctctgaatcgccagggaggagaccccgtcttctggaccgtagcatcaatatggttggaagagaaaccctgaatcaccacctctctttcttctttccataacaaggccaaaccgccactgtgtccacgagcttcaactacaaaacaaccttcgaaaccgaactgggttctaatgttttccatactaatcttattacataaagtttcataaagaaatagaaaattgggcttcttttggaacacaaggtccgataagaattgcttggcccacgggttcctaagcccacgacacttccaacttaagcaactcatatctctgggggggttctggaaaccagaacccgccaaaggcccattttttagaaaccccacaatgtcttactccatttcatctaaaatgccagaaaactccttatcatgtgggcccatggaaacacccacactacaatcaggtcttctcctttttgagtcaacaatcatagtaattgtggaatcaaagaaattcccattattattgacatttagagtcaaatcttcttcattgacccccatgacattttccctgtacgcatgcctctcattcaacaaattactattaatgtcatagccaagattcttgccagccgatccccttgattgctcctgattcataggaatcaagatagctccctgctcactgctgctaccgtgggaggcttgcctcgtttcgtcccgcgccaccgctcctgaccggagccactgtgccccaaacgtcgaatgtcttctatacattgaagcccgcagttccaggctataaggcttctcttgtagatgtagtggcttcaagaaaagcctggggcaaaacctctctgagtgccctattattccacagataaaacagaaagttggaagtttttcgtatttgaaattcacccgataccaagaggaatcatctgtgctgactttcattcttcgttttattggtttgtcgacattaacccgaactcaaactcggaggaaatctctccaaacacccacaaaattgttaggatccgattcaatgaacgtaccaataaaattcctgagagccgtcactacgctaagagtcatgttgcccgattgtagatcatgaagttgaatccacatgtccatatgattaatttcgacaagccgtgggttatcacccttcttcaatctagtaaaaataaaaggtttgcgatcataggtccaagggctcccatctataactctttgtatatcaatctcatgataatattggaaaaggaatagattcggattgagttccttcacatacgttcccatccccggctgccaaagaaatgccatcatgttctaaaaacgttaaaatctgagacccgcccagtcagaagtttacccaccaaacaccatcgtgtttcaatcaccacctcttctaccctgctcaccggtacccttaacacttcttcctcttcttcatccagcctaacgagtcctcctctgacctccatatccctctctacactactatttgatgtcatagaaacactcacaaacagaaacacagcaaactctcaaaaaagagagacaaaaaaacgtatcagaggatactacaataaaaattaaatattcacacaattaaaaattaaacatgaaataattttaaattatgaaaaatttaagtacagaagaacaattagataaacgaaattgaggtggtgatgtgtcactttgaaatttttcctaacctatttaaactagggaacgtgctatgatttgagtatggttgtttatatataaactagacaatata

SEQ ID NO: 2600 - DNA, 2342 bp, Cannabis sativa
ataatcacggcctaaaaaaaaccatccccttagtatatgacataatgtttggtactgaaaattcatgataggatgatgaaattgttaagcaaatttcagtaggcacactgggatgagttacagaagcacataaccaaacagcgtgagtttaatgcagtgatatgcttggacaaatatatgatatgcaaacaggtaatgtatgtatgaacttaggctctgtattgtaagttcagaactccatatttcctcaaattcgtctctatatattgtaatttgaaattcatttcttaatcaaagagaacacagacttcaattaaacaggcagatgataatcctaatgaaacattggtagtgatttttgtgataaattacctgttcactgctggaaggttcaaaaccacctcaaaaaacttctccagaaccaacatcaaagcagcctcagttactgctggttttagttccacagcctcattggtgccaaccaaaactccagttcccgactcattcaatcttatggctccttttgttgtcacactattcttctttaacaatgcagcagagaaacctgaagcccatacctttatataatcaagaatacacaaaatataatcaggacacaatagtgaactagaaaactactcaataaacaaaagaatcactgtccaattctagcaaaattcttgctggcgacaaatcagaatctcagtggttactaatgcaaagccattctttgaaggcaaatctttattaatatatcataataaatatacatccctatgcattacatgtctccattacctgtgggtcaggtgcagcaacaggtgcagaatccacaatgcagcctctaattcttcccagtaaggaaggatcgtccttctgaaacccctcaaggatggccccatacctataacaatatggaattttttttacacatcaaatcaagagctttaaatatatatgaaatataaaaaatgctctaacaagatatagttgcatatgagattaaaaaaagaagaagaagaagaataactaaatggactcacgttagccatccagtgttgctgaaagtgtgaaaaaccaggttctttccatgctcctcttctaaccattcagccaaatggtcaacaagcaagttaatgtgcttctcggcttttccaccaacttgataactaagaatctcagacattggaaacgtgaaggtaatgacatgaaagccccttgaggtgtaccattctgcatatctcttgagatgtttttgctttgctcccaaccaccctagcaaaactaccacagtcctagacttggctgatgaacactcagaatcacctgaaacatctatggctgccggctcaggcaaatgccatctgtacataacatctgctggggaaggagataaaccatgatgtgtaactggcactggtgctttgaccaacttagctgattgaaacaaatcatggagaacaggggaacaagcaattgaagtactaaaggagttaggaacaaagttagtgcccgaatgaggaatgggaaaattaacactaggtacgggcactcgtattttgctcacaaacgataagtttgcgagcttggaaactgaaatattggaagcccacgaagactttggttcttgaaatgaatcacggattgaagaattcaataaatctggggaagacgaagaaaacgttgtcggggatttatgagaatgagacggtaacttatcggaaaactcattcgaaacagaagcaacggcaacggcagtagcagcaaccagaggtctttgaagggctccagacaaggaacccatgttcaaaaacagcacccgaagactctcaaaacaatatcaaaccaaaccaaaccctaatagaacaacgaaaaggctctagcctgaataccccgaaacccagaaaaaccgagaatgagaaacgcttgatcaaaacggttgggggattttaacgataaccctttaacaatgtaacaaatttacgatatgggtttttaactttatatccaaatggaatattaaagtctcaaaataaaaacaaaaagtgattgattattgaggaagtagaagagaatggacgcaggaatatgagcacaaaagataagtatattctcttctatatattcttacctctctcgattctaggagcttttcgttcaatgtagtcgggctgtcaaatcttctcttctctgacagcccgactcaacacataaaacgttcctttaaaggaacctaaacaatacgcgtttctgggaaagaacgaatttgattaggattaaggaattggaaatatatagtagcgaacaaaatggaaactaaaatgtagttgttaattcacaat

SEQ ID NO: 2601 - DNA, 733 bp, Cannabis sativa
ttttttttttttttaaaaaagatgtggaattgaatatatcgtaaggttttgaggagatgtaaatctttattaattgtttaaaatcttcaggctgctcttccacaaggaattgtcccatttgtgtttgccaaggaatacaatgtccaccctgacatactgagtactgggttagaacactatattctcatgctactttactttgcttctgttgtctcagatctatcatgaataaaatcaagtggtccagacaaatatattctttctctctctccctctctccattagtataaaaaaggcttattcttttacctttttttagtatatctcccattctatataactaactattttctttaaacttcaattaaaaaataaaaagcctatttcttatgaactagtgttgatgtttggttgtaaagattggcttttccaaagccttagttcttatagtacttatttcactttggatgcttgttatgcagggttatatttggtatgctaattgctcttcctatcactctagtttactacgtcttgctgggactttgaagcataagaggaaaatatgttgagagaaactcagttgttacttagctagtgtttctcttattactttttttttttttgccatctaactgaagagcaaacattatatagattttgagaaacttagagaagaagaagaaaaagaagaagaaagaaagattttgttccgcaaaaccgaaggacaagg

SEQ ID NO: 2602 - DNA, 2167 bp, Cannabis sativa
aaaaaaaaaaaaaaaagtcatgatcatcacctgctaaattgccaccatattatgaaaccaaaaaccaactagtgttccgaacccttttccttttccttttttttttcccactagtgctatggccatagattcctagacttgaaagttacaattaattaagttggcaggcattatgatcacaaatcaaataggaattgaataaagttttacaagccatatggatttcattactgatcaattttacaataatctcatcttaaagcaaaccaaattaactatattattaacaatgttaccacattttcaataataataataataaactatattaaatgcacttatgaataggataggaggaagaggatcagcctactaaaagctttagttaagtagttctttttttttattatttataatagaagaacaaatgtatggtttttatataggctattccaccgtatctattttgttgctgagtagaagcctattcgtatctctgaaggcacaaatacatacattgtattctgcgagtgtagaatcaaataataagtcaagtttagtaaaaagagagtagtagctaggagaaaatgttataaatgtattttatttagtatatatacatatttatctacgtatgtagggaagcagagaagatagtcacaatcccaacagaaacacacaacacacaacacaaaaattcttaatcaatccaaaaactagaaaacaaaaactcaaacagaacccccatcgatctcattctcatcacactttctctctctcaattattattctacatttttatttttatttttatttttatttttccatcccaaaaccacgccgcataaataaatcccccattagaccaccccctcaactcaaaccctcataaaaacctctctcccatatatcttcaccctcaaataccaaagagaaaaaccaaactagacccaacccgaatattatggtgacaatgttactaaccttacaaactcctcctttcataacaccaataataatagctctatttctagtcctctactctaccaccacctgcgccgccactttctctcatcccgattttcaacacctagacgttaaacagacactctccgaactaagctctgataacctcatttctccttccgccgccgaaagtaacgtatccgagtaccaatacgaagctcttcatgccgaaaccggcggaggaaagtggaagcttaagcttatccatagagataagctcgtgtcgttaacatcttccacttatgaaaatgaaaatgaaattgaaagtgatcgtcattacaatcggactaacaatagcggtcatcgtactcatagccaccttttccatcaacgtatgaagagagacgctcaaagagtagctaccctactcagccgactaaccaatacgactaccaccaccaaaggttccgacacgaaatacgaggtggatgattttggttcggatgtggtgtcgggcatgaaccaagggagtggagagtacttcattcggatcggagttgggtctccggccaggagtcaatacgtggtgattgactcaggtagtgatattgtgtgggtccaatgccagccttgcaaccagtgttaccaccaaaccgacccagtattcgacccggcttactcagcttcctacaccggcgtctcgtgcagctccgccgtgtgcgatcggctagagaacgccggttgccacgcgggtcggtgccggtacgaggtttcatacggtgatgggtcctacacgaaaggtactctggccattgagactctcactttgggtcgagccgtgattaagaacgtggcaatcgggtgtgggcatatgaaccagggcatgttcgtcggggcggctggtcttttgggcattggtggtgggtccatgtcgtttgtgggccagctaggcggacagactggcggagcatttagttactgtttggtgagtcggggtaccgactcacccgggtcactcgagttcgggcgtggagcattgcccgtgggcgcatcatgggtccccttggttcggaacccacgtgccacgagcttctactacataggactcgtgggtcttggagtcggaggggttcgaattcccatttcggaggatactttcaggttgaccgatacgggtacgggtgggggtgggatggacacc

SEQ ID NO: 2603 - DNA, 1665 bp, Cannabis sativa
ataatttataattgtatatattgatcgtcgtatttgctccccaaaagtgcaagcaaaactaaaaccacaaccgtatattaaaatcacttacaaagtaagctcatgtagtaagttaacaattagcaatgattatatatgtatgagctcatattaacttcaaattattgtacggaattcgttttgtgtatatatggagaatcctcctcaatgatgatttaatcatacagtttgttattcatttcaaacaaatctttacatttggattttgtagtacctgtacatactatttggtgattttcatcgtaccacttttgttctatcgaagctttcctttcttttcttctttttctttatcaatgcttcataaattaggtgtttttatatattgtttaagggtgttcttacaaaaatcatcccaaaaaaagagagggggtcatcttacaaaaattactgtaaatttatataaattatgaaaagaaaaaagccaaaagaaataaggttttacttttattatcctcgtgaaatgtgtaagcagttctgtgagttgtgagaccaggcccacaaggccacaactttacaagtatgaacaatgaaaaataataaataaataaatatgtaataaaataataagctaatctgagacaataaccggtttgaggagaagagagtcaaacaatgccaaatacttaatagcataaaaaaataaaaggacacagagaaaaggacaccacagaaattcgagtacgtgattgagataaaagggaagaagagagttaaataaaaaagggaaaaagaaagaaagtgaattgaattttaagggtaaggttattaaattgaagaagaaaaagttggatgcaccgcagtacgttgaaagcaaaatgtcaaacactaggttttaatttttgggaactggggtttgacagctccttgtccttcttggttacaacgctgcctaccacctatactgtagtcttgctaatgctaatagccagagtttctcatgtacgtttttcctttttcactcttttttttcttctctcttgtccttctctccatttctctcttctttctacttctttctctaatatattgatacacaattatgcctatattaatagtatatgtattgcaatatgttaatttatatagatatagatcgatcatcatgtgacaatgcatttcaggtgtcatatctcacattttatataatcatgtgtttagttttaggatgccattggttgtgggcaaactgcaaaactggatcgaattcatcgatttgattttaaggaattggtcaaaaagagttgaaaataaagacaagtcttaacccccaaaacacttttctttatcatttaaaacacaatagaaatatgagatacaataacacaatgacaccattaaattttaggtaaaaatgagattgacttactaaatcaaaaattaacataattaaaataatctatatcaaatcaaaaactatataaaaagtgtgaataacttttgagtttttacatattaaattacttatttaacctttttttttcttcattaaaatcttttatgaattaatataaattacattattttaataactatatttttaggcttttacatattaaattacttatttaagttttgtctttttttcattaattttttttttta

SEQ ID NO: 2604 - DNA, 3090 bp, Cannabis sativa
cagttctatagtagttaaaagaaaagttcctacagatcttaccataatattacccaataattatatatataatgtcaaaaaaacttaaaaaaaaatatgatcttattaaacttctttacaaaaaaaaaaaaaagagaagagaaattatattgattttttttttttgaaagaagaaatcataatgaatttgtgacaagaagtaatatgtatccaatgagaattcccatgtatgcggcatgtcaatcaactgctttttgttgttctttccttttccaatgtctaaaattgcttatctctctttgccgttgatcaactgtttttatgtttttatgtttttttgttccttttctattacaaacaatatctaaaattgcatatgctgtcttaaaataaaaacaataccactactatctccttctttttctcacaaaaacaactaattctcctaatagatataagttttcattttttttctcctattttatttactttttctactagtaaaaagacaaataataaaaaaagactaataaagtattagtgaatattcatttactttctttgcaaaataaataaataaatacaaaatgttgtcttataaaattaattgtttgggtttgtgcaagggaagaaaggagatgctttcgaatcaagaaaaactggtaacaagatgcagttaataaatgataggaacttttgtgaataactgcaaaacatataataataataaataataataatacaaaaatattttattagtaattttttttttaaaaaaaatattttattagtaacgataatgatatttttagtatcaaaacaaacccagccagctcttaccccatatgtatttgtcagctcccatgttttgttttctcacgctcctctcctatcatgtgaccaccacgcgccatttcccaattaattttccaaatttggatttttttttttaaaatgaaatatgaaagaattttaccaaatatgttatttaaaaatattctcaatttactttaaaaaaaattatcactttttaatagaaaaagagaatacattcatgtgatattttgtgtttttatcaaaaatataaattgatatttgtattttaaaatatatacaaatttgaaattataacacatgtaattgaatttttttttttttatcttattgataaattttgctatccaaatttgaataagtttgaatacaagtatgatttcaaaatatagaatattcaattaatattattgatttaccaaaatattatgcctattgtattaggttccgtttattttactcctaaaaattaatatttttatctttaaatattaatcaatacaaagatttttcccttttattaatttttttttaaattataatattttattaattttgaaaaaattaacataaattattaaaaaacttgataaaaatatttacttaaaaaaacctaaattattcctaaaaaatatattttttaactttattttatttataaacacgtatcttaaaaaattaaaccaaaatgattaaaaatccaataaataatttaaacaaattaagattttttgaagaaaaaataaagattatttatatttataaactcatatcttaaaaaataaagaaaaataattaaaaattcaataaaaatttaataattaaaaattaaactaaaaaaaaaatgttatgtttacttaaagaaatttaaatttttagagaaaaaaagaaacactctaacttgttcctacaattttttttttttttaaatattggattttaatatatattttttatatctaaaaagatttttaacaaaagtaaataattttttaaatcgtttagttagttttaattttttttttttttaattttctaatcattcaaaataattttttcaagatctaaattaatttattaaaagaaacagttgaatctttttccattttattttgaggggtacaatttaatagttgtcgaagtttaagggacaaaatttctaatttacaaaaacatgtcagcatttaagcagattaatgtgacggaacctaatagaatgactcctgtaaatataaaagtttaggagatttctaataagccatatattttaagggcagaatcaatattatcaaaagtccagagggtaaaattactagttattcttttaaaaatagattataccaacataggatttaaataatgattaacaaatacattcttatagtatctctaatggagtgctataaatgtgatgtatatgtatttttagctcatgttcataaaattgactccaatagtgatgtacaatgtgattcaaatttggcacatgttaaaagttgtgccaaatttaaaacaaaatataacatgaaccaaattttacaccacaatacttttttatttactcttttgtcactcattaatataattaataatttttcatacttttatttatatatttaatatgatttttatatactttcgatacaaatttaatatttttattgattttttttacaatttttattaaaataattttttctcccaaatgtattggagcataattgtaaaatttgagtcaaatatcacattgactcatttttttgagccaaattttacagaaaaattatatcatccactggatatggtcttagagcacacacattagcttatctactctattttttaaaatatctcactaaaatctaattttctctattttttctattattttttaatatattttattattttataacaattaaataaataattacaattatatcacaaacacatacattaaagaaagccttaaaaaattaatataatattaatagctcaatgaatatctattcactactagagaaccactatccaaaaaaaaaaaaaatgtaataactcattaaatggaaagttacttttactacattttcattatactttaaagaaattaaagaatgagctacaatagctaaagtttacctcatttgatgaaagtactcaattttttttaaaaaatatgatgaaagtactcttaataaatatagattttaaattatgccctttctcttttgaaatatttaggctaattagcaattt

SEQ ID NO: 2605 - DNA, 3171 bp, Cannabis sativa
ttggttttctatatagtttgattcctagttcttgtagcacagaagttatccacgcaatctctgtatctttagtagaaagagactgatactcactttttatactggaacgtgatacaactcattgttttcgagaaccccatgacactagatttccgccaagcttaacacaaatcccgattacagatttttgatcatgaatatcatctgtcaaatcaacatttgaaaatccctcaagtattattcgacatgctggcttgaaaatgagacctctattaagagtacccttaacatacctcaatactcgcttacagtgagcaatagttggtgattgcatgaactgacaacaatggtggaagaacgaactggtgtcattatgtgagttttagaattattagagtgttgaattggaggatgtactcgagtgagtggttgtggtaatgtcaaaaaaggtagatactgacaaggtggagaagagttttgttatggtttctgagatggtgagaataattttgagtaaggaaaattattttcatcaaaggacacactaccagttatgtagatgcggccagatagatgaaggcacttgtaccctttgtgggaagggttgtagcccaaaaaatatgcatgtacttattttgaaattgaacatttgagtttgatatggtcttagaagggaaaagcaagcacaactaaacacctttagaaagttatagtcatgtttcttaaagaacaaccgttcaaagggagttgcataatttttttttttgaacaggaagtctattcatcaaataggttgcagcagtgaatgcatcccaccaataagtgagaggtagttgggcttgtgcaagcaaagtgaggtgagacccgtttcaatcacatgtctatgctttctttcaactcttccttgttgtttgtgggtgtgaggacaatgttgtctaaacacaatgccaagcttgttaagaatgggtgcaagagggcgatattcacctccccaatctgactggacagacttgattttagttgagaattgtctttcaacataagagttgaattgtaagaatgttgtagtggtctgtaagatttggcttttaaaggaaatatccatgtgtactttgtgcagtcatcaagaaagtgtagaaaatatttgtacccttcagtcttgtgtgaatgatttcaaatagtgatgtggatttatgttgagacgagaaaatgtatttgatggagtttccatattgacatgcatgacaaaagtaaggatcagtagtagcaacatgtaaatgatgtaagattttattcaacataactttattggggtggcttaatcttttatgccagagatttacaattagttgatttttagtacaatatttatgatgacattgatttatagactcagacacactagcagtatatccagatgactggtgaaagtggaaaggttgagatctgttgctggacgaaatggtgacttgaaagaaacagtcttcatggtttaaccaaaaggatttgaaaatccctaaatatcctaattaatcatgtgtgcaagttaaataaagccttgtatgaacttaagcaagccccaagagcttggtatgacaagttgaagcaagctctattatcttgggacttcaaaaagctctaataaaaagttgatctttctaactaagagaaattgaaagaaagaaacaaaagaagagaccagtaatattctgtaaatagtttttcattacattaaagtgtacaatttagaggtatatatataagacccccatacaaagcaagaactagaatctaacaacctaacttactacacaactaaacttataacaacctttaactaacaccaatttagtcataactgtcattagtttcctcaatatgtatggtttgttttgttccatgtgcgatagtttggtttagtcttcgatgtgttttgtttgttaccatatataatagtttttgctgtatggttgcttgtttaagtttgttttgagttcatctcaagaatggtataaaattgcagttacagtctccactacaaagatatcataaataaatttttcttcataaaataatattttgtattttttttcaatatttaaataaaaattgtcatttaatgttattattaaatagcgtgtaaattaaattttagatatttatcttttataaatgtatttttatttgactcattttgctatttacgaatactaaaacttcaagaatataaattttattaattatatttcttaaaaatttaatatattattaatttactttccataattttaatattacttatttcaatattttattatgaagtcactaaatttgtttattttgtggtttttgtctaaggatcaatttttcaagcgcaactttttgcattgttggtacgattaagatgggctcaagtgtttttttaaatattaaaattttattttctagctagctttcctgaaacatctcacttgttagtcgtaactttattgttgtgcctttaggataggtaatgaattttattaaatgaaagagatgttttctctttctctttatattggtgcttgttttttttttctctaatcgaataaagtgttctgacaaaaaaaaaaaaagataaataaataaataaaagaaagtagttttttcattttaacatttaaaaatagtttttgtttttacatttttacggaatttcatataaaaaaatttatagcaattaacagaacaacttaaatctcaattaaaattcgtataacaacctatatagaagccaccagactctagagcaacccaaaccgtaaattttaaaaacgaattaaaataatatatggggtaattcccctaaaaaaatcaaatattaaaaaaaaaacatgagttaatttgaaactaacaaatcctaaataatcaaactgaaaaaaaaaattaagaaactaaagatatataaaaatgaagcgaataacataaagatattaatctatggggctgcctaaataattatcatagaaacgggccaataaaataaattatataattagacactaaattgtacaatgattaatgcataatttgtgtagatatgcatttataatgtagtgtaaatagagaatggggtcccgctatttggaccatccacatgcattgccaaggagattcccttgattataaaga

SEQ ID NO: 2606 - DNA, 2414 bp, Cannabis sativa
cttatattctacatagtaactaggagcagaaggccagtttttgttttgaaagctctggcggcactagtttgccttctgccatttataccggtactacttttgatctttatagtgggcagcatacactatccattttggaaattaagatcgactataagaaactgcatacgaaatgacaatgatattgaggactcggaaccctggttagatatgctttcgatgtgtcttccactatataaggtagtatgggaggcaatagctcgtagctgctgcgacatcaccaacgaaattgattaactaaacctacataattgtaatagagctatcacttataaatagctcatcttctatacatgtgagttaaggtcttagtttgatgaaacattgttttgagagagaattagagagttggaaccaaaaacagtgtgtacaatatgatcagattggagggatgttaaagggattgccattttaagaaatggcttccctcaagtgagatttgattgtaattcttctatgtttgtatctttagtttaattctctggattctctctaacaattgtatctttattattattattgtaatattgtagaatgaaaatgctatttggaaatacatgactgtatccgtccctgatgaccacggtgtgaggtaaagtcaaatgtaactaaatagttcactttagtgacatttgaaaatgccactaaaataataattaataacattttaaatgtgactaataaatttttatatatttatttattatatttaaaatgattttagtgacattttaaaaatgctactaaattatatcacttacatttgtaaacatgtcattaaattattatttatataatttaaaaaaattaccaattttgttgatataataactgtaaaatattaataatatattttactatttaaaatatcgttttgtgtttaaatattataaaattaattttggtaggagtacttatacaaacataacataaatcagcaaaaatatttagaacttgcaaattttataattttattattcaaatttttttatacataagaaatgtttttgtacataagcgggtactatgaagagaatagcaaccatccatttttgttccagaaaaaatcagatcaaaattacttataatatatatgcttcccaagttaatgctttgtttctacataacaacagtttgtgttatataaattatgtggtaaagaaagaggaactgatggtggattgttatatggactataagatatatatattgcctaaaattgactgcatttggatgtaccttgtctcgttcctgtaaaaaaccgtgatatttgaacctaatcaaatcatgtaactttagccaaatacattgttaacatgcttatgagattaaaagattgtagaaagcaagcatattacacttcactgttgcttacagtttctagtagtaatgagtcaccatgtggaatttagcatgtaaatgaaatggatatggagtttcttaagattaagcttttgtgaaacttagaaagttcagctttgaggtttacatgctaaactcgataaacttacaatgtaattgataagactaattaattccacatcacaagacatttgttatggtatagccgaaagatgaactttaatttttaagtttatgatatgtatgcattttcaaacaagatatttgttatggtatagccgaaagttgaacttttagagccatcaaattcaaaagggtacataatataatttcctactattgtcaattaattctactaaaatgttcatggactggttcctttattctgctataacatgcagattttatgaacttaaaaacaagagcactagaagagaccttgacaaaacacagctaattcccaagtgttataaagaaaaaacaaaaacaaacagagtctacaacaaacaaactaaagtaccatgaaatttaagttacatttgtatacatatacatagtgtttcacagattgctttataaatcagtatatagtgttttgatgtgtgtaagatattttttattggaaaattttagacgggataaacctagtttctcttatgatgtttgttttctaccgagtggttggattgttttcgacagtaaacttaactacaccttcaaaactatattattcgaataggataatctcacaactacattattattgttttcatgattggttcttattgaactgtttatggcgaaggaatttatttgcattatgcagattgtaacttgatacaaggaaaaagaaaaggaaagaaaaaagaccctttgaacaaacaaattcatagctagcctagcccataccacaacaaatatttaatcaatcatgaaaatgttctatattaaggatcactttctcagctattgctactctacaaaacatagct

SEQ ID NO: 2607 - DNA, 1184 bp, Cannabis sativa
attattgaaaattgagctcaggtttgtcatttaataaaacagtgggtccaattagtaacttttaaaaaacacagggtccaaaatggcatttaccctataaaaaatattttttttgataacaagaggaattgagatggacttgcccctttttccttttattattcattaacctcagatgcagatcatatggtctaattcctttctttgatggcgttcacaggtcatatgctttagtgcctgtttatgaggctgtcacaaggccaattgaagaatccccttcagggagcacaacaaaagttgagcaagaagaggctgacagcagagaagtcgtccttcctggtgttaatcttctttttgatggctctgagttgcatccttttgacataggcgcttgcctgcaagctcgtcaaccagtctccttaatagcagaggcagctgttacctctgcagcttttgctgctgttaaataaggacttttgatagagaaccgttaacttcccccctcccattactgaaacctgtcatccatgttcatctgttctgattttttgattcgatctttttgagattggcagtatctactggcttaaagtcaaaatcagcttggaggtaaacaaaactttccccctttggtttgtgctgtcaaatatccttgaaatcagttaatgatattgtaggcaacactcttgattgcttaaccacactaatttatgatcaacactatcatgaaagactcttcttcgtatctgtatttacttgttggatacaacattatattttcatcaggtcgagccctcaaaactcttggctcatgtttatgcagttcggggctgtaaaaccttttccagttactccatccaagactcttcaggtttgacttactatgaaaagaaaagtgactgtttttttaacttccaccctccaatgtcttattatggcagtgtttatagatgaaagaattatctaaagcaaaggggaaaataaaaataaacatgtatatattttattagaaaatatgagaactcatcatttatacagttttactccttaaatttcttgtaaaaatgcatttcaaaaaagaaaaaaaaaattgattgtaacaacatactctgattttcagaaaaactaataaataaattgcttagaacaaggtactcttgatttttccattaaaaaaaaaaaaa

SEQ ID NO: 2608 - DNA, 1639 bp, Cannabis sativa
acgagaaaataaccaacccaaccacataaaggggaaaaaaacagcacacacagaaaaagtaataatagagaatgaaatattacataatttacgcgtaattgtacgcgaaactttcaacaaagtacatgccttgttcatatactgaaagtaacactaacactggagctacatagatgaaaacgagagatatatacaaacaagaagcaagaaaattcgaggctatagcccttatcagaaaacagctcacacttgattcgtttaatttgctttacatcttgatccattgacccaagaagaagaagataccctgaaaaagcagccgaaagtaagttggcttgcttgccccactaatgtgcaagatcacgtaaaagatacatagatgtttttagaaagaaaacagttcatccataaagtcaacatggaatttgcccctcaacggtatgaaactgttcaataattgaaatgaagtaatctagactaataggcgaataaaaagtattgactataaacattgagaatcatttcgttttcatcctttttgtatggtccttatagttccaagccaacccaaattacttggctcacggtgtttctcaaggaaacttattttgcatcattttttacccaatataggaagcggattccatcacaacaaaactggtatggtatctaatttgagcctcggtagaccacaaaacaaggccattcctttgttcttagagttgccagagctctcagagactagtactacatggcctaaaaatccaagaggtacaagagtatccaaaaccaaaatagaataagactgtattttacttatctcctagccctaccaacaattctaggtggcgtttagttgggaggattaaataggaatgagaatagaaatagaaataaaataaaatttaagtacataaaaaaaattgataaaaaaatcattaaatattttctcatgttatattggaatagtcattctttctattttaaattagagtagtcattctactaaaatggtagaaagagcattccaatactttaaaatgcaaccaaacaaaggaatgaaatgaaatttgtttaatttccattccattccatttcattacctccaaccgaaccccatctaagtctttaacaccactttgcttaaagagggaacaaaaggttgtaacttatatgtgcaaagcttgaactaaataaactgtgtagctattcttatagatcttaaagatcaagtatgcctaaagtggtcttgaactttcaccatctgaccatagtgacccaacttatgataattaatttttctgtacaaaaaaagttgagcaataacgagcatatgctgaaacgcataaaccttttggtcatttggtgtacaacaaaatctttaccgaccaactttctagagctaaaagtagagcactaaaatataacacaaacgtcctacccacccacgaagcactctgtttcgtttcaatttaaaaatcaacaaaactagatttcaacctaaccatcatcaacctcatctgtagcaacacacatatacaagtgtagtcctccaatatatgtaaaagcttatttatttatttagtcaaaagagatgcatactagaaaaaaggcatttcacaaaatcaataaataaact

SEQ ID NO: 2609 - DNA, 1484 bp, Cannabis sativa
tggcttcatttctgcagtgccaaactacttcaaataaacaagccgcaaacagaactagaagctcatccttggtgaggacaagttgttggaaaaagttttcgaagctatgcacatttaaagtattagatctcaatccccactgcccgcgaaaccacagacttctagcaaaactacaggtcccaaacaagtgtagttccgattccacttcactattgcagaggtaacattccttatccaaattatgcataaatccccagttagacttgagaggcagacagttactaagaattttccaaatcaaaagcttttgacgaggatgaagctttagcttccatagacatctccagctctctctttcaggaagaaaccgattactttgcgataaccagtatgcattcttaacagagaaatttcctttattgctagctttccaaaagactctgtccccttcatcagagagaggcctaatcctcaaaatagcatttgcaacctcagaagtaaaacactgccgtattaaatcctcatcccaaacccgagtgtttgacatgaagaggtcagaaacagatgaaaaagcatgagtagttccataggtgaagctctgtcgaacctcttcagggctaaagccaggaacccagggtctagtccagatatcaaaatttcctccccccaccaggactcctgctccagaaacgcaaagatctctagccgaaagaagactcttccagagaaaagagtctgcacttttcttttcaacctcccagaactcaaaagttgaacaatacttggcacttaaagctttcacccagggcctatccgattgaaccaagatgttccaagcaaacttagccacaagggccacgttaatatctttgaaacgcctaagacccaaacccccatttctcaatggctggcagatatggctccaacttttcaaggcaagatatctatttgaatcgtggcttgaattgcagcccttccaccaaaatctagcaactatgctatccaattctttacataaggacacaggtaaccgaatagcagacatcgtgtagcaaggaatgctttgaagaacacttttgatcaaagttaatcttcctgcctgtgaaaggcatttagctttccacccctccaatctattaagcacctttgtttttatgaaattgaaatcctcccgtttcctggcagagacaaagaaaggattgcccaaatacttttccttgcctttcaaaacatgcattcccatagcagacgtcaagtcccttctatcaaaaaccgagatttttggggaaaaaataataccactcttttctttactgaccttttggcctgaccagtattcatatttctccagacagcgactaagagctaaagcttccctttgatttgcacgacagaaaaataaagcatcatcagcataaaacaagtgtgtaatagggatagttttcggcctattcgtataccagtaagtgttgggttttatgccc

SEQ ID NO: 2610 - DNA, 991 bp, Cannabis sativa
cataacaaaaacaaaccaacaaaggaaccgtacagctacctatgcttaatttcataaaactctttaatctcattgccagcttaggctggccatttacagaaaacacccaattggaaattaaaatagggcctacagatttgtaatctaccccgaaaagaagtacataaataaattgcagtaaccccttctatatcagtagtatccgttttgactatttcccatattttgttcataataaactgatccaaattaataacataattatattgatagagagaaaagccaaagcttttgaagtaaactttttgccaggtatcatgagtttgacaatgaaactgtggcacaaggtatttcaaaaggatgagagattaaggggaaaagaaattgtcaagaacaagaaacaagtatactttttctgtgtacatgtttttaagctttctagcctcttcgtccatgggttgatcaagcttctgatccaaagtccacacagtaccacttctatcaggatcttgatcagtcgttatatttgcagccatttttaacttgatcgttcaagttattcttcagagttcaactaattcacttctaaattattcctccatcaatactttaattgtgccatcagctttctacatgtattgaaagacaaaaaaactcaacaagttcaaatcaatgaaagattaatcactgtaaatactaaaatctatccataacatttgaagagaaatgtacattttcctgaacacattttctcagcaattctgagacaaaaataattaaccataaatatatatatccataatgttcaataaatgatttcaataagcttgaataaaggtaacacaataaatcggctgatcatgcaaataaagaataaataaatctaaaggaaataaggaatggaaagcatcaaaatgtaagataagaaaagttctcagctccaaaattttgaaagaaattactttcacctgcaaaaaaaatcctcacattt

SEQ ID NO: 2611 - DNA, 1095 bp, Cannabis sativa
tctaattttgtgctgttctgcttgtatcagaagcattgtaatcttttacgtgtatggtattcatgatttaaacaacattgtatagtcatgtgtttgataggaaggaaaggccatagccaaaccttgttttgcatttgtagaccatttattggtattttttatacttggatataaaacaatgttgaaggattttgtagtagtaactaatatatgctgtattaatatgaaaatgtgacaaattgtcatttattaactgtctgcacagtttgcatatattgatcaataatagttgagttgagttgtacttttttgttgctgttgttgttgttgaatctcttaatcctccatatgattttattgttctgttcctttatttaattttgtaggatcgagctaatgagatttataagagagtcgaggatcaaaaatccagcaggggaagaaatcaggatgcattgttggcggcttgcctatacatcgcctgtcgacaagaagacaaaccacgaactgtaaagggtacagcttatgattcttttaacatctggatgcttccttaaaaaatctatgctttgtctatgagcttcgctgaacgtgtggatttcgaatagaaatttgctctgttgccaatggagcaacaaagaaggaaattggccgagcaaaagaatacattgtgaaacagctgggattggagaagggtcagacagtggagatgggtacaatacatgctggggacttcatggtaagaattttatttaaatttctttccaaagtttagaataggtaagcaatctttttgtgccttcaaaaaaaaaaaaaagaagaaaaaagtggggtttgtactctgtgtatagtaaacatatcttatatactatttcagttctcatttccaattcttgcactgacacaataaattgtaacgataatgttcagaggcgattctgctccaatcttggtatgaacaatcaagctgttaaagctgcccaagaagctgtccagaagtcagaagaatttgatataaggtgaaagaaatgtagactcgtgcatttgaaatattgtgcatgacataaagattgttaaagtctcttgcttagcagg

SEQ ID NO: 2612 - DNA, 2400 bp, Cannabis sativa
acattatttattcatttgctcataaaacttatattctttgtttatatgaacaagtttatgtagttgaatcaatatatcacttacatctcaattcacctagttgcaaaaaatttggtagctcaatcagtgtagtagcaagttcctaaattgtaattacataatctatcttgactatttggtaactgatgaacttatagtcaaattttcgtttgtgcaggtgaagcaagggatgaaggacctatagtattggaaagtttctgtaatttgattcaatatgacgcctgtaattccatactctataagcagtgtttcacttattcccgggacggtcttcagaacaagaaagacttattgctcaacaagattcagcttctcaaagaaatgcaccataaaaacgtgttccccacagaattttttgctacctcgctcagcttcttttagattgcttccatcatatggaagaggatgttcattacataatcggtctagaattcatatattatcagctacagaaactgatgtagctgtggaggaacaagaatctccagtagtagatgaggatgctggagcctcgaaagttttgtctgatgaagctgaagtgaaatctgatgccagtccaacgccagctcaatcagctcaatcaaaacgttcaagacctgttaagaaaagtgacatgccaccagtaagcaaagaggaactagttgctggtgcaacttttactgggaaagtcagatcaatccagccattcggtgcatttatagattttggagctttcacagatggactggtacatgtttccatgttgagtgatagctatgtcaaagatgttggaagtgttgtctctgttgggcaagaagtgaaggtgaaattagttgaagcaaacatggagactggacgaatttctctctctatgcgtgaaaatgattctagtaaaacgccacaaaggagagatacttctggtggtaatgacaggactggctctggcaggagtccttcaaagcccaaccagagaaaaggcgaggggagaagaaattccaaattttccgttggacaggacctagagggtacagtgaagaatatgaacaggtctggttctttcatatctctccctgatggtgaggaaggtttccttcccataacagaggagcttgaggaaggatttggaactcatatgggggaaacttcacttgaggttggccaagaagttagtgttcgagtgttgcgtttcagcagaggaaaagtaaccttgacaatgaagaaagaagaaaatgctcaaaaggaagatataaagtacactcaaggggtaacccataccgcaacaaacccatttgtgctggccttccgtgagaacaaggaaatttctgcgtttctggatgaaagagagaaaatggaaaaagttgatgaaacaccagtgacaccaaaagtttcagaagaattagaaagcaaggttagtgaaagccagactgtgttagatagtccagaaggggaggaacaaacagcaatcagtggtgaggcaaatctttctgcagttgaagaagaagttaaattagatgaagcttcttcagagaagacagaggtggaatctagtgcaatagaagaggcctcaacagatatttcagacaacaaagaggagctggaaaaggctatttccagcactgataacagcactgacagtgaagcccaaatcactgagaaagctgaggtgagttctgaaactttgaatactgaagtgagcatatcgacagaggaacccgttgaaaatgaaggacagtcagactcaactgctgcatcagctgatcaaatattatctacagaaagttcaactgatgaagtgagtacagaacaaaaagctgatgatactatagttaaagatgaactgccaatagaaccgcctactgcagataaggtggaaccagatgataaaaatggaagtattaccagctcaggtccgcaacctgataatctttcttgaacattatgttaaagtttaaatgtctcactttctttcaagagcaaagctaagaacttcaaatttgcactcaaaatctagatgcggcatcaattattatcatgatttttaaatgatattagctcactcaaatgtatttttttattttttgtaaggtcacttaaatttatttaaatcacatcattgagtataagttttaactacaaggtttgagtgttcctagtataactgaaaaaggaagcactaagagactgtcagaaataatttgctgaggcacataacaatatctgatactctttcttatgttactccattccttttatgtttggaactcttgattgttctttcttggtatgtattgaaattaaagtgcacatttcattcacagaagagcaagcattgtctccagaaagtccagccattgaaaatgt

SEQ ID NO: 2613 - DNA, 2250 bp, Cannabis sativa
ttcaacccaaaacccgttatccataaaaactgaaactgcgaacccgcccgaacattttaaaagaaaaaaaaattacagattcaccggtttagatttagacgggttgctcgagttcgggtcaaatccgctcaaaatcctagttggcggtgagtaatatcaccagaagctcacagtgaattgttacatgttttccacaataattagtaaattaaaatatgtaaaaacggatgataatgtgttccaaaacagacccaatacaaacttatacttaattatactactatatatagtatataattatgacattttggtggtagtggtggacactttgttttaccttttagcatttctgaaaagatatataggtctcaagtgaacaacattaggatgatgggatatccttgtagaggaaaaaaaataatcacaacatgaactcatcggtctctttttctctccctctatatatatatccctagctctatacacaagagtgacatatatataataatctcatgcttaattttccactgagtgtttgtgtccttaatttgatgaatattgttatttttagttgactaaactaaacttaatcgatcactacacttcatatttggttttgggttgatgaagttccattattgaaagaatactgctggccttcgttattttgagtactgtgaaaaggtcttaagattccctctggaggacatggtgagggtgctggtgcatggtgagcaatgaaggtcggagtgttctctccgggcattaacactgatactcctctcgaataaacactcatctgatcaaacaacaccacacatatattaatattaaactatactaaaactagtaatgctagctggtaaaagattagtgttatatatattatatataagaagctacttttctagcatgctgcttcataattcaatgcaaaatctttgattatgatgattattaatactattattttaccaaaaaaacagaaatgaaaagaaaattaaagcagttaataaaccgcggccaaaacagggaacatggcttttgctttatctttcttacaatacaagaaaaagacatataatagtggggaatgagatatatgtatcaaaataattaattatgaatcttcatgggttttaaaattaattaattagtaatatctatctacaatactctttgtctgcatatctaattaacttttccatgaatcaaggattttttcttccacactagacttttgttgtggacattttaattttaagttgaaaattttggaatgccttgactcaaagcatagttagctatatatagagagagttcatataaagttacatgtgaaatactaataggtttttggccttaaaaacataatgtattacacctatataaataaactaggtataagtaacatttaatttcactataaataactgctacttttagtgataattttttagtcaaaatataatctttttgtgactaaatgtgacttttagtcatagtaaaatgttacttgttatttatagtatttagttacaagttatcactaatttaattttagtcatagcaagtattgtgactaaaaatacatttagtcacaatataatttttgtgactaatacttttagccacagaccttttaatcacaacataggaataattatttataattagttacaatttttttactagccacaagttatgctgtgaccaaaaggaatttttttatagtgtacatagatttgtattgtatgttttaataaacaataaataataattaaatttagatttatttttttaagaaaaaataataattaaaatttaatctaacgatgttagttttagttattaaatttaactaaaaaataataaaataaatggttaaattaacaatatataaagatatatttgttgttgttgtcatgtcatcttagcatgtggggaagtttgccaatagagtcaataacttgcatcttaaaactctataggtggcccatgaaactctcaccatttttgtctctcttgacaaaatgtgtttaatgcttgaagacaaatcttgggattactttcctaatattttataccaaggttgtcgaattgtgcaaacaactagataaattttttagttaaacttaaacagcaatatattttactaaatgtgttggaatgacaattctctttttgtgagaagggtgtagtgaaagtagactcccaaaaaaagtgttataaaaaagaaaagctaataat

SEQ ID NO: 2614 - DNA, 1235 bp, Cannabis sativa
atgctgcctcccattatacaagactacatgttaggctgtttttaaaagtgcagattgctggtgtctgtgctttactttaggcgtcaataaagaaaagattactataggattgctgaaacccctcctttttaaaataataataagaataatatagttttctagtaaattgtgattttcttataactgcatccaaccccctaaaaactgagaagatagcatttcacaccctgtaaaaaaaaattaaatagtgcccccacagcaaattgtctagctctgtccctggttcctgcaagatgtaacctttagactaactattaagatcaagatcttgttgtagtctaattagtgcgttttgttttcttgtagcttgatggagtggatgacaacgttggtaagagcaagaaaattttgactaacatggcaaggaggatgagcaagaacaagtggattattgggtctattattgcagttcttgtcattgccatccttttgatcttgtacttcaagcttacatagtcaggaaactgatgtttgttgggttacgcttgcaagtgtttccaggaagtgttatttttttttcttgccttcaaatttctggggtcgttttgtaagtcttaagtttgtaattgagtgataacgtgtgcagcagtaatggaagtgcaagtacgtgtgttttaatatttcttctctattatactttgattttatcattattatcttcttggttatatattgttgatgacaaactgaatcgtgtttgctaacatgaaatttaaaactaaatgtaaaaaaattattaaaatttaaaatcacaccaaccaaattttattaacatattttttgtcaagaaaattcctttttatttgcgagaaagtctttcaataaaaaattgtgggttaattaaacactgaacattaaaacaaaaaaacaaaaatctcctgaaagaaatttgagagttgagccgttactgcctactggttgtttaagttttgtggatttttgtcactcttcatgattctcttcgcagctacgatgaggaaggcagttcccaaaaatatgaaagctatctttacagtgtgccaaactaggacacttgaaagtatcatcatcatctttgcaacttttcgatctgcaaaatataagatgttaatacgaggtataaatataattaataattcagaaaattcatattcataaaaataatgatgatacacgaattagaatatcaaataatt

SEQ ID NO: 2615 - DNA, 1408 bp, Cannabis sativa
catgaggttatggacttagaaataaggtaaatctcctttggaggatcaattttaatgggattttaccgattttttttaaattttttttatttaatttacaaatatggtgcctaaatataatttgataaaactcaattaagaagaacatgtaccaaatcgatgtattctttatgtttcacttagaaaagttataactcaaatatttttgtttgaggatatttagttatctcaaatattatataagttctttccctcaaaaaaaaagatattatataagttctcaaataattttaaattatttagattatcaaattagatttcaaacaacttgttaaaaacgaatacaaaaaacagaaaaaaaaaatgaactatataaaatttaactttaacactcaaaataattttgaatttaaaaaaatataccaaatatcctaaataactacattaaatattattacataaaaaaataataattaacctgtaacttctctatatatcaaaaacaaaagtaaagtgcatcccttttaggattaggattgcactaaagaattagccattattattttgctaaattgccctcaaaacctaaaacctatattttatttatatagtttaggatgcttttacaatgcacactttaaaaaaggtctactgttgtatctcttatctcttctattatttgagagaactttttagtccatttttttttatgatcgtttatgttgtagttatttaagacatgctgcaaattttgagagattcaaaaaaatttaacacgccaaaaataagtttcagaaaatttgttgcacacgagactcttttattttatacgcatgttaaataaccattatttaggggtgcacatatccaaaacccaaaacccgcccgaccaaaaacctaaaaaaacaggtttcaattatagtagaacgggttcaagtgtaacccggttctataccagcccgggttcaggtttaatatttttgaaaaataaaaatttgaaacccacctaaaacccggttagcatttttttatttttattttttatgtatatagattatataattatatgtcttttttttaattgtgaatttgtaggtgtgtgttaaattgttaatgtattaatttatgcaatgtttatatataataatataatatattgtataattgtatgattttgtacttatttttttattaaaaaatgatataaaaaaacctagcctaactcgaaattcgacccaacccacccgaacatgtcccaacttgaacatgatccacccaaacccgaaactcgaaaaacctggtctccatatggacgggttcggtcccaaaattccaaaatttgaaactcgtcaaaactcacccgatgtgcacccctactattataattttgctaaaatgccctcaaaac

SEQ ID NO: 2616 - DNA, 1618 bp, Cannabis sativa
taacaaagcaataacgtcaacttatatttaaaaataaccctattactacaggtttggttcgaaaaagataaaaattaaaccaaaccaatcagtcaacactcttatatttaaaagactatttagaacttgatcaaaacgttaaccattgcctagaggaatacatgcacacagtactttgaatgtttggattatgttttacattttaatatattcttatatagctgaagtcaggcatcaaattttggaatttgtctcattcttcactttctttttggacaatgttgtaactaagtacaaaaaaaaattgtactgttaaatgacacaactggttgagaacaaagaatcacccctatacttgtattatttattcagcagttaattttacttgcagccaatatgtaagacaatattctacttttttttttacaatgccagtagtagaagagttaaatttgatgtaaaatgttaaataaattggctcaataaaaggtggcccatatggagagtttggtgtaacaatatataaaagttaaattataatattattgtaattcatctagtagtagagatagatgcccccttgtacatttaagattcaaatcatatcacataaaatttttaataacaaagcaataacgtcaacttaattgatcacacatcttcatgattgttgacaagtacacaataggatgactatccactttggtgtttagaagaagcaatttttaattttattattattattgttgttattgttattattgttattattattattatttgacattaagggaaaacttcaagctagttggctgtttgaagaaatcactttctcacaaccaacaccacttttgataatgcccactattaaaaataccttctttcattgatggatctactaatactcttacataagaattcttatgcattacccttcgtcaattttattttattttttaaaaagaaattgtagagcagaaagtgtgcttttcacatgattatttcaattaaaatagagatgggggtatttttatctttagtgtgaaattgttgatcattattttattgatcttattctcaatcatgaaaacatgcttagaagctaactaaaacaaagtgagagaagaaagtaggaaagaatgtttgttttatccagcttgttattaggtgtaaatatgtatgcttatgtcttgttttggggtagttgaaaatgttggaatctagtaatctttcttcattactttcttccaatataattgaccctttttctggtatataataacaaatatgagacagaatcgggtaataggtgaaattgcatgtgatgtatggcctcgtatattactataagaatttagataaatgtcattgtgtttactattactagctcatatctttgatctaaacattactgtagtcctatctattacactatttactggcacaccattttatgagattgtgccaccctatatatttcaaccataactaacttgttgagatcatttactaaaatagtatgtaagatcactttagttgaagatgaatcataaataaccttcttgaagaacctgtatttatatgtatagaacctgtatttcaagtgggaagtataaaa

SEQ ID NO: 2617 - DNA, 1927 bp, Cannabis sativa
aaaaaaaaaaagaaaaaaaaggggcaagaaaagtgagtctctagtggctactagaagaagagaccgttttatttaatcttttactcttttcctttcttttacaaaatatccaaaaccctaccaaaaatatatcccaaacccaaatggctgcagctgcaccaccgccacctccggcgccggtaccgacgcctccgtcaaccgttccagaaggctccaccccattgggcttcccagtattcgcccgtatccgcctagcccaaccgaccgacgtcccccatatccacaaactgatccatcagatggccgtgtttgagcggctcactcacctcttctccgccactgaggcctctctctcctctactctcttcacctctccaccatttcagtccttcaccatcttcatcctcgaggtttcttcgcagcctttcgttgaggacattcttcacaataacaatcctctctatcaacccaaagtccaggtcgtcaatctggatcttccgatcgatgatccggaaagagtgaccttcagatcgaccggttcaagttccgatgtcgtcatcgctggattcgttctgttcttcccgaactactcgacgtttctggggaaaccagggttttacgtggaagatctgttcgttagggagtgttacaggaggaaaggattcggaaggatgttgctgagcgccgtggcgaagcaggcggtggaaatgggttacggaagagtggagtgggtggttctcgattggaatgtgaatgccattaagttctacgaggaaatgggagctaagattttgcaggaatggaggatttgcaggcttactggtgatgcccttcaagcttatggtaatggtcattagggttctactttgtaacttttatgcttgcttgtgtttttctctggtgaaatgggaaatcgctcttatggtctatgttattagagagctacaaattgaagattaatgccatggtttttagggcttcttcatgaattgtgttaatggttttgtaactttgtaccctttcagcttttgattctacattaactgagagatgaaccctttttaattcaaataaaaaactgttaatgaaacaaagttttctgaattgggtacctctgaggagtgtaatttacttgattttattattattactcaaaatatataagtatagatatatgaacaccaaccggttaaatctgtaactaaaacagattgagataagtgcactaatgtcaccaataaattatattcacattctaacgaacacaagaccatttctaaattcatggaaggaaagaggagtggcaaatcaacagtctaagtctagtacaacacatacaacaatagaatgactttgttcgaatttataatctctaaaagttcattaaatatttgtttaaaaccaagtcattattataatcgcattagtttcaaagcttctgagcatgctatgagtgccaaataacttaacaaattgtttctgaaaacaattctatttctttttcaaacggctaaaggaaaataccatgctaagaagagagaacttgttttatcaaaacaagtttgatccttacttaccatttcatcataaacctcggagaaccattaacataaaccctaaacatagtattgaagtaactcaaaaaacgtgataataacgtggtggaagggtgtttagaaagagattatagaaaaatatgggataacatgggaccagtttaggtgtaaaaagaaataggggttaacatgtggtttcattcacatatcatctttgatttcttttttgtttggagttttggggttgggtgaggggttccaatccaagcataaaagaacaaaacatactctgctcatggttggttagccacccatatggagcagtggagaaagaaatctactgaatcacggcaatagtttatttactacca

SEQ ID NO: 2618 - DNA, 4058 bp, Cannabis sativa
tctctctctctctctctccctgatctttgctaacagccagccagtcagcattcctttttcattttgattttttcactatttttcttgctacaagggtcacccttcttggggttactttccttattttggttttggtaagttaccttttttgtgggttttctttgaccaaagtttccctttcgtacctttcttgatatgctaaattccttttccaaatttctgtattctcaaattgggtttcttcccttttgttgttttcgtcagagagattcttataagtgggtatttgggctctctttcttcacttctgtacttgctcataaactaggtttgtgagtataattctctgtatatacccttttggttcattaatttttctcttttccttactgtgaatgtctttggctgttggagttgtttcatcaaattccaaaagtatgggttttgatgataaagacaatgatgcttctgaaacaaatatcgaagagacaaagggaaaaacagaaaagggtaaagaagaagatgatgaagaaactgtggatggatcatctgggatgagcagaacaatgagtgagagttccatttatgcaactgaggatgaagaagatgatgaaggaaagaaaattgaattgggtccccaattcacactcaaagaacaattggagaaagataaggtttgtatttattcttctttgattccattatctcttaatttatcttttcttttgaagaaattgttcttttgtctcttccattgtttcttcatggtgataatttgatgtttcaggatgatgagagtttaaggagatggaaggagcagcttcttgggactgtggacatggagaatgttggaggtaagcattttgagcggtcaaattcttgtttccttttgttcttaaattgctcaatttgtagcttttcccttcttgggaggtagaatctggaagttgaattatgctctacacttttaacatgttaggaataggaaagtgaagtaagactacaaattagtatagggagttcttgaatttctatattttgaatcagcatatagttattatatttcagctgtttcttggcattatcttcttcttcaaacaatgcagacattaaggttgtttctttatgtggaaaattccatttggtttcttcttctttcagctaggggacttagggaagtaagagtaaacaactttatctgtttccaatgaaacagttttgttctgtgtgtgcagaaactctggaaccagaagttaagatctcaagtcttgcaattaagtcccctggtagaccggacatttgtctcacaattcctgagaatgggaatcccaaaggctgttggtttactttaaaggaaggtagccgttatagcctgatgttcacttttcaggtcagcaataacattgtttcaggtctcaaatacacaaatacagtatggaaaactggggttagaggtagtctctctcactctctctcaatccctttttgaagctttgtcatattatgttattgataggtcttacaatccttaaatcccatgttttctttttgttaatcactgttgcagttgatagtacaaaggagatgcttggaacttatagtcctcagtctgaagcttacacccatgagatgcctgaagaaactactccatcaggcatatttgccagaggttcatactcagccagaagcaaggtctgtgtaccactgttctatgaaataatcttcatcagtttttgcgtattctgtagaaacttgaaaaataatgatatttcttacgaaaatttcttacaaaaatttctcttcttgatgttaattatcagtattttgtcacattaattgaatattttgatagttaattcaaaaaattaaattaggtaattaaagtatttagtaattaaatattgattataattaaaatatttttaattatattttataaattaaataaatatgatttattaccatatacaaaatattctaacaccatcattattttatttttaatattttgtggaaacttgaaaaataatgatatcttttataaaattttcttacaaaaatttccatacttattaattttcgtcccacattaattgtcggaatattttaaattaaaattgattactttaatatttgataattaaatgataaccatatttaaaatattcttaattaattatattttataaatcaaatcattaatttattaccgcatataaaatattctcacattatcatcattttttttttcatatcttgtggaaacttgaaaaataatgatatttcttacaaaaatttctcattcttgatgctgagaaaaaactatgatgactactaattgatatttgatattaatggtgttagttgtcacttgttttaaaatggtggtttagttaatgcatttcccacttgcagggtcaatatatgtactaaagcatactagaatcaatatattgccagacccatgtgcattatttaacaaacattcatttggaattcaaatttgagggccacccatgtctgggatcaaaactgtcaatttttgagttttaaattcactgtttttggtctaatatttttgtttttaacttatcgatttcgtttttaacagtttcttgacgatgacaacaaatgttacttggagatcaattacactttcgaaattcgaaaagattggcagtcttcttaaacttgtgtgtcactgctctatagtccattgttttgaagctgaaatctgattcagtgtatggtgtcttattttccactctctcttatttaaatcacattgtggctgaggctggtcagcaggagaatgaagattggatatggttaagaggataagacatttatttagaaagagaaggatgttcattttggtagctatttgttaataaacttgtctttttctttttccttttttctttttgggaccactattttgaatctggctagtatagtagttaagctttatccattttaaagtagaaaactgagagtggtaaagggccttgttctttattcctttcccaacggtcaatgaagcatgtcttagtattaattttttaaagagggtatctatgaattcatgcctttagttctttattttggtaaatttatattgtttctttcttaaaaatacttcacgcattacaaagccctttcactattgaaatttcactttccatttgccatggatgaatgaaactattattagctcaatcaactactattatcactgattaactggatgtgcacccgataaaaaaaacaataataataaaatcaaataaacataacttatgtaggtattacacctcttatgtttatttgattttattatggaaacaacatatgatttttttgttcactttattttattttattagcacattatgtaggtacttagttgataaatgtaatacctaaagtaacttagtcaattaaagtataacttatattgaaaaattgctattttctaagagtgcggtgaagtttaaatcgtatatttcagtgtaaacgatttatgtgataggattggttttacaaatgctctaaactaaaatctaataacgaaagcacttcacaatatagaatttgaatttgacaaaatggttataaaaagatcgggaaagaataatactaagaccatttctaatggtgctatttattttttatctaaattttagctaaaatagctaaaagttagaatagtcagtcatttatattattcttgctccaaccatgctccctatttagttagcatttgattattttaataatattaaaaaaaattagcatagagagctcctcatatttagattttagagagctccttattcattttttattatagagatttttttttttcatagttagagtttatttttttaaagaatcacttcctattttaggcagctaaagagtatgtttagagaacgtgattagagatgctctaatagtacaaaatttcgaaaaaaaaaatgataatcatatgaagggacataattgtaatataatgttctttttaaaacaaaattgtgagtttttttttttttttt

SEQ ID NO: 2619 - DNA, 2517 bp, Cannabis sativa
atttccagtcatattgttatatgcattgaagtgtttgagcgaaagataacacactaaagttcaagtctttggtgggagaaaaatgaaatcctagatggtgtggttctgttttacagtgtcaatgtttttgggttggagtttagatcactgtaatttctggcaaatttatggtaaactgggtacagtgaaacagatgtaaaggttacattaaaatgaagaaccattttttgtatggttgcaaattttagtcatctcgttacaaatttacttcacagctcagggacataaaggagagtttttttttttttttcaacttccgtttaaaactgtaagcattgttcttatattcacttttaacttgtttatcgttttatatagattattcctactcaaatgaagcgcatgcctgacgatggattagcgactgatagctcattatgcgaagatatcaccgttgatcctgttgtaagaggtgttattagagactgggatgcaatggaagatttgttgcaccatgttctgtatactggccttggatgggaaattggcaatgaagggcagatattatttacagatccgctttgtacccccaaggttagaatagtgttttcttgagattgtatgttgggcttgttattcaagtatttatgtcaactattcatgtgtagtgtactcttttagtcaccctgaaagataataacttaaatagaagagataactgtaaaacattctgaataataaatgaaacaaattgtttgtcaggcagtcagagaacagttggtgcaattgatgtttgaaacatttaacatatcaggcttctatgcttcagagcaagcagtattgtcattgtatgcagtgggacgaatttcgggttgcactgtggacattggtcatggaaagataggtatgtttctaggaacaatggatattagattttgttatttttacgggtacttgtgtttaaagaatcctgtagtttggtaagctgtatgttgtataattttagcaagttttttactatattgtttctcagttgattctttgactctttgtcatattttttttcacaactcttattcatgcaagttacaacctatatgcacaaatataaagtttgcattgtatcatgtagagcttttgaatattgcatgctatgctggtagccaacaaagatgtggtggacggtttattagtgatgatgattgtgttgcagaatatttctattaatttccaacgcaagagggatacctctaaccaagcatgtggtttggtcccacaaagttttggattcgagtccccttttcggtacctgcatagcaattattatagtggcccctaaatattgtagggttacgcagggagtctagtttcaatatacatatacatatacagtagtgatagtatagagtaatatgtttggtatatatgcgagttacgtttggaaacatgtttaaaaactgttttttctaggaagttgggtcttgaaagttgaaatttaatgtaatctgtctgataggtcctaaatggaaatcagaaactagcaattttttataagaaaaatcagaaactagcatttcaaaataaagaatgtgatttggatgaaagtagctgtattatacaatatgaaactgagtaatttcaaagggagaactagaaaggttctctgttattgcggaacctagtgatcttttagcaacaatgccaagactacctaagtagatcctaaatctccccaccacccctctgagcattcgtcagccgttgaaccttctgaactcctcaaccccaaggctaaccaattcctcaatatccaaccagctgtccttgttaacaaacaagatcaaaacttaataagttaaagttggaaagacttttaacagttgcattctaatgtatatcaaaccaattttctgttttttttttatttttttttatctattacactttctctgtgatctatttattgttaaattgatccaatgaagttacaatgcagatgatgttggaaagagttttaacagtttcttatgtatatcaaaccattttgttaactattactctttttctgtaatctatttattgttaaattgatccaatgaacgatgcagatgatgtttgtaacattttagaataatatgtctaattgtaccatttcattcttttgtgtcttattctccagatattgcaccagtaattgaaggtgctgtgcatcatattgcctccaaaaggtttgaaataggaggaacggatttgacaaagttacttgctcaagaactagggaaatccaatccaggtgttaacatcagcatgtctgatattgagaagattaaggaacaatactcatgctgtgctgaagacgaacttgcatacgagaagactggaaagtcatgtcaaacagagcaacatacccttcctgatggacaggtctgtgtttgagcaaatccaaatgacctgcttctttacctttattatatattttctttcaggttttcatttctcagtttcctctttttcacc

SEQ ID NO: 2620 - DNA, 2784 bp, Cannabis sativa
aaatattttttaaaataaaatattgtttaataaatttgtcaatattatataaattttaaaaaaatataatagagtctaaatattttaatatttagagtcagagtaaagttgtagaaaagggtaacatgatatgatggtgatttcaagttagtaaacattttagaattctgttaaaacactggagttagatatatagaataatagatagagggaattggtgcttcttctatgtccatgttgagataagcgtaaaattggtataagttggtcatgaattttagaaacaaaagagataagtagctcttttacatactcactcattagtcattagtgattttcaataatgaggaaaccaaagaataatgagagttgagaatgagattgaggtccaccgtgaacctcacctcatctgattgattcttgactcgttaagcttacgggatgatgattcaccacaatcaacaggaaatcacatcaacggccaagattgcaaagaagggggtaggtatggtatgagtgggccccacaataccaacccccagccagcccaactgtttggatttggatgatgagggagggtaaggtaagagagtgacttttttcctgttttaattaattaattaatctttttccattaattttcttctaccaacgccaccaacaaccgagggagattaattattaatacgagcgaagtaataataatctttataaggcaaagggaaaggcaaacatcttcatttaccaaagataagctataaataaataaagccattctcttccctcccaacaatctcctctcttcatattctttctttctttcttctggaactgcaactatagaaccagaaggaaggaaggaaggaagaagatgaaggtcatagacaagatccggtgtgaggctaacaatgacaacgtcgtcttctccttcgagttcttcccacccaagacggaggaaggagtcgagaacctcttcgagaggatggagaggatggtagctcacaacccagccttctgcgacatcacttggggcgctggaggctccaccgccgatctcactctcgacatcgctaaccgaatgcagaacacagtctgcgtcgagagcatgatgcatctcacttgcaccaacatgccactggacaagatcgaccacgctctctccactatcaagtccaacggcctccagaacgtcctcgctctccgcggcgaccctcctcacggccaggacaagtttgtccaaatccaaggtggcttcgcatgtgctcttgatctcgtatgccctctcctcatctcccttatctctattctcttctcaattgtttcattttcccagatccattatatttatgtaaatatacatatctttcttcctccttcaggtcaagcatatccgggctaagtacggtgactacttcggcatcaccgtcgccggctatccagaggctcatccggacgcaatcggccccgacggcctcgcctcacctgaagcataccaggtcgatcttgcttatttgaagagtaaggtcgatgctggagctgatttaatagtcactcaactattctacgacactgacattttcctcaagttcgtcaatgactgtcgccaaattgggattaattgtcccattgttcccggaattatgcctatcaataactacaaaggcttcatacgcatgaccggattttgcaaaacaagggtatgatattgatacctgctattagcctattagaattgaattcttcttttaagtgttaaattaaggaaatgccattgtttcatgatagattccatctgaggtcaccgctgccctggagcctattaaggacaatgatgaagctgtgagagcgtatggaattcaccttggaactgaaatgtgcaagaagattttaggcagtggcataaaaacattgcacctttacactcttaacatggagaaatcagcattggccatactaacggttaattaattttctcatttcttataaccatcaatatcatagaatccagattgtttattaatactcttagaatcctaacctggcagaatcttgggttgattgaagaacgtaaaatatccagaccccttccttggagacgtcctgctaatgttttccgagtcaaagaagatgtccgtcccatattctggtatgcaattctatcaaactttccattttggccataagaggtcagtcgtcagatattgaaacgtgtttttctttgtctccaataatttcagggcaaaccgcccaaagagctacatatcaaggactactggctgggaccagtacccacaaggacgatggggagattctcgcaatcctgcatatggggctttaactgattatcaggtaactctttcttatcttagtactacaaatattaattgcttgtttcattcagatttcagatagatatattgattttctctttagaattgttttctgtaagcagtatcacaacaagtatgttcctaacttcaatcttaacataaaacgtaaagtattataaataaatgataaatataatataatataaacatacatattttcacttgactatagtatatatacaattctttttatagactgattacatttttgaagttatttttatttataactaattcaagttgggactaattttcttttagtattcttataaagattttactgatatttgatttgtatatatagtttaatttatcttgtaattttttacggcttcaacattggatctagatcctcgaccttattttaagaatacatttaaatttcaaatgtatt

SEQ ID NO: 2621 - DNA, 959 bp, Cannabis sativa
tttattatttggtttggttttaaaaacattgtaatatttgtatatatgaatatgaataatgattacaactctacacctacataaataccgttacaccaaaatattataactttattttataccattccattatccaaataatttaaagaaaaataatgcacattgtgattgtgagtgtgaggattgtctaatctaactcagtaggttgttataacggtcctattttctgacttactaggaagactaaataactttttacttattgagccaataaacaattttttattttttttgggacacatgattcaataccataaaatttttggttgggattgcagtctgtcgaaaccaacaaataataaattaaaaaaataggattttagaccctagaaatggcactaaagaatcaagattgcacatgggagattttaattttactaggccatttaagagcttgaccaaacaagtcacagtgttgtgaatgtgatagtcaattacgtaggttttaggcatccaaagaaaaaagtagacaagacaagacaagacaagactagatttttaagagagaaagaaaaaagaaaagggggttgagaaacttatatgatgatgagaatcttatgcactaaattgaaaaaaaaaaggactacttttaggcctaacttctagcaacaacggcagttgctgatgatgtgtgtaagaaagaataaaatcacatgatgaaattttacttttaactattaaaaaagtttggttgtgatgtcggaagcatacttggaaatttctttttcgggggattgttggagttgtttgatgattggtaatagctcggatgatcggaggaactgcctgcagggtgagtgtgcacacattttcgatagtgcgataagagctacctttagtggtgactcgtttagagaaccgggaccagggattggccttggcgctactgctgatgatga

SEQ ID NO: 2622 - DNA, 1264 bp, Cannabis sativa
tagggtcattttccatcttgacccataatttattttagggactttttcatttttacacttcaaaatagttttttttcttgcatttttacagaattctacataaaaacccctattgcaactagtgctacaacctaaattacaacaaaaaatcgtacaaaaacccttattgtaactacccaaaccgtaaatttgaaaaaaaggttaaaaaaaatagtatacgggtaatttccttcattttattttctaagtttatgctaaacacgtgtgacctcttcaactagttccagtttaaagcccggttcctaaaccctagtaactctttcccagtctccactttcaactcaacctttgtactttgccttctccctctctctttctctctttcgttccaccgtaccaatctggcgatggcttccttagatgaagaaacctccaagaaagtacttcgacaggttcactactcttctccctttccactgcctctgtttcattctcttttttgtttcaatggttcttcaatcaattttaatattacttgttttctcgaattttattacatacaggtcgagttctactttggtgatagcaatcttcctagagataattttctcaaaaataccattagcgaaagcgaagatggaagtatccttttcctgtgtgtgtgtgtgtgtttgtttgagctttatttacacatccattaaaagttctgatttttatcattaagtttttttctttttatttgtgtcaagtaaaggatttcgtttttgagatttgggactttggttaagattgaaggtattatttttatttgtgtactactggttgttcttgactgagatatagtggttagtctggcattgatatgctcgtttacccgaatgagaacacatctcgatttgggggatgtgaagccagacaatgtggctgaagatatagtgaaggctgtggccgaaactcttagaatgtccactttcctaaagatctctgaagatggtgagtttttattgatatattatgagcttggtttaatttaactttgtctttagtttgaaacttttaagttgcttgtattttagtttaagttgtattacaaatttgttgcatttgcaaatcattatgtatgtggtgcctttgttttgatttgtggggaactatcctttttttttggtttgtttgtttagttttcctggtgctttatgtgtttcaggcaaaaaagttggtaggactaatgaactggtgaaaccagaggagttaatagagcaat

SEQ ID NO: 2623 - DNA, 1322 bp, Cannabis sativa
caactcctttcaccccactctctgaattctgaaaatggttaccaactgcaaatctcaaatactaaaaattttatctgacttgatcagagccttatggcctctatttccctcatggcaaatgggcacattctgagaagagaataacagttaaagaaactcataaaccattttaattttctcacaactgcgtccatgcaaatgcaacagggctcctgacttggtgctcagcgttgctccacatgattgaaccaaaagcagaccttccagaagaggctgcacctcttgctgccacaaaggtcacagtgtaacgaagcttctgcccaactgttttaaacacaagcttggttggcttaacagacacgttcaccattggaggtgcatcaacagttaagctatatacagacccagcagctccaacattggtcaattgacgagtgtagcgaacgacacgtttgtttccaaaaatgacagagaacgaagggtagtttagagctcccgggtcagaccactttttagaacaagtgacattgcggtgcttggcaatggattggacatgatcaagggtgtagtccaaggagcacaagaactggatgtactgttgggttgagatgtcataaactagaccaggtgagatggctttctgtgggtcgacatggccagccccatgagcccatgggttggaagcggcacctccttctgcatcccgaataggggatttggtgttatctattacatatgcagttgtcatcagggcagatttgattgcactgggactccaatctggatgagctgctttaagaagagcagctagaccactgatatgtgggcaagacatggatgtgcctgcattgggattcaatgataattagaaattaaaattcatgatctttttcaaatattgagttaataagaacatgtgagtacattttagttcatatcttcttttcttcttccatgttcattaaaaaaaaaaacttgttcatcaacccattgtctaattacagtcaaataatgaattcttgtgcaaaaaagttttgtccggatttcataatgatccgaccggactaattacagtcaaacactacatttggtagaagttgagcctgtgtagaaggtaaaatcttatcaaacaaattttactaatatgctaaaagtataatatattgattttatttaccaaaaaagaaataatatattgattttataataataattctgttaaactcttatgtacacaagcttgaagggttagtcgctattttacatatgttactaatgctcattataatcccttctcaactagagttgagacaaaagagtgc

SEQ ID NO: 2624 - DNA, 714 bp, Cannabis sativa
actaattatgaagacccatctgtaaattaaaagaaatggaattaaaataagaaacggtgaaactcacatgtatcggttacccttggcattgagatcgaggacctggacaacgatgtccggcatctcggaggaggtgtccggcgaagggttggcgagtatagttgaaatcgcatctggggtgggtgctttcacggccattgtttgtagcttaagtgtctctctcgctctatctctctggaagaagaagaagagtgaagaatttgagagtggagagaaagagaagagaagggttttgtatagggtggggagtgggggattgaataggcgggaattttgatttcctcaaaatgaagcctttttttcccgcaatctctcttttctaccttaacaatgaacatgtttgtttattaatttgataactttggcgccaaactgtgaaatgttaaaatggtttcgctctcttttatttttgttttgttttgtgtaccgccaattgtaaatgcactccgtggttggtctgcaattacatttatgcccttcctcggttttcgattttccttcgtgctgatttctacatgagtaattacacaatggaaatttatttctgaatacccatttctatcggttttttgttatcttcttgtagcaattaaattattttctaatatcactttctaaaactcaatataataaattaatgaaattcataataat

SEQ ID NO: 2625 - DNA, 1186 bp, Cannabis sativa
acaagatcaataagtttaggagcccattttgttggtctatcatgaaattggatactccacgattctaatccgattccaatttggttaagggtgtaatgtgagacagttgcgcgagtaatctagacacgggtgttgctgtgcttgcttctattccctatttgctgttcgggaagctggcataaactccaactttttttttttaattttcaaactattggctctttgtttcaagtaaaatgaccaatacactgcgttggtaatattacagtataaaatagtcaatgagacacacggacactataattgcaaatatcaaatctgtgatattattttattcatgccattttcaacaaagacagttaaccaagaaggatggtatctgtacatgtcaatattttatatcactttgtaacgacaggactaataagcatcagcagctaaaatgtcttgtcgaacaactcatgaccacatatattagaaaacaaaactgttttacaatatctatctccaggacattcattcccatataaaaataattgaacaaggcaagggacagagattgcaagtagggctttcgtttcacttcaccctcaactaggagtactcgggcctttttctcgataggttgcctctaaacattccttagccctatgaacctttgactgaatgtaaaaacttccatttgtggcattcctctcaaatagggcatcgtatttctgaataggtagaaaaaagatacacaattaagtaaaggtttttaaacatgagcaaaaaccgatagaaaagcagacatattctaattgaattgtactcaccttcataacttcctcccaagcagtttcctcagtgacgccaagaatctgcctagcttcttgctctgtcatggccttgcttcctctgcgaatggtattttgcaatgtttcttgagcaacaccagattttgaggcatctagaaacatatatagaataaatgtaaagaacatacataaacaagtatattaataataggaattagcatgttgtggcagtaataacgcaacataccaacacagattgctacgagttatgagctctaaaagtcttaaaagacagcaaacaaaagcacacttgcatgatgaaattattaacagtcgacgaaccaaaaggcaaaacttgtacaaagaaactcattcacaaaatctctttg

SEQ ID NO: 2626 - DNA, 1432 bp, Cannabis sativa
tctcgggtctgagtctcaggtcctaagtctgtgtctgagttcgcgtctgggtttgggtccgtgctcgggttcgggaccgcgtccaagtcctgatcttgggttcaggttttggtctgggttggagattggggttgaccccgaatcctttgtaaatattataatacaagttaatacgaaccatttattatgtatcaaataatacaacttacattgtattaaaaattttagttgtaataattactacaattcattgttttatccatacatagtattatttattatttaatacaataagattcttatacgctctatcaaacgagtccataatgttattaaaagtgtattatttcatgaaaaaaactactatctggtacactacaactaaacttttgctaataaactatatgattgatgtaatttttcaattgattaatttaagaaaatcataaaagaaaagattaaaaacatgaataaataaattttaaaaacttccacatagtcattgtcactaatctctgttaatacttacaagtatttctctaaagtttcagttctcaaagaatgtgtatgttcacatgagaccaacctatttatagagagctagccaaactaccattcctagaaaattagaagatttgttacttaaattgcctatttaaactaaaagtggagaatcaaataaatatccaaattaattatgatattattgcacatctcgaaaccattgaagtagtattttttgagcaagtttactaagtcatgttgtccgagctaatctcttagctttatgagacgtgttctccaatcgtgccttcagctcgatgatgcaaggcgttcgagcccaatcttacttgatgatgcatagtgtcctagctcactttggcttaaagtcatgttgcgttcgcgcaaatttaggctcaatgacaagtaatgtccgagcccttttaggtttgttggcctaatcgagcatatttaggtttgttgacatgtactattcaaagcctatttaggctcgatgacaagtaatgtcgagcctgtttaggcttgttgacatgtactaagcgagcatgtttaggtttgttgacatttactatccaaaccctatttaggctcgctgagtatatgaaaaacgagttacccgagcaatacttatgcttggtagttggtacattcttgacattatagcagagccaacaattattctacatcacataaattctttcttcttttctaagaaccccctttaaaaaaataattttgaattttgaatttattaaaatggtaattttgagattaattacataataatagcatattgccaaccaatatagatacgtatgatgtccacatcaaagtgaacaacttgggctcaggtcttagtccaatccattaaaagttttaatatcacacatatttaatcaatgtattttta

SEQ ID NO: 2627 - DNA, 878 bp, Cannabis sativa
attatttttaaaaaaaattatcaacaactaatatttaatgaatatctcaaaattcaaaaacatctcaacctttttttttcttctttaaaaaagagtaacactataattattagtagtagcactaacaaaaggaataataatagttctaattcttatacgaaaagtactatagagatccacagtgtgtttctactttttttttttttttgaacgtgtcctatttttatttatggagttttctcaatatttttgtgtgtttctagtgttattatttgattttaattttgaggttattatttgttattgtttatttctttattgttctaggattgtatgtttatgttgatcaatatgttatctttaggggtaagatggttgaatgcggttaattgtccttaaaagaattatggaagaaatattaaaggttttcttaaaatatataattgcttcataaagaagtagcaaaggttttacttatgtactttcaatgtttgttagttgtttggattatgttttattgttttgtttttactattaagatgtttttgtttagttattatcgcttacaacttttagaggttttgtgatgttatgttattttatctttctattttgtgaacattatttaggtcactttggttttccatattttaaactctgtttattttttagtctcatatacttttaaattatttttattctatataaaagtaaattttaattttttttttccatatttatgaaaaattgccccccccccccaaaaaaaaatcttttgtgcaaatttaatatttatagtgtaaatcccccacaatataattagagtactaaataataataatctagggtttaaatataaaataattaacatttttgtc

SEQ ID NO: 2628 - DNA, 1087 bp, Cannabis sativa
tgtctccttgcaagctactactacattggtatcagattctattatcaacaggtcaatagaaactgatgaaaataaagaaaataacttcctaaatatgcaaagcaaaaggcagttagaggctatgtcaatgtggaagacaattaaaaaatgtaggggtctcaaaacttcttcacacacttcatttttatcaaatgaggatgggttaaactataatgttttcgagtcagctgtagactctttttgttctattgacaacacagtggtggctgagttctcgccccgctaccagccatgaaaatagtcagttggaatacacatgggtttggtgatccaagtgcattctatcatcttcgattgcttgtcaaaaagcaatctcaacaagtactttttataatggaaactaaattatgacctaatgtaattgcttagtttcgtcaagctttaaattttaacaatggacttgaagtccctagaataggtttaggtggttgtttacttttattatggaaagataatgtagatgtaacacttctcaattttaatgtaaacatctttgattgttatatggcatgttataatggtccaacttggcatattactgcatcctatggtgctcctaaaactcaaaattgaaaatacttttggactctcctagaaagggtgaaagatgttgcaccattattgccttggctggttattggtgatttcaacaaaatatggtcaaaccaaaacaaacttggtggacatttgcaaagtgaagctcaaatggatgatttttgaaaggtattaaattgcttccaacttaatgaacaaccatacgagggtgatccatacacttagattaaacgtcaacacaagatagataccgtcaaagaaagacttgattggtacttcataagatgataattggagctctttgtttcagaaaattataataattcacttagattatttttgatcagatcatggagccataactattttagttttaccattacaattgctgcagcaacagccacagagatgctctcatttcagatttaaaaagcgttggttgaaagatgaagaggccatggagataattcta

SEQ ID NO: 2629 - DNA, 908 bp, Cannabis sativa
taataattaaaattaattatcaatgtaattgtgaataatcacaattaccttccactgttttgacatcagtgtaattgtgaataactatatgttctggatttaatagattttgtcacataaaaccataaacatgaaaactacatgtatacataaataaaaactaatcatttattgataacaaatcagattaaatggaaattggttttatttagggcataaaatcctaacacccaggggtccccacgactggcgaggtggttcctcccaaaaagcacaagaaaaacactacccaccaaaagaagctcttgtcaaaacctattcatcttgaggtttctgatgacgagacccaagaacaagtccctcccacagttgctcctaacaccaatgctcctcctcccaagacggctcatgcctctacttcctcgagttgggtcattgagaccttattggctgtcgcaggggaggctagatctaaatacgccgaggcgtacggggttacttgctggtgtaagcttcaggctcttctttctccttattgggatttactcaacctcaggagtccagaagtaatgctttcacaaagcttggactacaaccttatggtacgttggccttattattatgatttattttttctctcacttctcttattcatatgcttatagttctccaggcttctttcatctcgttttcttctaactgtcgactttcgtagcgactcaaatacttcgagggcgaggtctaaatattatcatcccaatgcggggttgtgactaagcaacgggataatgcccagcaagaaattgcctgcctcaaacaagaagtcaaaaaggcaagggaagaagccaagaagaaggaataggaggaaggcgagaagaccattcaggcccaagctgatgaatttaaga

SEQ ID NO: 2630 - DNA, 928 bp, Cannabis sativa
actttcagggcaagaaaggagaaattcgacctccgaagctcaagacagaagaccctaacaaatcgtatgtccaaaggccagtaaagaaaggttaggttaattgatatggtgaatcagaaaagaaaggtgtagatgtagagagaaatctgtatctgactgtcttaaacatgtttttaacatattctatttggatttgagtgagacatgataaggtggatgtctctgtgtagcttattgaaaccaaactccatgtcagcaaatttagattatatttactaaaatttatatactttcagtttgtaagttaagttgacaaaacaggtaaaaggggatataacattttagcagcacattgtttgttcagcaaccaattcagtgtttatttatttgtttttgaaaggagagatcttcattcaaaaacacacaggaaaagataagtcacctaattttcatgactagctacaaggggggaagatccccatttcagctttcctaggcataaatcattgctcctcacatgctgctgtacatagttggaagcaaaaaaagacttagctaatctattacaatgaaaagtatagttcttaatctcccatcgagtcacatctccaagttggtcctctcctaaccgccatctcaagggccgagagacacgcctcagcctccaattagagggtctgggaatgggaccaacttggctttaggccaaagtagttgtccctggtggtctatcccaacaacactacccattatcaacccctactgccacatcacaatccattggaggcaaggactaaccatcagagcacatttcacaaagcaagcattaacagaattaacaaaatcaacaaacttgttagttttatagttattgattaaatcatttctagcatactaaatgtatcaacaactatagagacatagagga

SEQ ID NO: 2631 - DNA, 1711 bp, Cannabis sativa
tatcattacatgttacacttcgtattatcattgcaacactactgaggctcataaaaaattaaccaaaagacatagtgtcgatccataatctccaaaatactgataatacatatattattatttgctgcagctttagacaaatcctatatgttcacgaaatgggaacaatgacattaaaaatattcatgttgggtatctctgtttgacttgtgattgtaacttgaaccagtcaaaattctgtgcttaatttgaataagttattacatatagttaaattacttgttccacccacatggtcagaaccttttcatctcaacaaccaaattaataaataagcaagaggaatcttggatcatgcacgcgagttagttaatcttttttcgaccgcccggccgttttcggcttaattaatcttaattacgtttcttaattattaattaacaacaaatgttttaggaccacaggctaacatcgtatagtttatataactaagcaaaaaatgagacatgaaaggctgttattttgttcttcgatcttgttgttgttccgtgagaggtgtcatgtagcagtggagtctttgatttcttgccttgctagcccccactacagaaatctcttgaaaaaaaaaaaaatcagcaaaagtaaaaacaaagcgaaacaaataataaaatagaaaaagaaaatcagttcgtgaaaactgaaacagaagtagtgtatattgctcagttttcatttcttttttcatgagtaattctccgacaaagttggtgattctacacgagtaacatatctttctttttacaccaagatcttttgcttctcttaactacaacctaagctagctagtttccattctatgtaaaacattataatatgttgtaatccacgtaagctggtacattgctatataaatatatatgaagttataattaaattttttctgcatttatataaaagatcgttaatttttgagtctatacaagagaacacacacatatttttattttattttttaatagagggagatcccataaatcatggatgtttagtttgttagaatttggaataatgtgaatgaggtttcaatcaattgataatcgaaagagtgactcattcatcttatacattctattgtatttctacacattaacattgtgagactctctaacacatccttctcaagatggaattattttatttactcatcatatcttctctttttcggctcactatccttgatcataattggttcttttgttttatttttggattaattagtatttttggtggctctgtttatgttttgactcactatcctcaaattataagtgtcttttttttgactttggctcttgaatcagtttattttaaatttttggtgattttttttttactctacttcgatcggctttatatatatatattcttatttttgtttttatttttatttttttgctcacataccatattagaatttggagtaaggttaatgaagtttcatctccaaattaattggcaatgaaaagagtagtccatttattttaaattaattaattatattgccaaaatatgagtcctgcatatcattaagatcacttgaaaagtcaaaattcctaattatgtctactaaataatttggatgtgttagagatcaagtgattgaacttaacaatccaccaaataattaaactaattgaaggtaaactaattc

SEQ ID NO: 2632 - DNA, 2452 bp, Cannabis sativa
aaaaaaaaaaaaaaaagctaaagctaaggcctcacctgctgctcaggaagtaaatgattttgtctgagagatggatcaaatagagaactacttctgtaagtatggattgcttaagtcgtacactaccgaagctggactactcaacattctaggattaatgtggcataggatggccactattgaggaatctgtgtctgtgagcacaacaggtttcagtgccaggagctagtcacacattcagagcattgcacacctcctgcttaggacttacttcatggagctcatttcctgcatcgggcttgcctcatttcaattaatacctctgtcttataagctcttggtcaaatggtatattttctggaagattaataaattcgaggtgccttcccttgaagagatattattcttctacaaagtgaaggctcagtcgatgaggactagctgtaaaaaggtaggtctttacaagttagaaaaatattcacgcctattgtcccaccattcataccaagaactcccacgtcttgagggagtattggttcttctcctctgtcttctcggtgaagagggtacccactctctagcttgacttccaacttccaagtaagaacttttattctttctttcttatctattttcctttttgcactttctcttggtttggtcggcatgctgatcatacttcattatttttattagctgaaccagtgccttagagcaccgagactgaggaattgaccaaaaaggtggcccagtacaaagctttcacggaggaccagctaaaagttgagggcttagtgaccatatcccttctccatgagcatgggcttattactgaattcgaaagcattgacaatttaactaataggggtcaaagcaaggatcctaaggaaattaaggaggagatcacccatgatttggccaagatcctcacagaggtggctaaagaagaccaagccttggaagcttgctagttacttcgccatctttaccctttgaatgaagttatggaaattcgggagaggcacgaagtagtgtactcaaacaagggtgccttgggagcgagcacttgtgaaagaggtgacagacccctctggattcttcatgccccgagtcttccccaggaaggatgtgtctgtgaccccaaagttcatgacccctctgccaccctctgatagggaagctaaaaaggtcaaggcgagtcaaattaggcaggtatctttgggaggggacagtgatctatggagagctaatgtcccaacaccaccaaattttccagccacagtcacaatccgtcaacaacaataagttcacaacaaacaagaaaaaattcttcaacaacaataacaatagtagtagcaacaaagacaacaacaacagtaacaacattagcaataacaacaactccaacaacaacaacaacaacaacaacaacaacaacagtaactcaaactccaacaacaataataattgcaacaccaacaacaattacaataataataacgacaaaaacacctacaacaacctcattggggagccattaccccgtcgaggaggcgaaaacccacttcttgctagcaataggggctagtcatttctctccccaaaatcccatcgcttggcttcaagatccccctaaagccttcttgctccgaccacgccaccataaatacaatgggggaggttgaaggcatcctgaagtggaggcacaagaaagagaagagcattctccaaaagagggcctacagtctctctaccgtgaagagggcagagatttttgaaggccttcatgccactgtaccgactgggtcgagaattgagacttaggccgtggggaaacggttggtacccagagttagaagggaagtgggcccctttgctactgagctcttagatcaagtggttggtagtgcgtccgagttttcctctaaaaagtgggtagcttgcagtagtggtgatgcattttccttagcccatgctactaagcaataggcgctgggggtaagtttcatctttttcactttcgtttctgtcattgtatactatttttctcacgtttttattgtgtcagatggtgctgatggctgagaggaccacgcaagaggttggcaatttaactgtagagcttgagcaggcccatgctaaattgaatggatgtacaccgagaatagaggtttgttcactaggctcaaagaagccaaggttaaggcccttattgcggcaaatgatgccaagaaggaagcagaggagaagctgaagcaagtcttggctgactgtgaggcagagattaagcgtagagataatgtggctagcgataagcattggaagttgttcaagttcacaaggacaaagctgaacgtgacatctatagcaaggtaggccaacttgaatctcgtgtgtcttctcttgagaaatatcttgccaagtgacaacggagaggggaaacaaggagaat

SEQ ID NO: 2633 - DNA, 2090 bp, Cannabis sativa
aagtaacaaggtcaatagcaaaaattttagatttctaaaactgtctatcccttctccgctctccagggaaaatagaataagggaaagggttatgtttcttgtactgttaagaaacaagaaacaagtctaggaagtggagaacattttacctgcatatagatgaagataagttaagccatgagcaacatcaatggcaatttcaagtcgttgattgaaatcaagtattctccctcgttgacctgccagtagtaacagcaaataattagcgcaacttgtattatctacactaatttattaaaattttcttatgcttatataaaagtaaacttaccatccaaatgttctctgagagtaccatttggcacatactctgttataataaggcgctcatttccttggtcaacataaccaagtaactttactaaatttcggtgatcaatttttgccagaagctgaacttcactgctgaactcagtgctgagattttcatattgttcctgcaacaattttacatgaaatagtcaattacacaagaatccatggcttttattgtttcaatttaaaccccaattagcagaatttatcaacgagaaatcaatgtgaagcaaatctgaagttatcccgtttaatagaatcatctcaaatttttaaagttgattaaaaaagcaatttatttcgagtatttggacaataatcatcactttcagtcaattaataaaatctctggtatctttgacatgaactcctattaaatgccctttggattgcagaacaggttatgaatttttttatagagataagaaatactgcccacaatttattaaataacaaaattgtcacaaagcaaataagtcctctgatgccataatcttatttaaattttagttggtggcaatccataaggatcacaattcttatgttctttgatatgttgcttattttcatataatatttcacaatcaccaaccaaaaacctgttataattcttccctcacataaattctaataggtttgaattctaacttgcaagttttagcattctttgaaatatcgtcactctaattttattaggaggaaatttgtataccccctttccccctctaagtatatttttggtttttcatctttgttcgagttaggtacacacctcattgctcattagcatgataaaacttatttgaattcctttgcaaagtctactctaataagcgcacctataaaacatgaggagactattttattaagtatgttggtgatcatatgactatccttaccttctttcctcgcttaatagcaactatatgaccattatctaggtgggctttgtagaccgttccaaaccctccttcgcctatttgaagagatggtgagaaattacgggttgctctggccacctgactcatgttgagatgtaatgatccaagcctactgacttgtggagaaaatctaggactaggaggaacacgatatggactggccgggattttttcaccagaagaacttacttcaaaagaggaaacggaatccactgcaggaacataatcaatttttaaacaatttaagaaagtgatcatactatgaaaccgaggcagcaaaagttcaacagaagtgttgatctcattacgaagtgtacattaaaaaatacagctacttatataggacaaaagtaacacaaagttattaacttttcaaacaacataatggcgagatacaatatataagacagactcacttgtataatgatgatcgttggtaagtgcattcgaggaattttcttttcttttcttgtaaaagcaaggacatagaagaacacaacaggctaaaacagatcctgctgctactaacccaattttgcttttagttgacccatgcttggaatcatttttttgttctccatctaagtttttctgttcatggatagtggattcgtgttttgaatccttttgcaagagtttcctagctttcttagaaataaaatcatctgcagaagcatatcaaaatgggaaaatattattgaaaaataagtcctttcataactcatgataatgaaataatgcatcatactagaccatacctgttgaaacatccaa

SEQ ID NO: 2634 - DNA, 2004 bp, Cannabis sativa
ctttttttgcatccatgagtaggactcacaatcatacatttctactagagaaaaacctactcagtactagtacttttgtccactaaaacagagccaaatacaagacccttgatagcaaaacccttgctcaaacataacattttgcatttctctatctctcttgtagagaatcctttgtactgcttttccaattttgagagtactggtatgttgagccttaacattgatataaaacaaggatgtggggaatcatattattttattaggctagcttttcacaaaactttccatatagcattaaaaattatagagcaaaatatctttaaaatgaaaaaaatttcactcggaggtgattccaggtggcctatatttagacactgaaatttgtttgtccaattagtataatgaaatatattgaatctgtagtgcgtgacgatatcattccctcttcccatgagatgacaaataacattgggaacgctttcctgtcaacaatagaaaagacaaatactccttaagatggttccaaattttaatttctctatttccaaagcccctcgttgtgtatatactcattatttgtagcccttatttgcaaaacaattttttaattaagagagagagagagagtgtgtgcttataagattccaatttttgttcactcatcctcccaatgaacggccttggcttttctttcatcatacctctcaaacttatgctactccctccttcttcccttttctctctactaaaaatatagctcactcaaaatctctctccttctctttcacccccgttaaatatttcttttttccccctcacgacctcatagcttcttttatctatttttttaaagaaaattgtagcaccagaaaaaagaaaaacaagactaaaaacaaaagtaggaggaaaaaaaaatacataagagtattgccattaaatgcaataatggctattgattgtataagtaccatgactaccacaagcaaatcatccatgcctcgtcatgtttcgaaaatagatgagcaacacgacgatcatacgaagcagctagtttttgatgcttcggtacttcgaaaccagtcgagcatacccacccaattcatatggccagacgaggagaagccctgtgccaatgctccagagctccatgtaccgctcataaacttggggagctttttgtctggggacccggcagcagcaatggaggcctcgcgccttgttggcgaggcttgtgaaaagcatggattcttcctggttgtcaatcatggcgtcgattccaagctcgtttctgatgctcaccgctacatgaatgaattcttccaattgccactccagaaaaagcagagagcacagaggaaactaggggaacactgtggctactccagcagtttcaccggtcgtttctcttcgaaactcccatggaaagaaacgctttcttttcactactccgctaacaaaaactccaacaacatcgtccaagactatctccgaaacaaaatgggagaagagttcgaacaattggggtacgactaggaaaaacacaaaacaaacactgctactctgtttttcatatttatttgttatgtttagaaactcatctgttatgtttactttgttttaatcaggaaggtgtaccaggattactgcgatgccatgagtaagctttctcttggaatcatggaacttctgggaataagccttggtgtaggcaaagctcatttcaaggaatttttcgaagataacgattctataatgagactcaattactaccctccatgccgaaaacccgatcttacattaggaaccggacctcattgtgatccaacatctctaaccattctccaccaagaccaagtgggaggactccaagtattcgtggacgacgaatggcatatcattgctccaaatttcaacgcctttgttgttaacatcggtgacaccttcacggtaactaaatatctaacttacttctttttaaacatgtagtaatgtatttttatt

SEQ ID NO: 2635 - DNA, 1816 bp, Cannabis sativa
aaaattataaattttccatatttagtataaagtaagaaaaaatttgtcccacataaaaaacaaacaatttttttaatgactatatttttatataaagatactttcaattttcactctcccacaaatttaaattaaaaaattttaatttttctgagttgctaatgtgtaagttattttattattatttttttttaaaaaaatattttgttacaaacaattgtttacaatggattgtataccaagtaatataatataaaattggtaacatattgctcgtagaatgacctatccaataatccaaatgtttttttttcttatgttgttttaaacaaggtcccccctttatctctacaatagttgaaaacaaaactatatcaattgctacaagatagactcaaactcagaccttgtaggagcataagtactcctcttgctggctaatttcatcactaaaaaagaatgttaaactaataactatgcatatcatctatggtatccatcactaactcatccaaagcatcttctactatctcaccaatgatgtctacaacatcggttcggatatctaaccatgtttcagaacttttcaagtcatttccaatgagttgctccattgttcttggagatgaatgtggctgcaagtgccaacctacacgtttcatcacctcttgattcacaaaattctcaattggaagcgaatggacaatgctgagcttgatatatgagagcccataagagcatctgaaatagctgtcataaacctctagaagaacttcactaatgaagtcgaagagtagtttacaatcaccacagaattggccagactgacactttgatgagtcaagcaaacacgagttgagaagcgggtctgctccgtggcacttcaaattgatgtcatcccaattcaagtcagaagcttgcaacactgcctttacatactcagagattgatccataaagatatgaagaagtagtcatgttgacttcagtgtccatatgggagcacataagagcagaagctgcagaaagtaatgtaattggggcacagtcaatattcattgctcaatggagttgaaaggaaaataaagttcataacaataattgtcttgttatgtgtaccaggttggctaatggtgctttgaggactagaaacatcagtgaaaaactgctcaagaacagaaattggacttgattgatatcctctatctttaatgccatcagggtcctcttccactctcccactggttgatggggttgaaggtaaaacctcggtagaacatgttgaaggttgatcctcgaaaagcagatcctgaataacattaaagattgttggttaattaaaaacaatacacatgaaatagtaatggcaaacacaaataacaggagatgtgtcaatgaaatttaccattcttgagcacttaagacattcattttcttcatctgtgtttgtgttttgatttgtacttgtcttgtaagtgctacatgattgagatggtgcatctaaaagatcagttgatttttgctgtgtatcgtcgctagtatctgaagtaaagatatcatctgagccatctgatgaagacagcattgaagaacttgtttcttctgagtgtcttgtattagtagcttccatggcagcattcttctcagtacattgaacttccactggatttgtttttcctgatgataaaatatagcactgtgagattcttatatctgtagagatttgtttaagcttgaaaatctagaaaattatacctctagtgtcaatatttaggaattgactgttgagtttcattttatcagttgtcgaatctatg

SEQ ID NO: 2636 - DNA, 2877 bp, Cannabis sativa
tatatatatatataatgacaaaaaagtgaacgatcgaggtgatgtgtgtttatttttttagagtaatcatcatcattatataattataatttaattatgttagttttattgtagttctttcctcgttaattaacataaacacacaaaaattatacatgcattttttatatacaataatatatgtatttaatttatacatggtaccaaggttacactcacatagaagtaaggagggtgctcctaaaaaaaattgaaaaaaaaaaatctttttgcattacgacatatatttataataaatatttataaatataataaaaatattattataatatatggttaaactagattgcgtattaaagattaataacactttttttttttacattaaccactgcatggtactatagatatttgtatagatcatcatatcttttttaattgtaattaaagacaatacttattaattaaatttatacatatggtactcacacaaaaatatatataatacatggtactatacattattatttgtagatattaatgtagaatttaaatatgtcgcaatcactaacctaataaacattcatttgagtaaagaagaataatacgacttctcaatttatactctattaatactaaaatttctaattccaaggaaaattctaccacatttggatagttcattaattctttattttttctctaaaacctattttatttttcaatagattatgtatgtttcatatctcaaacatgcatgaattatcttttataaaatcaacacaaccacaagagggtcaaatttttttttttcaaaataaaactcatattgtaaatatgaataagccaccacatatatatgaattaatactctttgagtggacactattgacctgttcaattcttaaattaaatgactacaaaccatgaagacatacactttatttataccattagagtgtgctaaaatcacgttttaattttacaaattatattgaaattattataataataattattatcattattttttaagaaaaaaaaggcactgcacttctggcgttagactttttgaacaccacactaacttaaatatagaatcaggtaaaaatttattgtgtggtggtgaaaacttaaataaatcttttttttttttttttgcttaaatatgtttcataataattaattttaatttattctgatgtcaaattaaattcttttagtgttgggattggctggcacagctggtggtggtactactactcgggttagaaaaagaacggatccaacggtcaaaattttgcatgctgttttgtgtccagctggcggacagtaactggtgacagctggcaaagcacaggaaattacagtataccctcatgtagaaggtaaaaagctctagggcccacctgataccgtcgtctctgtttttggtggcgcgattcctttaaaggactctgtttcagacttctctctctctctctctctctctctctctctatctccgattcaaatcagtcaccgccacttgtttacttttctttcttcattttctccgggacacattttccggcggataccaccgccggtaggaaaaatcccggtatagacttgtcatcctttttccgccgaatcttcattttgggattttttttttctttctttttcaagaagagcgtgtgtataaatatatatatattataagcaatgttttgggatgaaaattttatgcatgcttggattttgaaaatgggttttcgttgagttttggtgttgattttaatggggtttttttatggtcgtctagacgcaaaatttgtcgtcatcttcattcttcttttgttaccaaagaaatttcagaggaataggaaaataatgaacaggttttacttttgagtatattttctttttttttttttgataaatatgtatttttttttgataaatatgtatttttttttgataaatatgtatttttttttgataaatatgtattttttttctttctagaaccgagtcaataacagttttgtcagttcttgtaatgactccagttatttatttattatattttttaaattagaagaattagggaagaaacaaatggagcctttttcgtcttactttgtaatcatacattgagtcgaaatatgtgctgaaatgaggtttttattgtgaagaaaacagagttgtctgtttttgtatgaagatttattactagaataccaacaaagctgaatttttttatatttttttcctttggatttttgttttggatttctagtgtgtatatttgttgctattagttaaagccgttgaatattcttaagttggtatttctggtttatgttaagtgtcattaatcttgttgtttcatgtttagatggaaaatttcaaaaccccttgtaggggtattgcaaatgatatcagaggaagagcttcatgttacaaacaagattggcttagtggtctttgttcaggaattgggtatttatacaaattcaaatcagttgttgacagtttaatgttttccactttgaattttaactcttattttgtactcacaggatcttggctccaacaacatacatcttctttgcttctgctcttcctgttattgcctttggtgagcaactgagtagagatacaggttggtcacctcactattctcatatcataagttttagaatacatatacatttatttggtgggatgtgttttctattttgtttctccattaaatgaaataaaagctgaacaccttctttttggggtgtagatggtagtttgagcacagttgaaactctggcttcaaccgcgatttgcggtatcattcactcaattttgggagggcagcctctattgatacttggagtt

SEQ ID NO: 2637 - DNA, 2754 bp, Cannabis sativa
ataggcatttcccttataacacctctggggcaccaactgcatgaattaattaaattcggctttaaagcctcaaacaataaggctgaatacgaagccctaatagcaggcctcaagttggttcatgaagtacgggctgaccacctggacatattcagggactctcaattagtcgtgaattaagtcctaggcgaatacacgacttgaggtgaaaaaatggtggcctacttgagcaagatcatagacttgctaagtcagctcaaaggctacacaatcaggcagatccccagagaacagaatgctatagtagatgcacttacccatctggcaagcagcaccattaatgacaaggacaacttggtgccaatgcagttcctaaaaaaaccaagcattaccatccctaaagaagttgacttatcggatggcagtccaacatggatgacacctattgcagcttacctccagacttaagccttgtcagaaaggaagaatgaagaaaaaaagataagaagaaaatgtgctaggtatctaattgtaaacggagtaatgtacagatggagcttctcaatgtcgctcttaaggtgtgtcagctaggctgaggtcgagcgactaatgatagaagtgcatgaaggcttctgcgaaaaccatgtcgggggaaaagcctatccaaaaagatacttcgataggggtaattttggccaacaatgatcgaagactcaatggactacgtcaaaaaatgggacaagtgtcagagattctcgaaaattctaagagagctccacccaatgagctcacgatgatgcaatctccttagcccttcgtagtgtgggggatatacctaactggtcaactcccaaagggaaaataaggggtacaatttgctgtagtcgtagtagactacttcactaagtgggcagaagctaaacctctggcaacaatcacctccaaaaaagttcttggctttgttgtaaaaaacatcatatgtcaatttggacttccacagaagattgtgtcggataatggaaagcagttcaatcgtaacatgttcactaatttctgcaacaagcatgtcatcatcaaaagcttctctaccgttgcatatcctcaagaaaatgggtaggtagaagttgtcaaaaaaatccttaagaacaccttaaagaagtgccttgaggaagaaaactgaggcaagaatgactttagtcattgaggaacataggctcgaaagaaggagctggtcttttttcttccactgagtgtattacatattaaaatcgccattgacgaggttcttgggtggaggaaggccagaaaatagaatttcatcaagatcatgatcaattacagttggtatgacctgagatttccaagaaagatacttgttacaatcgagtttgatcgtgagtgtggaggtgagatagtgagaaaaagtattctaagaaggaccaagcatggtttgattaggttgagtagcagcagtatcattggcagtagccatgggagcaccaggatcagaggttaaagacgacatttagcaatgtcgattggcgattgataccatgtgaactaacaacagaactggagcagagcaccaagaacataaggcagagaaacgaaaaatgagagtaacaatgcagtaaaacttgcatcatctcacattgatagaagctttatttataggcacaaaaatattttgttacaattgtaacagaaaagcaagtgaaaagtaaactattaagaccatataacttttacagacttgcaactaacttaagtgttaacagtaaaaactcagaccttggttggcggcaaaatggacttaatgaaactttaaagagaaaaagcctacatctaaacaggtatggaacaattttataatttactaatcattttttcctcaattcatccaatttcagacttaattgggtaataccaaacaacatagagttaatattttcatcttgattgttgatgttcattttcccttgtctaatatataaaaacattgtattcttaatgtattgatgttttcagaaaaaaatatattgctgtaaatatcatgaaaaattaaaaagaaaaaagtgctaaggcttcttttctctttggagaaaaaggtaggtactaataggcgctttgcatttttgataattaaatgtatagtgcaaaaagcacccaaattccaaaagtaaaagagtagttatcttcatatttgaactgatgttccagaaataaaaaataataaagaaaaagattatcttcatattttctacaatcaattaatataatattctctagaatcattgagaaaattcatttacaataaataaatatgaacaatggcataagtagaataaagtttgggttgtcacagtcccatgagacaataaagtttatcaacccaccattttagtactcaactaagcttttttgtaacagtgacttaacaaaactaaaatctcactatcttttcttttatcaaatatttttataaaaaaacataaacaataaagctctttctttcttttaattttcccctacaattttgtctttggctttcgttgaagaaaaaaggtgatgagtaatactatgttgtgtccttcatgatatataaaagtgttattgactctgttcccatatttccctcactccattggatataaagaaaggccattaatttgtattttccttgaggtggactcatatgtgtattaattccattattttattttttttgagataaattccattatttgaaatagc

SEQ ID NO: 2638 - DNA, 2643 bp, Cannabis sativa
gaggtggacgaatctgtacaagcgggagttgggagatcaaccaaacaatgaaaggcgggattttcactttggggctatggagacttgcctggaaaagtctccaacgtcgccatgaaaatcttagcttggaactgtcgtggtctcgggaataccacgacagttcgccaattggcagagttggttcgctaacacaaacccgagatgctgcttttgtcagaaactcgtctaccacaagataagttctctagaatttgtactaatctacattttgaaggctctcattatttcactcctgttggtctttccgaggggcttggaatatgttggatgaaaggggtgacctgcaatgtcaaagttgcaagcaaatttgtcatcataggagagattagttcggaccctccgggttgtctcaggcagctctttggcacgtatggacccccccgcagagatcataaggaggccttctggcgccatttaggtgaagtagcaatcaatgctactaatccaattctattactgggtgatatgaatggtactcttcgagacgctgaatgttttaaggacacaaggaacggcaactcctctcgttatgcatttgactttcgcaggatggttctgcgtgttggtttgatagatttgggatttcaagggccgagttttacttgggttaaagggggtagaagctctaaccatggaggagccatgaagagagctcgtcttgacattggtcttgcttcgccggattggcgcatcttgtttcctaatgcaattattaaccacctctctgcttctggtttggaccacatgccactacttcttgacacagcaggaggaaccaactgcaagaggaggccttttaagtatgagaatatgtgggctagggatcctagaagcttttgggttgtgaaagaagtctcagtaaccccatgctaaatttcttcagaaaagccaaagccacttgccgaaaactccaacattggaaaaaagttcagtttcaggatgttcatcgtcaagtacaaaacactcagctacatcttcaagaaattgaatccaaggaccctgacgattacgaagctgtggaacaagctaatcgacagctcacggaggccctaaaaagaaaagagatacataggaaacaaaaattaagaggccaatggcttcaagagggcgatatgtgctcaaaatttttcattgcctccactatagtccgaagacggaggaattacattcagtgcatcaagaaaaatcctggggaagactggattagagaacacaatgagatagtcaagtgcttcattgataagtttggggagatctttaagaagcaacactgtattcgcctcgatttccatcaggactcgtttagcccagtagtcacaatgcaagacaattcctctctaaatgcaatcccgtgtgtggaggaagtgactgccgcccttttcgaaatgggaaaggataaagcgtcgggaccaaatggcctccccccgagcttctatgcgcaccattgggacactgtacaaggagaccttgtcgaaatggttacccattttttcactcaccttgaactcccgaagtacattaacgacactgcaatcattctggtgccgaagaaagactccccagcgtttgtcaatgactacagacccattgcactttgcaatgtggcatataaagtgatctcaaaaataatggccactcgaatgagaagtttgctccacaaaatcatctccctaaatcaagcggcttttgtgaaagggagacatattgcggaaaacacaatgatcgctcgtgaggtcatccactcaatgaagaggaaaagaggcaagagggggttcatgcttatcaaacttgatctagaaaaggcctatgagaagatggactgggagtttatcattaaagtcctactccaatttggctttacgagccctttcacggactggattaagacttgtacatcggtggaggagatcaagttgcttctgaatggatccatagtggggaaattttacccgaaaaggggcctaagacaaggtgacccactctcaccctcgctattcattattgttgctgaaactttatctagacttcttttgagaaagaaaggatgggcaactgaaaggctttaaactcgcaagaaatggaactgctattaaccatctcatgttcgcttaagacattatactttttggagaagcttttatcccagaggctaaggccttcttggaatgtctcaatatctattgcaactggtcggggcaatcggtcagcgcccagaaatcagcagtttacttctcccgtggagtttctaataggaaagcacaagctatttcacaactgcttggtatgcggaaaatgggtagaaatgctacctacctaggactcccgctatttagttcggttaagaggacgaatgacacccagcatatcattgaaaagactcttaaacgggtgtaaggttggaaggctaggctcctatctagtgctgggaaaacatgccttggtaaatcagtgggatcaacactctcaaactatgtggcttcttctgatgctatcccggtgtttgtggccaataagattgataaactcctaagggatttctggtggggggacacggatgagaaaagaagactccatacggtggct

SEQ ID NO: 2639 - DNA, 2021 bp, Cannabis sativa
gttaattgagcttgtccatttgggtattaagtggggtccttgctaccaaaatacctagatatgcttttaagggatggtccttgaaagattgggttctaggagccaatgtttgaaatttggctgaaagactcgatcaagaaagtgttttatcaggaggaggaagacttgcactggtttggtcaaaatcttatgattttatcaggaagactagatcaagaaagtattttatatagaggaggaagaattgcaattgttaagtagaaaggttgtggaggttttcttttgaaaggtgtactctatgtgcaaatttatataagtatggaactagaagaaagaatgacatttagatgtcttggaaaagacattacttctttttatgaagatcatctacgaattgctaaaatcaaggttgcaaatggtagaaatttgagattttaggaggatgtgggattcactagagcttgtacatatttttttggaagatagagtgaatggggaagggagtaatgggcatgaaactttcattttattcgaaatccaaccaatatagaggttttatatttgattgagttgatgtatttgctagtgggaagaaatctctgtttggatatagagtagtttggtgacaactctgtaatttattcttgcaaatctgtgcttgaaagattaatttgggatgatgctatgtagatgtttcctctagttaatacgttgtaatataatgtaatgcctaattttcgcatctgtgctccaaaatttgatataatccaccattaatgctcattaagtattcatttaaaaaataataaaagtaatacttttttattgtcattgatcatttttcttcattttacatttaatgtagatacttaaaaaaattaaattggcattatattaaataaaaaaaataagctttactttagcatgtgccaaaaacttttggcacatcattggagcaagttttttttttacaaagtgagctatactttggcaccgcatcaccattgggaatgttctaagtaacatcattctctgatatcttttagttttgtgagttcatctgtggtgctgtgtgtcagctgatctcattttgctgtagttattcctataatacaaaggtcgttgtctcttatttatatatatatatatatttatacattaaaaaaaatattcttcaagttgttttgtaattcccaagaatttaataaaactgaaaactccttgattggtcaattggattaaccttctgtcatccttgaatttaaattaacttcccatcctaatatctatcgactaagcagtgtacacattaaaaattcaatcgtgtttttagtgttgtggtatgtaagtggttttatgtaaagtttccactaagaaataccatttttcttttgggttgattgaccagatgtttagatatgcttgtgggagtcaacttagcagaagaaggtattatgcggttgctgtttgctgcagtttatttgatgcttcgtaaaagtggcaatgataatgatgtttctgcggcatcaaggtgaatccctctgccaattttgtcttcgcttatctctctctttatatttatgtttcttagaacttttgttcaatgtgagttttcattatggagcaaaaaaagaaatacagttcttttgctacggagtttaagttcattgtgcagtatgaagagagtctatgctgttaatgatgtaattacattcagctatagatcatatataatcatatcagttataaaatggatgcaggttttgatggtttctattacttttcttcttacgtctagctttttctttgctcctttgagtgacttgcaaagcttaaatatgttaaagagagaaggttaaaagaagattttaattaatttcaattgaaatataaatggagagattgatatcagtaggtaaaatagattgttgtctcttgccatttatattttgtagtgtgattagcttttcatttatttcctggcgtttagggttagagagatgatccttttggttatatga

SEQ ID NO: 2640 - DNA, 1991 bp, Cannabis sativa
attgatttagatgtgcacttagttaaagacaaagttcttgctaaggctcttgacatcagatacattcattctcacggccaagttgtagattgcttaacaaatagtttatccaattctcgattttattttctaactgacaaactaggtgtggtttgcaccccacttagtttgaaaggaggtgttagaaaatgataccattactagtcactagttaccttttgtcaattatttatacaatcattatttgcatgattttctaatcattgccaactatattttctctctcttttcggttacaggtgtcagaatatattcttttcgctttttttgtattccaacctttttgggctgaggtgtcccttttctagttgtaccattttgttgccctagtggctatataatgaaagattcacaacacaactcaatgagctaattttcacaaactattcccctgcttttttatctttatggatcaaatcaaactaaatgttgatgctgcttgtaggagcttatcaatggcagaaccagagcaagaagaaaagaaaaaaaaaatagagcaataggcatagccaaaagaaaatgtgccaagaaaagcttaacccttatggttagctagaaacctttttttatattaagttgtgaatgagtacaagctaatataacagaaaaataacagacaagacaatttgcttaactaacactacctaacaagaatcaactaatagattattggttgacatcccttaaacaaaaaagggatgatgccatttgaagtttgccttttaagtagttcaatcgatctgtagttaatggcttagttaagatatctacagcttgatcaaacgatgggacatagcgaactgatagttttcttgagagtatttggtatcaaacaaagtggagatcaattttgatgtgtttgcatcgtgcatgaaacacttgattggcaataagtgtagtagcaccttgattgtcagcccatagaataggtggtttagatttaggcacttgaagtttagataagatagatgtgatccattgaacttcagcagcagcattggcaagagcgctaaagtcactttctgttcttgatcgagcaccaacttgttgcgtctaggcagaacaagacactaagttgtcttttaaaaacatgaggtagtcatttgtatatctcctattgtcaatgatgttggcccaatctgcatcattttatccctgtagatgaaaagtgtcattttgtttaaggcacaagccttctgtgatagtgccctttaaatacctaagcaatcttttacatgcttcccagtgtttaagagtctgagccttaagaaattggctgagcttgttgcttatgtatgcaacgtctggtatagttaggctcaagtattgcaaggcccctattgtgcttctgtatagagttatgtcttcaaacgggtccccatcaagtaagcccaattttgaggcagaactggtaggattgggacagctcttagctccctccatgtgaactttggtaagcaagtcagtgatatactttctttggctaagatacatgccattgttatctctgtatatttctattcccaagaaataatgcactggttttaaatctttcaaagagaattcagtgtcaagggctgagatgaagtgattcatgagagagagatttggacctgtgattaatatattgtcaacataaactaacaagtacaccaagctatttccagaaccatgaatgaagagagagctatcagattttgaccctgagaatcccgaatgagttaatgtttacttgagcttattattccaggctcttggggcctgttttagaccttataatgccttgtgaaggaggcatacatgatttggtttagaggcatcaacaaagctaggggttgttgcatataaacattttcattgagattaccattcaggaatgcattactgacatccagttgcttgacacacaagtttttgttaacatcaagaga

SEQ ID NO: 2641 - DNA, 2202 bp, Cannabis sativa
gggtgatcatcactattatcttcttggtgatcgtcactattgtctaccaacgaatcgaactcatcatcatcttgtgggtccataactcatgaatctgcattgagatgagaaagcgataaatgttagtgtacttaaatctttaataagaaaaattacgaagagaacaagtttaatatacaattgtctacccataatccttcaccgtcgcacctatatacctatatagtcatctttattgtcaatgatgacatctataggtggtgtggcaagagaagacaatgaagaacaatcatcatcaagttgaatccaacaataatgcaaatgaagcacattattttaatgtaaaagagcaaaacaatactgatgttcattctccaaagaagcctattcatgatcattataatcattggtaaattactgctttttgtgtttgaattttctgttttgataacaataataatgttaattagcttgaattatatgcagcagcacaatcttgacaagtagtactcctcaatcatcaacaacggagaagaaaaagacttaaattgacaaatgtatagttttctttgtttgattgaatatttttcgcttctaatgaaactattttcttcttaatttatagataagcaccaaccagtgatgatgtcaattatcatttgttgtttatatgtcaacactttatattacttgaatactgataattatgcatttcaatcaaacaaaggagttcaaacaggaagcagtgggttcaaacatgaagaaattagaaattaaagcttgaactggaaagccttgcctgaatcgtggtctgttgtgtggctggaataacggcagtggaaaaagttgaaccaaaatagagggcagaagagttggccggaggatgaaggaggagccgcaacggcggtaagcaaaaaacaataaaaagacctcaaaacgcagctcagtcccaaataactccccattttcgtcacaaattcaaacagaaaagaaaaaaaaaaagactcgtatagtttacctcacaaacgaaatccccagaaatggacgaacaagtcttctttccagaagcaactatgctagaagaacaagaaagaatggagattaagagggaatggtgagcttactgggaaaagaaaatgcacggctagaaatcataaaatctagtgagaatccataaaactaagttaaaaacaggctaagagttgaggaaaaaccttgaaatcgccgataatggaggtctggcacgtaccgtgggttctcggagctgaggaagagggatatgaattttcacgtttgaggatttgctggtggaagtggaaccctaaattgtactggattttacatttgagtcagtcccacagtaacttgtttgaggaccaggcccaacgcatcgtttgagtcaccgtccactgacgcaaacgggactagtaacataatataaattgtttagactcgtttaagggaaaataaatagggttaatttcacaaatgcacaaaaataacaaaaatacggttttacgaaattttaaaaattttcacaatttttttgattttatttatataaaatacggtctttttatgttaaaattttgttcatttgttaattttttgttatatgtatgttattttttgtttttttgttgttattttgatgtttttttcatgttatttttatgttgttttcttattaattttatgttgttttcgtgttattttttagaaaatcataaaaatgtaagaaaatattctttaaacgaaaaaatgtaaatattttataaaaaaaaaatatgtaattattctaaataaataaatactagcagattaattgtccacgtgttataatataaaagtttcaataaaaggagggaagaaaagaaaatagggcggcaaaactcttcccattccaaaatttaggcttcttctacataaaatatctttcaaacagcccttgcgttgcgattatgggtttcattagtcccaagcttcaaaaccctctccaatggcttccaaataggtacgtttctcgatctctattcttttcttattaattctcgagacctagccatttatataatttttaagagtttgaaatcgctttttacttcccgctttgcacatttgtcgctaatattttagaacgcataccactttctttctatttgtagatttttctgatctatggtttatgccgatcatcttata

SEQ ID NO: 2642 - DNA, 1926 bp, Cannabis sativa
gtggttcaggatccaatataatagcagaaaaaacctcaccacaaattcaaattcaatggcttccacgcaaattgtatatagataacattagaaaatcacttattcagcctacatgatatataaattcagtctaatctgaaaatctccgctgatacagatttataaagttactactcaaatattatactaacacaaacacaaacaaagataaggataaaatcatcgttattataattactactactcaatgtcatctcaaaactactaaaacattaggttcacttggtcttatttaagaaagaaacacagaacataacattaccatgctaaacacatgcaactaatagcaatagctggccaactcaactctttcagattctaaataacgcctcactataatttatgattgattcaactgccacaataaaggaggttggcttcaccttcaacgcaactctggcctcacaaagtctgcattttccgggacagaaatgtccacggtgggtctcagctgtgcacatacttcgatggctccatgaaccggatctgattgaaagttgctgatgaggtcctggttgattggtgagccattgtcaactgcgaccaaggcctgttgagtaagaatgtagtcgaagcgtggagcccatttccttgatcccaatcgagcagttgttgaacagttatcaaccatgaatgcaactccacgggcatgcatgaaggggttcaatgaatccactgactctatcacactttcgttgatgatctctgagtaggaatgtcctttcttcctcaagatttcaatctggaattccaagtaacaaaagaaaaaataacattcagaaatgaaacaaatttctgttttatttcttatgttaatatcaatttattatgtcactcgtggtaatcaatgaaagggaagtttctacctgagccatcatcaatgcaacatagacaccagctgtaaatgggtacaatggacctaagtcaccagctggtcgggcagatcggaccttctcacccaccttccacatccttgtctgatcaatgttacccatggggaaggctggaagaccctccttttcctgtaataccaaaccatatccaaaatcagtcacgtggttattttaacactcttaaatggtaaagactttagcatatttcaatgtaaacaaaacattggtcttaaaatttgaaaatataacagtggacagaagatgagagcaacataaacatacataaaaccgccggccagccaaaacaacactgcggatctcgctacaactggctacatcttcgtaacactcgtacaagatatccatgcaagggtagaaagaggcactgtaagcagtctcaaaatcctttttgccttcttcagataatgagttgtacacagccaacatgccctgacataatttcaacagaaaaatcattataagcatcagctgtcaactccaaaactttaacaaatgcaaagaacgtaagaacgaaaaataaggatgcacaaagagatctaaagcttatagtagaattataaaatcacagcagagcattaccttagtcgatatggttcttgatatatttccagtaatacactcaacagtgttcttgtaagccagatcttcagccattccattttcagtgtaccttctgaatagggactccacaatgccatgaacagcaccaagtaaaatgcctataaattgttgtagaagtcagaaaacatgatattgtgaggtgctggaatagaagtgacacaataaactagatctacctcgctcgccaaagatgtcactcttgtattcctgttccagagtagtggcaaatgtgaaaggagagcctagggcaactgaccaccccaaggccacatcagtagctcgtccatcaacatcctgaattacagtagcacttatagatcagtaaaaaaaa

SEQ ID NO: 2643 - DNA, 1955 bp, Cannabis sativa
aaaaaaaaaaaaagaaatattttgtattgatccgacccttgattttgttaaataataattcagattcagtattttttaaattagtacaaaataatattatcaacttaatttttgttattattttattttttttttaatataatcaggctggcactacaacaaaaaatattttatgcattagcttcaaatcaaaatattatttattgtgttggttggcaaaattgacgtatattctatcgatgtgaactggaaattatttgcgtagattttcactattggttttacacccacaaaaaaaatccaaatctaaaataagtctgagatccaccattaacagacccaatcaagatcattaagaaatttgagtaataataatgataataaatactaatactaataataattataataataataataaatatgaatagaaaatacaattacagatctatacaacataaaatcatatggtaatgtgatatgaataactcttctatggtaaatgtacgttaatgaaatatgtttattacatatcggtacagacatgtataatcgaattatcacagtacctatactacatgtctatccacatatatgattcgaatcaaaatcacacacactagaagtataatgtataataaaccatacttaacaattccatattaaatattcccaatactttaattactatcgacttattttattcatatcgtataatcttaattctcttgtacattcttacaagattataccttttccatttgaatattaaatttttagatatttaataattatactcttatagttaatatatcatttatcttatgattgtatttcatatattctctaatatattatctattaattatttatttttaaggtataaatcccaatagttgaggtgatatgacctccttcgtacacagaagacaaataaatgtcatatccttcaattttttgaggaataacagatactaggggatctcaaatcttcatctattttgttttattttttttaatcagtactttgctaaacatatcacaatcagtattcagtgtaactctatgcacactaatatcgctattttaatatgttatctaacatgtattcataaacatgcacgctaaacatataatcacatatgcatatcattatactaatcttacctcgattttaaattcagttgtgccagtcagcctgagtggaactgatgcttgacgatttacaggcccctaagtcacaatattcgtaaaattgataagtgacacattaaatcactttttggggacttaaaaacaaaactagaagtttccatatcgatggataatgtggcaatatcataagtatcgccaaaacacaaaaatttagggttctaaaatttctaaaactagtaacccagatttccaaaatggataaccggttttagggttatgcctggggaagcggtgaaccggatctacggggctgcctgaaccagttaaccggttccttgtaggaaaccctaaaacctcaccctaaactcaatttcacccaaaattgagtcaaaccttctagaacacctaattaagttacaatgaacataatttaagaaacaaaaataggtataagcctctaaaataagatttaccattaaagacctaagtttgagtttaaaaaactcaaaccttggtctttctcaaatttagcagctaaaaccaatctaaaacaacttgaataacctcaagacattcttagaaaacaaattcaagcaaccccaaacattcagactcttttcccacaaaacaaccatgaaaaccaaatttacttctaagaaaaattaaagagaagaaggtggatgagcttaccttgggttggtacctagaattcctacaaaattcttaatgaatcaccaagaaaatgatgggttaaagcttggcttgctgggttccaagggaggtcgagagagagagagaga

SEQ ID NO: 2644 - DNA, 2607 bp, Cannabis sativa
gaaccctccttctagcgattttttagtcttactctgattccctgatatttgggccgggacttcaaaattggtctttcttttttcttcttttatttcagattagtaaatgatctcttgtcacaatctcttgaaccataaatcaaagactggagagacaacccttttttcaatataaataataaaatataggggaataattcaaattgaaatggacgtgtggtttggtggccaaatctatctcacaaatgacattattacattacacatcttctcacacactttgtttgtggttaagaaatagtgcgtttggatagggctttcatggttggttttgttttgctctcatctcataattttacaaccacactacacacatcttccttttactcaccaacttttattttattttattacatatgaatatatttcaacaataacatttgtgaagatttttttatagtattttttattagaaaaaacaaaaaaacaagtgctattgttaacttcttattacaatttttgtgtccgaaaatatatgtcggaatatttttttttaattttttttatagcggtattcattatgcttataacgtaaatttttttaaaaatttcaaatagtttactgtactaaaaatatatttgaagtttttttaacgcgtctgataaactgaaatattagtaattttattttcgacattgaaaactattttaatattgcaacaataataaatactgttatttaaaaaacattttctcatctaatattaaatttttaaagtgtaaaaagcaactaaaagattgtaataaaatgttatcactcctccaacaaaaatagattacgatgcggtgtctgacatagaaaatgtttttttttttcttaatttgtggaagtgagcatcaatggatacgtattctataataaatttattaaatattataatacaatttgtatttggtgggaccttagccagtgacggaagtggatcgcgggacaccaatcttcattttcatgagatctgatcgaacctatggagtagagaaaaccaaccaaatctcctaaacgccaaactttacttaccaccaaaacctcacccttaaccagagcctctcatacggttagagggagagagtttgtgtgtgagagacagatagagagaaaacatggccatggctttggcgctccggaggctctcctcttctgttgacaagtccgttcgtccacgcattaatggaggctcgctttattatatggtttattattgtttcccttttctttttcactttctgggttttatttcgttcttcttgaaagtggtttgttttctacgttttcgattgtttatgcatggtttgtattaatacaatattcactgcatgttcttcttttctttttttgggtttcttgtagtcttctctgcccaatgaagctgcgtacgaaaaagagaaaaatggtgtttcggtaagcaaaactttattgaatttgtagctgtttacctcaattgcttttcattctgcatctcatgtttggagtttatttaaagttttttgttttttttttttttttggtatagtggactaagcagctgaatgctccattggaagctatcgatccagaaattgcagatatcattgagcacgaaaaagctaggcaatggaaggtataacgttgttttgtgttttagttgatagagaaactttgctaatattctgtttactcaggtttattacctctcgatgctattaaaaaattaaatcgtggggcaagttcaatttttgatatgaaacaaaataaaattatttgaagcccgagaggtttcctcactcgtttattgcatgatttatttcatactagcatgagtatggactatctttgtctgagtttcttattttgtttttaatcttattcatttttttttatgtgaaggggctagagctcataccctccgagaatttcacttcagtctctgtaatgcaagctgttgggtctgtcatgactaacaaatacagtgaaggatatcccggtgctagatactatggaggaaatgagtatgtggtccttccttctactccttgatcttgcttatttataataaatctgtggctgtgtttggattcccctttgtattttgttttagcttttgtgactatatttgatattaagattcaatatacttcaggttcattgacatggcagaaacattatgccagaagcgggctttggaagcttttcggttggatccagagaaatggggaggtaagtactcttgatacatgtatgccatgagaacctcctcccccctttgtcttgttcagtttccttcttcgctacttcttttttaagtagatgacgttcgtttgctacaaacaacacgcgcagcatattatcgttcatcccatgaatttgaatttggatgaaatttatttttaacttcattgtttcgtaatttctgataaagaataatcaatattgctgaataaatctagatttactcttggtagtgattgagtttgtgccagtcccagtagctttcttctttgaaagaagttaataggttcgttgttttcatatgattattgtatttctagcatttctaaaagtcagcatct

SEQ ID NO: 2645 - DNA, 2188 bp, Cannabis sativa
aagcatgtcaataaattaaactcaaacattgtaatgtcaacattcaccaaaactcatctcatatttccaaacaaaataataataaaaatctcacaattcaagtccatattaagattaaaccgctccatgaagcaacgcaatttttcattttttttttgtaaaaaataaaccgtgcatcccaagctaaacaagttctaagtttctgccttagaaaattccaaactgttgtagaatatcaataagattattttatatatatggattatttttcaaataagtctttgataaataagattaaaaatgacaatgatctgccacctgcagtacagaaacagggaaggatctctctttttaaggataccatacatagagatatttgactttaagccaatcattttcacttacatcattcaagttgtaaatgaatactctaatatgaaaatttattgtcattttaaaagtaactagtactactctaaatcatgatttgattcaaatagctccatgagactataagatcctttgaggctgagctttccactccatgcttgctttgcaaattgctcgtatactttttcagaaggatgtacagagtcaaagaacacatattcaatggcattataacataaactaaagtttcctcctccacagttaaattctcctctgtatgggccactgccacaacatgccactttcccttctttgaaacctgaaaattttgaagcagttttaattagtcttaagaaaagagatctcattaaattaagacacttggaaattaactagcttaagaacatacataccttgtttagaagggtgattcattcgttcttctaagaaagaataaaagtctaaaagtgagtatttgaatttgttgagatgtttttggaaattttggagaagattaaagagttgtttgttatgtgattttaaatatggtgttatttgatccaagcagccataatctccaccttttattactcttgcgaatggaaaacatgccagaggccacatacttggaaacgcaaactttcttcctccaattttgtaaatttcctaaaacaatcaaaaattaaagggttgtttaaaatagcatgtcacccatcttggaaagttaatttagtggcttaattcagtaattagtgtacctgaatgacttcagatatgttgccaattacttgtcctgcgaattgttcgggtgaataggctcgaagaacactagagtttgtctcaaatgggaataaatagtcattgcctcccacgctaaacaagtatacagctcttgacaacaaatcttcagcctctgcatctccaaatttctcccttaaaagtttgctaacattcttgaaattaccaagttgagttttaagatcaatcacctgatagagtgagagaaatgaaacaaacatccatgttaacatatatgatattaatataagtcatcaaaagaaaaaagaaattaaacgatttggaaccaattataccaatccagggcgagtttcaacaagggcaccagctccagcagatgcaaagttgaccccatatttaaaatcatggtgattacaaggctgaagatatggtacaatgaatggcaacttcgcatattcagctgtaaatacacataatcagattaattagattgttataatatcatgtcctaatattattacttttatttacttataaaaacagaattaataacgtttgtattttgtttacctatgaaatcaggaacaaggcgaccatttgaaaatctcccagttgggtactcaaagaaagtctcaccatatgggaattttgttgcctgaaaactagtgttgatatagttattatttccaacatcaaatgctgaatccccaaagatgaacaaggctgcattgcaatttggagatattgcaagtagtgttagagtgattatacaaagaaaaccaagacaatggctgaatctatttaattttgccatgatgtaaagattaccaactggctactactaattatatttgtaggttctattgcttcaatatctatttgggatttgagccattattgtaatgaatagtgataaactgataattaagtgatcggtttcgattcctttttctaaataatgaagtcactgtctgatatatttgtttatttaaatcagtaccatcattaaagggtcaatcatgtatatattattgtgtat

SEQ ID NO: 2646 - DNA, 1606 bp, Cannabis sativa
ctgaaaattacactgaagtttctaaagtattttcctatgtttaaataagaacgtaccaaagtgccaccgtgaagggcgattgaggcagagtataaagggtactgaggaatggggcaaagaattccgtctttctctgacgaaatcagcaattgcatcatcatatggacctggtatgcaaggaaataaattaaaaaaaaaagattagcacatgttttgatgtaggaagcttcaattgcttcaaacataataacataaaataactgcaaatatgagaagttgaaaattaccgcagggcttgcaccgtcagttaagaaaatatcatttggatcagcaggacaaccatcgcgagcttcaattccagcagcaattgcatcacgtagacccttgataccctgacattgggaaggagaaatataagatatagaacatataagatgcttttattataaggttcttgacacagaggcatagctggttaatgttacctgactgtgactataagcaccagtggctcttcctggaatttgatctagaattttccaagctcgctcaatggaatctgcactgtaataggtcacaaggagaattaaagaaagaaatcttctaattgcacaagaattagcagatgctattttttttttggcaatttaatttgaattgtgaagatattggtggtattagagatttcgataagccccttgtcagatttgtgtaccgtagaaggaaagccaagtatgcttgactaggattttctcaaagacatttaatatttattgtacagttgcaaatttgtaattttctttaagactttaggctgtattgggttagtttaagtaagttgttgattaggcaggcattattgtaaacatagctatatatttggaaggaggagatttttaggggctatggaagaactcttgagagtagtctcgataatttgagagcccagttttctcgaatgtttggactagtagagtaaacatagccatatatttgtgtgtactaagataagatgattctaactaataaaaaacttatcagatttatacacgataaaccatttattagttctctttatcgaggatagaaacataagactagtgtactacagctgcttgaaaatcatattaagaaaaacttaatgtcatcagtcatcaaaaaagtcagcccccaactattctaattcgttttcaaactatagatgctgatataacaagagagaacatttttcaatacctgaacaagccctgtgtctcacttttgtccaaaatggatggatagtcacatagcgcaagaacctagcaagtttacaagaataataaaaatattaagcaacttataatgttgattactgaattcaattcaaagaaaaccaacctctcggaaaaatgttatcgggtgttggccaagagactggggatttccaatattgcaataaagtatctgcacaatacaagaggaagtcagtcactgagactgcattaatagctcaaatgcacacatctggtcaagactacagaagagaacaattgtttgatataatttagatactatttctcaaacttttagtaaaatcttcccctgtaatcacataatttagtttgcc

SEQ ID NO: 2647 - DNA, 1692 bp, Cannabis sativa
cgctcttgatacatatgtagtgtgtgtcttttctaggaaactagcaattaagtagagatgtgcatgcatgtgcgtgtgtttgtcttattgtgtttgagcgtgtgtgggaatgctgatctaacctggtgttacgatatggccttaattattcataattatctaaagtgaaaaccagacgttgagacctgagagaattatgggtggctatatatatatttacttttagccatcattggatggttatgtttgtgcaaacttgttaattttttgtttcgacaactacatcatatattgaataaggcaagttatgttaaacctaaaggaataatgattaaataacatgagctgtccacaaattaatatgagatttgacccataaatagtttccctggttgctcttgaattgatctgccttataaatgactgaatttgtgactaagttattgttgtttttagtttttctttcaatttataatgagaaacacctcacgccatacacagtgtgttaagggtctccatttacaattcatctgattttttttttacttcaggagggcaactcatatcatctgacaatagcccagtggttcatcaagttgaacacctctcttccctttttgcatggcttgctaataacctcaaggaattaaagcctcgtcataaagctcttaaaacttctgaaacagatgtaaaatcaacaggagattcatccttatcaaacgcagcactgatgcaactaatgcgcaagtgtctagtgttatcagcttctggcaacaagcagctcctggattcagccatccttattgcacagctgattggagacatcaatctaatgaagaaacttaacaaaatatctttcctagctttgtcaaattcagaagttattgaaaatgatccttctttattcaattcgaaggatcttatccagccagatgaatccctttcccaagctggtgagaagcttgaggctataaaacgccgtcggatgaagttaaaaaaagcaaagactacagatggagatgtagaaatttcgagaagatgggttgttgcaacgtcttggaatccatgtccgattggcatgttacccaactcttttgggtcttctggctgccttcctgttttggacaataaagatgatgagagcaagtttcctgaaatgtcacaagcaagagaaagtttggtatcaaaccactataatgaaatgatccagcctgacattccaccgtcagatgactttgttgacaagaagagaaggcgcgcggttgaagatgactgtgtgtctgatgttgaagatgtctggtcacagcaaggttttgatgataaactttggattgggggactatggaagaaattagtagaagatgtctccatgtcggaagtacacaaatactatagtaaagttgaagagcttgctgttatgaagtttcggttcaaggagatacaactttaaaattctgagttggatttagtcattaggcttaagaatctaagacagttttgatacgtagcaatgcctgttcagggaatttgtcccatatttaagaagaagccatgattgtttcatggatggagagttaaattatgaattattattttatgttagcaatgccttctaggttttggacatgagccaccacatatattgtgtcaaatgatttatcagaataggaatttatcttaatatttgtcatt

SEQ ID NO: 2648 - DNA, 2399 bp, Cannabis sativa
acctattttgcactccctggcctttttaatttaccatctaaggataccaatttctttcttgccgcaccaaggccttagcgccaggatggactaatttgttttgatacttagagcaatttttcttgcttttaaggttgaagttaaagttaatagtgattccatctagggtgcctacaaagtaattatcatagccctgttcttaaatattgttgtagttgtaggagtccattttctttaaggcccattttggtttagggaaaacaattcaatttgagtagaggaataggaaaatgctctatacaattaaaagccactgttgtcatagttttggtttacagtgctagattccaattgactgggctgtatgacattgttccattaatttgattataattttataaattatgttcattcttttttattttttgcagaacctgttcaaacagatgttaagtatataacttggcacagaacagcatcttctcgatcatcttcatctaggaatcctgtaggagcaggaaacttaaaagatgacatggaggacctgactggtaatgcatttgagaatattggcatgatctcgggaagtcatgcctcaaccttggataggttatatgcttgggagagaaaactatatgatgaagtcaaggtacggccaatacgcaagctttagtttctgtatttattttggtagacaataaaatagttttaatttatagaactacagtgactatttttaacaacaacaaattagtaactccttaattaaatatatgtgtatatatattatatacaagtgtttgtagagctttgatataaaagtgtgtgcacatatcattaccttttatgtatatgtttcattttacgtactttttatgcttactatgcattttccttttcaagaattattcactgacccctttacataatgtgttggagattctttgaacaacttcctagttttggatctttgtttggtatatggttgaggaatgtagaacatctgaagcaaataagtcatgcaaagatcttttatgtgtagtcattaggctgtatagcaaggattttgcttctcattaaatcaatttaaaattactttattaaattccttgtttcaggccagtgagagtgttaggagggagtacgatattaagtgtaggtttctgaggcagcaggaatcaaatgctgagagttctctaaaaattgataaaactcgttctgatatcaaagatcttcattcgagaatcagagtggctattcataggatttattctatatcgaaaaggattgaagaaataagagacaaagagctccagccacagcttgaggaattgattggcgggtatgtgtttgggtttctaatcgattctggttttatattttttatttatatgttaatttttatggacaagcactttctaccgtgcataaatacaacttatacttctgtgaaaaaatcttaatattcaattgtttatgcatgttgggcgaaaaaatgtcaacccttgccataacttaggaagttgagactttaaatgtcaataagattgttatccttttgcatgtacatacgatgatacaattaaaaagttatagtattatgttatatatcttataataaaaatattgtactaagaatcaatattttaatttcacctaattattttgcttttgcatttcatttaccctgttctttgttgtgcctacggcaggttaagtcggatgtgggaggttatgttggattgccacaagcttcagtttgacattatctcagttgcgcttaacaatggcaatgccaaactctcagtgcaccaagaatcacataggcagattactctccgtcttgaaaatgagcttcattctctgtcatcaagctttagtaagtggatcggtgctcagaagtcctatattgattctctaaataaatggctcttcaaatgcgtctccatagcagagaactccaccaagagaaaaagaaagtcatatagctggcaaaacgtaagaaactacggtccccctatatatgtcgtatgtgatttatggttggaagagatgaataaattacaatataaagatgtcgtcgattctataaaaagtttagctgctgaaaccaaccaccttttaccacgccacgagaaaaaagatggtaaggccgacaacaggagcgcatctgcagttaatggattgagagacgatggtttggaggacgtcatttcaggtttgaatagcttccggtcaagcttggtggcattttttggacagttgaataattttgcagattcttctgttcaaatgtatgttaaactcgataaagccatcgaaaatgctaagcatatttacgaaagatctctgtctcaaaatcattctcaatttcaattccaatttcaagttgcttgatt

SEQ ID NO: 2649 - DNA, 1075 bp, Cannabis sativa
  modified_base (736)..(736): a, c, t, g, unknown or other
accatggtaagtctaagttaaatttgactatcaccttggataaatgacatgcggcaatttgtaattaggtaaataatgaaaaaaatacattataaaattctttattacaattaaattaacctctgatcttgaccaattttgtcttcatctagagcatacgttttccctttatattattcgttgtacaattctaatttattgtcgatcttttattcaaattgtaaacatatttacaatacttattgtttttggaattagtaatgtgaactacgatcattaaacgtgtgttttttcattttgaaatattattccaatattataatatctgttttatttcaataaaattactagctagtactaataataaaccctagatttttttttatggcatgccatttcatttttccaatctcatagtaatggatacatataagagaaaatgttttagctatagctagctaaaatgttatatcatttaattatctcatgataaattagcgaaaacatatgacccccatgtagcgggccttgacacacggaataatacatgataagagtactacacaattgataataatcacgtacttatttttagacgtatattacgtaataactattaaaatatatatattactaataaattcgttaactaggacaatgcctatatagctactgaaccgataaataaaaagggccaatacatacggtttccaatatctatctatctatatatatntatatatatatgtatatatcaaggaaagaatccccagtaaggtggagaaacagtgctgtattcgtctatattgaatacatggttgcaatgatgataagccataacatgattctgttgatgacgatgatagtaattattattagttccttgtgacttattgtttgaactgcgaataataagggcgtccccagtactgctttcagccatctcttccccggagattatcatagaagtaatatttcctcctaccacttgcttattcgacccattctctcgtagaatgcgtttcagttttatgacctgccctccaaaataacattaatatgtatatcatgtata

SEQ ID NO: 2650 - DNA, 2241 bp, Cannabis sativa
aaaaaaaaacaataaaaatggaattaattcaatctgcacccaaaaacgacatcgtattatcacaagaagaagaaatcatcaacataaccggaaatctcaccgccggtaaccaacaacggcaacgcccactttccttcgtactgagtttcaccaaccttacatatagagtaaagcttcatcgtcccaaagggtacaattttctccgacgaaacaatgccggcgccgtaccaccggcagagaaaacactcctcgataacatctccggcgaagtacacgacggcgagattttagctctattgggagcaagcggttcgggaaaaacaacattgatcgatgctttagctaatcgaatcgagaaacagagcttaaaaggaacaatcactctaaacggagagattatagattcaaaactctctaaatccattactggttatgtaatgcaagacgatcttctttttccgatgcttacagtcgaagaaaccctcaattttgcggcggagttccgactaccgagatcaattgggtctttaaagaagagaaacagagtccaatcgttgatggaacaattgggtttgagaaacgttgccaataccataatcggcgacgagggtaaaaggggaatttccggcggagaaagaaggagggtttcgattggaattgaagcaattcatgatccgattctgttgttcttggatgaacccacttcgggtttggattcaactagtgctttcatggtggtgaaagttcttagaagaattgctgatgagagtggaagcttaattgttatgtctgttcatcaaccaagttaccggataatcggattacttgaccgtttgattttcctttccggtggaaaaatagcttataacggcggttcttccactgaactcactcaattttgctctaatctcggttacccaattcccgaaaacgcgaatccggtcgagttcgtgctcgatttgatttccgagctcgaaaactcccctaccggaatcgctgtattttccggcaccggtgccggcgacgacgacgactacaggcaatttccagtacttaaagaggcattaaaagcaagaatttcaaaagggaactttacaatttctagcaatgaaaactctatatcaagtccgattatttccggcaacggaaaattaatctccggtgttgaaaaatttgcgaatccaatttggattgaaattatggttttgactaagcgttcaattctcaattctaggagaacaccagtactgttcttgactcgtttaatcactgttttaacaaccggtcttttattatcaacaatttattggcgtcttgatgattcaagtaaagggattagagaaagaatgagtttttttgctttcgccatttccacaacttacttttcaagttgtcaatctcttcctcttttactccaagaaagattcatcttcaccagagaaacttccttcaactcttacagaaaactctcctatgcattctctcaatccataacaatcctcccacttcttctgattctctcaatagctttttccacagccacattttgggcagtgggactcgccggaggaattcggggttttgttttttacctttgtgtagtttccggctcattctgggccggaaactcattagtagtgtttctctccggtttggtttcacatgtgttggtgggttacacggtggttgtgtcagtctcagcttactttttactcttgagtggattcttcattagccggaatcggattccaagttattggatttggtttcattacttttctttgattaagtatccttatgagggtgttatgatgagtgaatttgaagacccaaaaaggtgttttgagaggggggtggatttgtttgatatgacaccttttggtggtgctccggcggctgtgaaggcggcggttttggggaatttgagttcggcggtgggtgtgaatgtgacgagtggtacttgtttgaagaatggtttggatgtgttgaaggagatggggattaatgagttgagtaataagtgggaatatttggtgattttggttgtttggggattgttttatagggttttatattatgtttcattgttgcttttgtggaaaaataagaggaagtaggctgaaaactagttttatcatgtaactttaacttagttgggagacttgtataattagattatgaatttatttattgataattagttttattaagtggaacgatgtactattatgctttagtaat

SEQ ID NO: 2651 - DNA, 4215 bp, Cannabis sativa
ctttattttctaaaaataaaactaagcagaaattattaacttaattataataaatggccagctaccaattaaggggtatgccacctaatcccctaatgcaaaataccaaaaatacccctcctacttccaacttaagtcattaaaagtctaggagtaaaatggtccaaaaccatgactccgctcaaacccggcatttaaaatatctcaaatgtttgtcctgctaagaattaggttctaaacttatccatgtgactctaacggccatctaatcatattttctatcgttgccaagaaaaaattataaaaaaattacatatttcatatttagcttaaataatacttttagagattaataaaatctctagaattgataaattataactccaatgcccatttctaaaaaatgggcccacaacaattataaaattgtatataattataaaatactaataattaatgctaattgcctttactaatccatcatctaacatgcagtcattacaaaatgatactctaaaatgtatatagaattttgcttataaatttgatacaaaatataatatatgtaaaatttgatttttttttttttgtcgaaacattatagtttactgaaattacaaatggaaccattacagaatgggaagggatcttcaatccacaacgttcattatctatccaaacgaagtgcttagtcaaaatttaatttcctgaagcattctaagtaagtgtaatagtagcaaaattgccactaccttggaagaattatagaagagaatccttcataaaaataaggattattttttggaggaaattcaaaaacatagcttgtagagtggtctagtggagagactttcaaaataaatgtggttatgaaaccaacctctaaggttcctaaaaacaaggggaaaaataaaaaagtaacacttttggtccaaagtctaatcctatcaaattcaaaggtggaaaaggtctgtaacacttcatttcgatattgattaggatattgcgtcgctatgccagaagaatgatagcaatacagtatactttaaatcaatccttggtacactattgatgatctcatccatgttttgtgtatggaaaaaatgaacatgttgttacatcagtcctaaataaaccaacaagttaaagactatgatgacatagcatgaatcaagacagctcaaattggtcactcaagtttgttactattttttctattagttaagttagttaatgtttgttatgtaactatcctaaaacttggatcattgatctataaaaggatgcctagtctcatttgtaatagttgcagaaatattaggttgagagacttatgtattgtgaggtttatttggatcttgaagcaagaaggatagagatgaagagagaagaatagaattgagaaaccgagggaagcaaaggtcttcaagggtgtttcctaagtgttctgagcttcatggtgaatattgctcaaaggaaaagatcaccattgtaacagttcaagttatcttgaacaaagtcttgtaatctgccattattcatagtgaaaaggattccttggaagaagttcaaggggaataggctctctactcattgtagaggaaagttcaaatccctctaaaatctcttgtgtcttttattggtttcagttcttatttttctttctgcattactattattcttctttgttgtctttaatttttggttcatatgatttgttggttttaattcattgtaaactgaggttgttagttatagcaaatggtatcagagctaatggtttatgtttcatagtttcagtttggtaacattggcatgaaactagagaaaatagaagataaggtatttgaatcttggtttgaactgaagcttcgagaaaatcaagaatcaaacttaagaagagcaagaaattatgtccactaataagataaatatagaaaagtttagtgggaagaatgacttcttcctatggagagaaaagatgaaagctcaccttagaaacatgggattggatgaagcactgaaaagagaggataacatctctacaacattggaaaaatctaagaaggaggagattctaaaaaaggcaagaaatagcagtgttgagccttgaagatgagatcttgagaaaggtggtttgagaagagacaccagctgcaatgtggaacaagttcgaacaaaccttcgtgacaaaatcactgcctagtagggtctacttaaaacagaaattttatgtttttagaatggatgaaggtatataaattgatgatgaaaatctaaataaattcactaaacttttgtctgatctttgtagctcaaatgtgacaattgaggatgaggatcaagccatatgatcaatttagggacacaattctatatgcaaaagatagtttggtgttagagaaaattattggggcaatctattcaaaaagaaatgtcattaaagaatagtggaaagcttttaagaaccaatggggaagttcacgtcacaagaggaaggaacttacaaatatccaatagtcaaaacaaaaattgcaacaactcagggtacaaaaagaaagcgagatcatcttccaaagactcaagtagagatagctctaaagatgacaataagtgctatgtaagtggaaagactggacactacaaaagagactgttatttcaacaaaaacaaaaataataacagacagaagaaagatggtaaaagtggaaacaagcatgaagactaggactcagccaactttacagatggctatgattcaggagaggttctgatggtggcttccaagtgttctaatgataaatggatactggactaaagctgaactttccacatgacataccagaaaccatggctaaagaacttcaaagctataacaggagggaaagtggttcttagagatagcaatacctgcaggatagaaggaattaaagatgttagtatcaaaatatttgatggtgtcatcagaacactcaaagatgtaaggaatgttctaaaactcactaaaaatctaatatttgttggaactttagacgatgcagggtaagcaaaaaaacttgaggatggagtcataaagatcaacaaaggctctatggttgtcatcaaaggagaaaagattaatgggttgtactacttgattgtaaataatgcacatgaagaggctgctgtagcagcaaacaatgaagatgaaaagactgttctatggcatagaagattaggacacataagtgagaagggtttgaaagtcatctatgatcaaggactgttaggaaaagacaaaatcagtaaggtggaattctgtgaaagttgcattttgggtaaacatcgtagattgagctttaaaataggcaaacatacatctaaatgtattttagattatgtacattctgctttatgggtctagaaagaatccaaactcatggaggtaactcttatttcgtgtctaaagtagatgattactctaaaaaagtttggatatttctgttgaaatttaaaaatcaagcacttgataaattcaaacaatgaaaattattaattgaaaatttaacatatagaaagattaaaaatttgagaactgacaatggacttgagttttgcagtgatgaatttaatgagttttgtagaaatcgagggatataaagacatagaacattgagaataactccacaacaaaatagagtggttgaaaggatgaacagaacattgctcaacaagacaagatgcatgatgttcagttcaggactacctaagaaattttggggagaagctataatgacaacagcctacttggtgaatagaagtctctccacaacaatagaattcttgacaccagaaaaaaaaaatggtcaaacaagccaccagatttgtcaaatttaagagtatttggatgtacagcctatgctcatcaaagtgaaggtaaactataacctagatctatgaaaggtgtgtttttaggatatcctcaaggttttaaaggttatagaatttggctaaaagatgaacaaggtttcaaaagaatcaatagtagggatgttatctttagggaagatgaattcccttgtctgaaatcttatgacaaaactattgatgatgtagataaatttaccactaaccttacaagtatctcaagctagatagatgcacctgatccaaatttagtggaacatttggaactagtataaaaaatacctaatctaaatcaggtggaacatgaac

SEQ ID NO: 2652 - DNA, 2553 bp, Cannabis sativa
attaattaattaatgaattaaaaataaataaaaaagtaattatagagtaatatcttgctaacaacaggtgctataaaaggtcttcttcccacccaccaaaccctatgaccattagtatttcttcttaaaacataaaaataattttgtccctacataattgaaatatacatatatttttatatataattttaataaaaaataataataattaatatttattttagatttcaattagtgcgacagagttcatcttcatgatcattattattcttattcaaatattcaacaccacttctattatatatatatatatatatcattattacattatctaactataataataaaccaatatatcttccaaatttatgttatcttacttataattattcaaaacatatttatttctttatttttataattcatttcttatgattaattagtaatacaattaggttaattatgttaaacatttcgataataacatttcctaattgtttagtttgtttaaggttgaaatatattcttcaatattgttcgtacttgggtaaattcctttggttgtaatgttgtttttaggcttattattgatgagatcatttctctgttggttgttattatggtggttcttatcatgtcatttcgcgtgatgcaaatggtgtaattcatgcactagtaaagtctattgtaaatttattcggagttcatgtttaggcaaatacttatcttaaatttttatgtatgactcttgttacagtgaatttagttcgttaataatactactttttctttaaaaaataacatttcctaattaatatagtatactattattgttgaaaaactcactaagataaacgatattatcgaacctaataaatcaacaaacaatataaaaccgaaaacctaatcccaaacaagtctagctcaatagctacacctcttatttctttcatgcgatctattcacttttttcgaaaaatgttatcttagttaatcaagtctcacgtatcataatttaaactaattaaaatatacaagatctaattttgaataatactaataacactacagaatatacgacgtcagatgtgtctcgtaacataacaataatctatagcctccttctccaatttccacatcatcaccaatcttatttgataatcacaattagtggtgtggataagcatatttattaacttagattagtttttttttttcaagagaacgtggaaggagataataaagacaaaccaatgaaagaatgtttatgtgtgattatatatataatgaggacttaaatgtaattttgagaaagtttaattaagatttcttattcataactttaatgcttgacatctgtaccattagcttataataattgaggcataatctttttgctaatgacataaatttatatatataaaatataatttttgccctttgctatctcccaagagctatattctttttgatatatattatcatgtttaatttaattattaattaattaaaataataataaaaaattaattttgaatggtttttaattaaaattaggattaggttcgaataattcaatggagtttaagcatgttacatattaattttattattttgatgattaggctacttaacttgttttaagatccctaaagaaagtgttatgttaaaatataaacaaaatattacatcaattactaatttaatttattaattccatttaatttagataaaagctctagtggaacaaagtcaaaatatatttatctaacaattgtaaaaaaagtgtatattaagtaaggattttttttttctactaataatagtaattgttttatttatgatttaagattttatgttattagagtttatcttgattgtatttttttaggatctaatctccttaaaatcaaattgatttagttaaatgaaatttttaattaaaaaaatagaaaatagattttttttttaacattgaaggtggagaattgaaaggatctcatctttatcatgagatgtatagtactattaaactatatttatgaccataatagagattctatttctaaagtcatcaataaatttgatactttagaattaaaaatatatatattaaaaaattagcttaaaatgccatatttttttaaaaaaatatatagtttataaggaaaatgtctaccgaaaaaaattatatatattaaaaataagtatattataaaaaatgtattaagttaaaatgttattttgtgatcaaacatctttgtattattatttttttatttattttttaatattcatcgttaaaaagtcagattaatccaaatagactatagtgatattgacaatgatttttttgattttctcgttccttgatgaaaaccctaaaagtattttgcactcgattggagtgtaatcggtgtttgtttgtgtattgtcgggttacactgatcttgatattagagtatgcgatcaataaggtgccttatgtttccccttcctatttttcggtctttggttgaaaaaaaaaaaataacttttgttacattcaaatca

SEQ ID NO: 2653 - DNA, 957 bp, Cannabis sativa
aatttattatttttgttttggttatggtgtagtttctttaaggagtgtccacaccctgatgaaaagcaaaggttggaactcagtaggaggctttcattggaaacaaaacaagtgaaattttggttccaaaatcgaagaacacaaatgaaggtatgttatcaaatttatctgctttatttattgttcttaattgttttagtaatgagaaagtgatgaatttgaatcagacccaattggaacgccatgaaaatattattcttagacaagagaatgacaaactccgagctgagaacaatatgattaaggatgccatgtcaaatccaatgtgcaaccaatgtggtggtccagccattcctggtcagatatcttttgaagaacaccaacttaggattgagaatgctcgcttgaaggacgaattgagtaggatttgttctttggcaaacaaatttttaggcagacctctctcgtccttggttgcccctctccctctgccaagctctgccagtttggaacttgccatgggacgaaatgggatgggaggtttaaatgttgggccaccattgccaatggggcttgatttgggagatggagtttctagctccgcccacatgatgcctttagtgaaatcttcaatggggatgagtgcgtttggcaatgaaataccgttcgaccgatctatgtttattgatctagcaatggcagctatggatgaattgttgaaattggctcaggctgaaggccctatgtggatcaagagtagtgatggaggaggtaaagaaatgttaaaccatgaggagtacatgagaacatttcctccttgtattggagcaaaacccaacggttatgtatccgaagctactagggacagctctgtggtgatcatcaatagtttagcacttgtagagacactgatggatgcggtatgcatttcaaattttcactctatactttcgaata

SEQ ID NO: 2654 - DNA, 1343 bp, Cannabis sativa
attgtggtggtgaagccaatcctgtctttgaaaactcacctttttcttgtcttgaataatcctcaacatgtctaatctccataagcatagccacaatgtctttcatggttggtcgatcatctggttttgaacttagacataggaatgaaacagctaatgtttgaagcatttcatgcattgttgggtcagatcttcctcttagcttttggtcaagaatatcacaagggtcttttttagtagctaaatggtcacgaacccattgaactaaatgagctccatttggtaatgttgggtccaatggatgtcttcctgttaatacttctagaagaacaactccataactgtatacatcactttttactgttatcctttgcattgatgcatgttctgttgtgattgttcaatcaattaaacagagttagtaatcaaaaagaaagaaagagttaccaattaatctaaacacaaatataaacaaaaaaaagaaaaacaacataaagtttgtaactttaggaaatatatgtagtacagggatgtttcgatatacttttaatctatctcattattgagaattttttagtcaattttttttttataattgtatatgttataaaataattatcatatatttgctttaaacactagtttagttaacttttacaattcatttccattttgtaacaaagaattattaaaagaatattatcgctaaagcaaatacataaaataattatcatatatttgcttgagcgatcataacttaaaaacaactataaaacacgataatttactaattcgattaaaaaaacatgaataaattgttcaaaaaaattaagaatacgatcgctaagcaaacacaaaaatcctaaaacaatcatcatatcgagcgatcataaaaatcacttaaaaacaactacaaaacacacgatcatcctaaaatccaataaaattatttcattaatttcaatcaagaaagaacaaaaaacataagtaaattaatcaaaaagatcaaaaacaattatcctatatttgcttgagtgatcataacttaaatcaactacaaaatatgataatttactaattcgattaaaaaaaacaaaaacataaataaattaagcaaacacaaaaaccctaaaacaatcatcatatcaagctcataaaaatcacttaaaaacaactacaaaacacgcgaccatcctaaaatccaacaaaattatgtcactaatttcaattaagaaagaacaaaaaacataagtaaatgaatgaaaaagatcaagaacatacccggagccatataaccataagagccagcaagttgaggcctttgagctaatttagcatcatca

SEQ ID NO: 2655 - DNA, 743 bp, Cannabis sativa
ctttctttcatgtcaacagaatatgacgattgacaagagttggatgagtgtgaaggatagatcatctgatgagtatgtaggaggtgtaaaggcatttgttgaaagagctaaggtttacactaatgagagtggtcaaattagatgtccgtgtgcggtttgcttgaatcgaaatctccacgatttaagcacggttgagcatcatttgatagagaaaggtattcagcatacttatactatttgggcttatcatggggaatcttacccgcctcgagaatatgacagtgaagaagaagaagatgaagaagaagaaaggggcagtagtaacagggatgcattggctgatttggtcggagaagattataataatcttactttttcagataaattgatgcatatgaaggctgttaatcaattgagtaatgagtcatttgattctcttctcaaattgctgaaagatgcttttcctcaaggcactgttttgccagaacctctatgtgaaacagagacaaatgctcagaatttgcagaagaagaggaagaacaacaacaacaagaatttgccaaagaagaagcaagaaccatgaggaatcgtatttgtcaaccttttcttatttcactgtctatatcttttatgctacatagtattgtatgaatgttatgacatcatttgaatatgtttatttgtgtggatgttaaatatctttgttagtgttttgctatgtgtttttagactttttgtttgaa

SEQ ID NO: 2656 - DNA, 1364 bp, Cannabis sativa
tctctctctctctttctgatatttgaccgaggatctttgttttttagctttcttttgcttgcgaaagcaggaaatacgtcgccgtaatttctgaaattgattcgttttttttttcttttttagattcaattggttcgtatacaattgagagtgccggaatatggttggacgacgcagaaggtgttccactttctcaattttgtggtgaatgggggtttgtatcttctgaatttgctaattgattctttggtttctaatttatgttttatgttattgttagtggcttatgcatggttattctttgttgatcagttcgagcttttgtatttggcttccgccgcgatgtgcagaagttgcaaccggaggttggtttggatttgaattttgataatttctaatgtttttatcaattttcctttttcttttggtttttaatgtcgaagctgattttttctgttctcttgtagattgctcaacatatcttgcttgatatgccaagtcttgttttctttacaacttatgcgcttctagttctcttctgggcagaaatttactatcaagttagttcaatcttttgcaatcctacatttcattgtaatcttatatgtttgggaatatcaaccatattcaggaattctcatttctattttaataggcacgcgctgtatcaactgatggattgaggccaagcttcctatctatcaatgcggttatttacgtaattcaggtgatgtttctgctccatgattataaaattttagtgttgctgccgagattgaggtttaagggttggatgtgttcatcatggagcctagattacttttgctattctcccatactttatctgtactctattgattaatagaattataagttgtgtggctgccacgttgagaaaaattaacagataattattagtttttttagataagcttagtatgtaatattggagttagtctaactctgggtacctgaatataccttttcttttattgatacaccttgcatgtaaaagcatcttcaaaggagctctttaattttttataataatagctataggttttactttttctacaaaaatgagtcaaattaatattaaaaaataataaggggtagtttggctcgattttatttggctctcttcatgtaacatgccgactttttataactacctgtcatgtgttgtttgacttgtataggccctcttgggatttatgttttttgtgattgcttcttgttatctaggtactaccataaacctagcaattaaaattcgatctttaatagtaagtttggagctcaattcgggaaatgagcttgtattttacatatgttggatatcaaaattcttttttttttttttt

SEQ ID NO: 2657 - DNA, 919 bp, Cannabis sativa
cacacttattaaaagtgtgatcaagcatttcacagtagtaacaatagttttgaatcccatcatacataaatttgagccacttaatacatgagagggacctgaacttaatgttaatacctctacgaagaggcctagtaacatcaataagaactcttatacgcataaaaggtgaaatagtatgataaagagacggaatgtgaacttcaatcagatcaccaatttgctcagacagaaactgagcaggatcagttgatcttttaccaaaaggaatgaggtgaacctgaacccaaagaggaacatactttacttgagaagcagagatagagtcaacctcatcggggatagcaaagagaatgaaattatgatcaaaatgccacagttgtccttccataacccttctcctatctccttcgcagccaaaacgcaccatgaacatacgaaagtggtagtccgaaaaagagaaggggcatcgaattatccaagcatccttcatagcattggccacccattcggctttgacggttttaggggtgagaactttggcaacaagacaaaaggattggggagaagaatcagggcgcacacaaatatggtcaaactcatgaacaagagcttcttcttcaataagattgatagtatattcttggtgttgagaggagatactcattgtagaaaaatggaaagaaaacccagaagtttggtagagaaaagagtgcaggagtaagaaccgaactataaaaactacataaatggaaaaccttaaatagacaagtttagaataatacctggatgagaaggggctcattaagaacctataagataccaaatcgacccaacctagccataggtcagagcctgaaaaaatagatcctctgctgcagaagatcccactcgaagaagaaacgatgataattaaaag

SEQ ID NO: 2658 - DNA, 3341 bp, Cannabis sativa
cgggttccagaattaattgtttctttttctccacttgatctttccatgtgtttagcatttggtgagacatcatctaaagagtatcagtgtccaagaaatggtagacatttatggaaactagctgcaagcagagttggccatgtgacatccttccataaattagttgttattgttggattatggttgcgttatgtcaaagcttatgagaatctgttacagcttgttggatattcaattgatcatatcttgaaaggattgcctacaaaattgtctgaaaataaattgttttcaagatctttcaaacagctttggaaggtggttattgatgctgagagagagctacctgctgagtctattgcacaggcacggcgaatagcacgttatagagcagcagccaatgtacagtctgttaagttaaaggaatcccatgtcgatactcgtctcagactcttttgcatgatctttgcacttcttcaacttatctggaaacctatatgcaagttatttcattttatcttttacttcttattttttaggaggaaattggcagaagagttgactgaagaatacctagaaattgtatcagatgattcatctatgcagttttgctttattttgaaccttggaaaaattttagtcaacatgtctcaacctgctgctattaaaaatttagattcgcatattggaatgttgccccccagttttatttcactgtctctgtcaatcaatggattattattattatacttgaaagatgtatgcgaacagtctttgactgtatcttgtgggcaatttgaggttaaatcttcatctttaatggaacctcttctaaggcaatgcagttctaaagatcttctcagtgggaaaagacattggcaggagaatcataatgatatgaaatctatattatggtgtgaccttgcacacaagtttcccttttcagaaactagtaatactactgcaattgataatgctgaaggtgcttgcagctcgtctctggagaaatttcttggagaaatgtggttaaattgggaaaaaacttgcatgaaattagatggaagtgagatggagttttctgaagacccgtgccttctctgtgaaactaaaagttttttgacatatccagatctaaggaacttggattctaggatttcaaaatgctttttcactttaggaaggttgcagttagatctggggtcttcatcaatattatcaatttctgtgctcctaaggcagatagaacatgctctttgcaggactaaggacactgggatatcagaggttacttcacatccaccaagaaccattgaagatccttctgaaatcaaatgggagaatatgtacaagtacttttctagtagtttgagtgcggcggtgctaaaaattctcccagagaaacatattcaaattggagtgttcattgctggtcctttcattaaattgtgtctggaaaatgagtttagcagtggcaatgaggtcacaagtcatgaggagaatccagatgaatttcaccttgcatttgatgtaaacaacattgaggttgcattttggccatctttaaaaccaaattcatcatcagttgcgggaagctcagataataatgatatagaaccagagtgcagtataccaaacaatgatgcagggccagaataccagataatttatattcctaaatcaaataatgaaaaatttatagctgactggtggatttttctttgttcttacttacgaatcaatggtttgaatgcttatttgggggacagtgcagagaaacaaaaacatcaaattttgtgtctgcagccattgactgtccacttttcgtcgtcaaggtaaaactttatggtcacttccttctgttaactttattaccttgatttcagggtacccttttttcttgtttcattaagactattttatgtgcttccttagatgaaatgaagaaagcatttgatgttcttttcatcactagtttttttctcttatacagttttacataaatggaagtaatgctttcaaatgatctaggatgttttgtttcctccaaaatgaaatgaaataacataagaagattactgattgactttaccaaaaaaaaaagagattactgattgagatgagactattcgttgtcaatttaaaggcttcatcttttgcaactcttacttaaacattgaaaacactagtgaaatctaccttttaaaggtttctgaaagagttacaaatcatcacaactgcataagttgaagtaaagaactttctttttttttttttttgatttggaaagaaaaccattttttttatctctcttaacttcctttgctagaaccattgatcatgccctgatgttaaatgaactatatatgctctgcagggaatactttcactcgtttagcacaaacattagtgctatttcagcctctttgtgcgttacagctacaagattgactattttgttatgtatggatgagctatatgctctttctcaggtattgttttcttttactagtgcatatcgatatgatgatttataaggtattctcaaaggcagataagcataattacaaactctaaacaaatagacataaacagaataaaactatacaccactggaaatataatatgtattttctctatgcccactaaagctcaggagacccaagaaacttaattttttctcaccaagaaaagaaaaaaaatccgtctgtttctcttcagtccattttccaccagcttgaatattaatggttcgaatttaactattgaaaggccttttgtaagaacatcaactttttggagatttgttgaagtatggttgggactaagtataccatcctcattcttctctttgataaaatgttgatccaactccacatattttattctcttctctgtctgtatctattttgcttggctacttttgtgaatatatcagccaagctcttggggattgtttgagctcataaagggattttcaaagtttgcacactttgtgggcattgttcttggtctcaaaacctggtggaatctccatctatatttattcgtttaggtatgcattttaaaatgcatttttggcatccatttgatgtaaggcctagtcaagagtagtacactagtgagaggaaaacacgaatgatatttgtaagtttgagcgaatccttttgctaccggcctagttttatatcgacctacatttccatctagtttgttttgacattgaagtgccattttacatcccacattgttttccttgtgacaagtcagagagttcccatgtgccattcttctctgatctcttctctaatagctgtcctcctctcaagttttcttcaccatgttac

SEQ ID NO: 2659 - DNA, 1477 bp, Cannabis sativa
aatttagttgttactgcttactacgagtagtttgatcagagcaatgaattgttatgttttaatacaattctttatgcttcttcaggagtgaaaaggaaccccttttgttgttgtataatttagttgaaatttttgaatctaagagagggtgaaagatgcttcagattaggcttagcaaaaccccatccacagatggtgctggatgtgccaaacccatgccagtggacacagtgactgtggcatgcccagatcacctagtccttgctgatcttcctgtagcaaagggtattggtgcggcaattgctgcttcacttgtcaaaagcgtaggtcggaggtcccgtcgtcagcttggggaaagggtccatttctgtgttcgctgtgacttcccaattgcgatatatggacgtctggtatgtgttgatccattttgctgttatttgggtgttcctattaaagcttatttgcttttgatcctttgcttttttccatatcatattaatttggtactgcactgtgtttctttctttcaagggaacgtttcccttgttctattttgagtgtataatatataaaaatctcctggtccagatgaagaaaataactgaggactaaggcctaatttagagatttgcaacaatgcttcaacttcccttgtgtataaactttttagtatcgactgaattgcatgcaaaaatgtcttctgcttactgtttttaccttcttgtgcaatctattgtaaagtgccttatttgtgaaattgtttgtagaaagaatagtgctcccgttttattgttctattctggagatagcattaaataagaaaaatggtcttgctatcatatctcgttttgctgcaaacaagtgtattatgctcctgttttctttttgttctattctgtatctatggaccttaattaacaattttaacttcttgcagagcccctgtgagcatgcctactgtctggactgtgccaggagtgattcaatctgctatctgtaagttgtcttaactttttatataatataaacatgaacattaggtacaatgtaagttgtctgaacttctttcagttcttttgtaatttttatatgttcatgctgcttgagtcttgactattattgcatgttatttcgatgtttcatgtttgctgatgaggtacaatacagtcagttacaaattgcatctgctcatatttttgttatgacaaattctacttatggatagataatcgttttacctgctaagtgagaacttatgtttcactaggctatgcattaacactagtaagtaagatattgtactctaatatttggtgtcttgaaaagttatcatggtgagttggtcttagaacaagcaaaacacacataccagaaagaaaaagattccaagtcatgttgcaacttgcaattaaaactcctgctgttttttgttccaaaatagacgataccgaacaatatactatggtcttcgttgttg

SEQ ID NO: 2660 - DNA, 2581 bp, Cannabis sativa
gtttgtacttttacttaacttttcaagtgactttagtgttgtctacttgcaaggtatcactctaaagatacaaacttgggacgtctcatggagaagcacggtccaagccttcttggccctttatataaggatcctataacaagttatagcctctttcagaagttctctgttgagcaccctgaggtaaaatccaagtttttggttattcttctaaccttatgttgagatatcatagtcttgttgtcctaacatgttacatgtttggtaggtttattggtcgattgccctaaaagagctttcggtatcattccaagaagaaccaaaatgcattctagacaaatctgataagtcaaagcatggcggatcatggcttccgggtgcagttttgaacattgctgaatgttgtttgttgcccacttcatatccaaggaaagatgatgatagtttggctattgtatggagagatgaaggttctgatgattctagtgtaaacttgattacactaaagcaacttcgggagcaagtaatgtatgctctcactatctttaccttggcttatgttctaatcactcataagtttgttgatgtttcaacaacattattcacagctcggttgctaagtcgctggatgccatgttttccaagggtgatgcaattgcaatggacatgccaatgacagctaatgcagttataatttacttagcaatcatactttcaggtcttgttgttgtatcaatagctgacagctttgctccaaaggaaattgcaagtcgattgcatgtctcacaagccaaggtatctttacccaggtcaatatttccccttcagaactccactttaacatttacaaaactaactccaaggaaagataatcccacttcttcaagaaaggtttatctgcatttgatcagatattgttgctgaaaataccataaaacctaaatctcgcacatataaagatgtacgatgttagttttatggtaatttttgtcgtgcactcttgctgtcttatgtctcaacatgtattttcggccgttttgatttgtagccttatttttgatttagatgaaacctcttattcttgatggtgatcatacttccaattttagattaactttgaatttgtttgcttcatggtgaatttttctttaccaaaattaaatttcaggatttcatactaagaggcggtcgcaagtttcctctatacaggtaacaattttttgatgtgctggaacttaagtctgtcttctttgacaatgacacagatacatgtcataacaaacttacgaatagaaagacaaaaaaggaaatagagttaattagacaaaagaaaaagtgaagaaagactagaaatgaagaaatgggtgagcgaaaatataaaaataatggatgaagacaatggttctaaatcatcaatgcttatttcatgcaattatgctagcaatctacaaatgtattagcaacataaataaattagcaaacagtgccaatagaaatggactattaaaagaaatgtttgcttcagatttatgctcaagcgaattggattagtgattatttgttgtgccatgctctattactcgttgcagtcgagttgtggaagctgcaccagatagagttattgtcctccctgcaactgggagcaacacaggcattcagctaagagaacaggatatgtcatggggagacttcctctccagtgttggcactcgttcaaggtaatacgcaaatgaaagattcattacttttatatcagaacttttaaatgatccgataggcttctgaaccagtaagtttcaataacagcagaatattactcatgaaaatagcagcagaagaaaagaaacaatagaacattagcaattgatgaataattctagaagctttattgaaacagtaaaaggacaccaaagtctcttacaaaaagagagagaaaactctccatcgtgcagagaattatctcaattcttgcctaacaaacacaatagctccctttcggcactaaaaggcctcacttcactcggcacccaaaataccctccaaaataacttactgccagctaacccctgacctgtgtatctcccaactcttctagtgtaggtgaaccttatataaggtctagtaatcctatcatgatgtgaccaaaacatatcctagatgacattaaagtttttaatgctatcatttttccttttattggcagaaagtactctccatgctatcaaccagttgactctttgatcaatatactattttcatctggaacaacgggtaaatagatttctttaaagctcatatttagtgctaactgacattcagctaacaaggtttccatttcttatttatcatgttcatcaggagaaccaaaagctattccatggacacatctttctccaattaggtgttcatctgatttttgggcttatatggatatcaaagttggagatgttgtctgctggcctacaaatttaggatgggcattgggtccatttatacttttcacatgctttttgtctggtgcggtacttgctctctatcatggatctcctctcggccgtggctttggcaaatttgttcaggt

SEQ ID NO: 2661 - DNA, 1384 bp, Cannabis sativa
caacagtattgtggtaattatttttactaaaatcaaattttgttgggtcttttctcatttctcattcaattttgttgtgttgttgtacatatttcttacaacgtaaacttctattttgcagatatgtgagagatcattgactacttcaactggtggtccgactggccctccatcttcatgtttcgtaagggcagaggtgcttcctagtggatacctaatccgaccctgtgagggtggtggctccagtattcacattgttgatcatgtcgatttagacgtgagttccaaacgaatcctaactttgtttgttgttccattattttttctcagaaaactcaactgtttttctttttcaggcttggagcgttcctgaagttctcaggccactctacgaatcatcgaaaatccttgctcagaaaatgaccattgctgtaagacctataaattttgtttgtttattgatagttgtggtctttgtaatttatgtttgacttttgtttcttttgttaggctttgcgccatatacgacaaattgctcaagaagctagtggagaaatacagtatggcggaggccgccaacctgctgtcttaagaacatttagtcagagactctgcaggtaaaatctttcatctgtaaaagcagtaagaattatatatattttgatttaacttgctttgtttactttgtattgttcttcattggttggtacttctttatgcatggttataggggtttcaacgatgcagtcaacgggtttacagatgatgggtggtcgcttttaggtagtgacggggttgaggatgtaaccattgttgtcaactcatcttcaaacaagtttctcggttcccaatacaacgcatcaatgtttccaacttttggaggggtgctgtgtgccaaggcatcgatgctacttcaggtatgttcaacttaccgctttaaagtctttgtctctgctgtggattggttttgactcgatgttcatgtctctgttgtgaatcagaatgttcctccagctttgcttgttcaatttctgagggagcatcgatctgaatgggctgactacggtgttgatgcttattctgcttcatgtcttaaacccagtccttatgcaattccttgtgcaagatctggtggattccctagtagccaagtcaacttacatctcgcccatactgtggaaaacgaagaggtaagatcttagccactcgaaagaaactttgcctcgcctattcttgttataatattttgtttggtatcttaagtttactttctgtaactaaatgcagtttcttgaggtggttcggttggagggccaggctttctctcccgaagaggttgctttggcacgggatatgtacttactacaggtttccatcacttcac

SEQ ID NO: 2662 - DNA, 911 bp, Cannabis sativa
aaaaatccttaaaagaaaatttgatccttcactcactctcccctgaccggcgtcgccaccgccacggcgagtcccaaccttgtttctcgtggttcctcctccaatcacttctccgctgaattattaggtaaaatcagtgtcctttcatctctaagtttggtttttgttcatgtttattcttatgcattcgatcacttcacttcacttgtgtgtttctcaagtgagagtgttgtttgcattatggtttgtaattagttgttcttggtgtgattcactgtgatacgtatctgattttgtttatttctggtctcttctttgtaattgcttcttcttggttgctcactatgtgtttgttaaaatgcctcaaaagttattagcttgtgattactttgtgtttatgtttgattaaatatattttctaaagattgtttgaattatctctcatcaatctttgattttgatctcatctgtctgtaatatgataaaaccatgaccaaggatgagtatgagaatttttattcatttcagatatgtatattggtttatatatagatgtgatggtccattttaaaacaatgttacagtgtgctcaacttttcttactaatttttccatgtagtatcatcctggaatggaagtttgctagaaggaattaagcaaactgatcaaatcgaaatcagtactcttgtcgaaaaagatagtctgtttgtttctggagggtttcaaggagaacttatttccaaggtgaattttattctgggtcttttgtttttactgatttgaatgtactgattggttggttacttgtagtcttaccatgtattgatttaagattctgcattgaatgactttttgcactgctgcagtgttaagactatgtatttgtggtctttgttgtttgaaaactttct

SEQ ID NO: 2663 - DNA, 2226 bp, Cannabis sativa
tctcctaatgtattcaagtaacataagacgaatgtaatatagattggaagtagtagaaaattagctgttagtgggttcatcactcaagatttgagtttgtaatacatgtacattaattttatttttaggcccatcctagagatgtattttctgctgtccaacatagagaaaacttacaggggagaaatttggtttttcagtcttcgtgtaatgtattataaattacaaaataattatgtataccatttgtttcttttaaagagaaaaataactttttgtgagatggtcttttgctcatagaatatactttcttcttcacaaagtttttttgaaccatattatattattatgtaacttggtggtgaaattgaacaagcattgtgtacacacgacattgacattgtaagtatatctcagaaataggaagagttactagaagatggtctttattacaaatcaagacaaatagtggtgttttacttgaaaaaaagattactaatattttggtggaaagatgcgtgaatgggtagaaaggatatcttgctgaatgtatttgttggaattagttggatcaggaatccaacggatttcactcatgtttggtgtctcaacaaaagccatggtgaattcacccaccttctcaactttccctctttttcctgccctcaacacaaggctgtttctgttgtaagagaaaatccctttggacaatcgaatgatatctccagcctcaaaggcttgacattcctctccccacaactggaagtgaactgctgccgtttcatccgccacaagcgacaagcatgtcttgttttgaccttctgttgttgtttttcctttctccaacagtatgaactctgtgtttatgttgttctgagctgcaggtactatgtctttcaccttcacacctgtcatctttgctgcttgctctcttctgcatcaacccaacaaacataccaaattacatcactttccctcaatagtgttttcctaatctcaatgatagcatgagaatgaattgtgatatagtgctgaaaaagccacacccatttaacttataaacaaaattatagttctaaagcaggcaatcatgaaccaagctaggttcatagcttgtcctaaagtgtagcttctttggttctacagttctctcttctcaaccgtgagtattcattttggatttactaggaaaatatctcaaaggatttcaatcagtgatggtcaagatggtaaagccagggaagccattgatataaaaagtcaataataaaatgatgtgttattgtatttgtatgtggtagaatgtatgaatgtatctatcataagagcttattttctggttttaaatcaaagaaattgataccccaccatagaattttcatgaactcatcagtcatttgataataggtaatagacaattcttcgaacacgtagcgtgcatgtcatcctcgttggttataactgaataaatataagagcagtgggcagtggcataaaaataaggacagcattcttatcttctagttctaatgtataccttaatatataataaatctgtattggttgatgattagaggttgagaatcctttatgagagaagtaaagtgccgaaaatgctcttcagttatatccaatgtggtagatgaaattagaccaccttcagcttcagatcgttcgctatagatatcccaggaaattatacatcctacatgtataaaaaaagccaatgtatttactattcatccagaacgtcaaccaaaacggtgcgtttttagttttgaagacatatcctgcttttctcatgcccaaactatacaaccctccccacatataaaagctaatatgggcttaattgggtttggtcaaacttacccggcccataccacaaaaattagaaaaaaataaaatatcttggaagcatcttacttataacaaaaacaaacaataataactcttgtaagtttgaggttgttggttggtttctgtaacttttgagctttttgatggttacaaaaaacgattcatattcacaacaatgaaaattcaaatttcaaatcttgctaatgctctgaaaatctattttggtaataagatgtttgagattttgctgggaatggtttatgaattaaagtcattatttgtgtattagcaaagttataatattgcgtctctttgttatcattattgtgacacctgctgccagtgatggtgatttggttcatgggg

SEQ ID NO: 2664 - DNA, 2021 bp, Cannabis sativa
ataagtatggcttcattattacaatcacagcagcagtgtgttagtattttagtatcagtactatttatactcttcttggcaccacaagctggtggtattattactctgccacaaaatgaaggtgaaaatcctcttcccattactatatgttctttgtttttttattttttattgtaacaatattagatttaagattgccaataacacaaaatcataccgggagaagatctctcgaaacgagtattgaaagggcatgcttagttaatttatgaaagtgttctgttttgttcttagtaaaagtgtttttagtaaaggttaatttatggaacgagtatttttatttggtgtcatatttgatatgtattattggagttgttaccttaaaagtaacggtaaatagcggcataagttcctaagattgtgagttagtaagcggcataaatctattgatttttttagcggcataagtatcaaatctttgtaaaactgtaatttttctcctgcttcgtcaggacagattctgttattatcttaaacaggacacatataaggcttagattctagatcatagagtctagacggaaacatatagtatcagttactttcaaatcctctttcaataaattcataatagagtctgtattgacaaatctggagaaaaattacaattttacaaatattggatgtacttatgctactaaaaagaatcattaggtatataccgcttacaaactcaaagctttaagtacttttttaccctaattcatagattttgcaccaaattagtgaaaaagtactccaaaatggtgtaaccattggagatagtcctaattagtagtaaaaagtgagatgtatagtaagatgtacggggttctatctcaaaactaattaactatgactgaagtagctcatgcatctacacattatcaatctcgataggactctttaacacaaagtgactcagttattgattgggaaaaagactttgtccatacaagaaagctcatggtttgttagaaggcttagccaatattaatctataaaagtgttgttttcatttgctatgcagtggatgccatcaaatcaatagctcaagaactaaacaagaaagactggaacttcagtgatccttgtagtaaccaatccacggttgataccgcgcgcacaaatgagtacatcaatgaaatcacctgtgtttgctccatctctacatgccatatccaaagcttgtaataaattatcttgtaattcatgtatgattacataatatgttagatagataccttacttgggttcattttctcttttatgtaatattatatgcagtaatttttcaggacaagatcttgatggtactcttccattatcaatatcaaagctacctcatcttaaggcaatgtatgtaacaaaaaaacaacaaacttttaatccttttaattttccatcctagttttttaaatgtgcatattattggttatgatctaattatttattttcatatttaaaatcttgttggttgtagctatttaagacaccttatgaattctcaaaaaattatgtacatagttgttgtcttgtgcagtaatttaagaaggaacttcctcagtggttcgataccaagagaatggggttcgaaaaagttggaatccttgtaagtatctacattaatttagacacattacacattaaatctgtttattggccctatgctctgtggtattcagttttctagtggtcgtttgattatttctcttattctctatttttattggaagatcattagctgatagtcatcgataagttgattctttcaaatgtttatttggtttgggaacttaatttacttcatatttatttgatgtttgatcgctggtggcttattggatctttagttgaggttgctattagggtatgaacaagtaaaatgttgtggtgcaggatcattagtgccaacgacttatcaggaccgatccccgactatttaggaaacataaccactctcaccatgttgtatgttcttt

SEQ ID NO: 2665 - DNA, 1130 bp, Cannabis sativa
tatttgtctcaggccacagttctttaatgttgcacaatatatcttcatacccctcgctgtcctcctcaaggctctcctcacaatcttcctcagatgcatcgctatctgaaaaaagttctctaatttcctcctcttttggattttcttcttcctccatatcatcaagttgtaaattccccactgatctaatggtttcttcctccttgtttggacatatggacctcctctttcttgtgtaaaccttcaattgttggtcaatggtcgactctttttcaggctcgttctcctagtaccgatactcctttctcctttttctgatcctcaaattctgccagaagtttgcaaccctcaatttttctcgatttttaggcctaatacatattagttgcccttcaaaaaatttgtgaatgattggtttcttttccagtaaactcatacttttattgataaagcccatatctcttcttctctcatcactttctctctcatcactttctctctcaccactttaaaaattattttttgttcttatttttgaaaacataatttgaaacaaaaaacaatgccaaacatgctcttaatgttttatttttttttatcattggcacacttggtgcctaattgagactaagagcctcagtaccaagagatccaaggttgaaacatggatccttagcccatttggaacccccctcccaacaaggctcaataaatttattctaaaaattttgaaaaaaagaaaattaaattaattgccaatgaattatattctaaaatatattcaaattgtgaactgaacggataagagtgttcatgattgcttttgtctatttgaagtctaggatctaatttcaaaatactaattgcacaaaattgaaatttgtttttgggcccatcctttatatgaaaatgagtaggtgaagaactcatgtgtgttattttgcttttgttttactgcataaagtggaggaaaaccatggttacatatactacttttgctttaatgcataaaagcaaaagtagtatcaagcaataataaaatttcaaaaaagaaaaaccaaaagaaattacatcaaaatgttcaaatctctacacaagtcaaggaatgagaattcctcaaaatgcttggt

SEQ ID NO: 2666 - DNA, 662 bp, Cannabis sativa
atatatatatatatatagctgtatgtatatatgatgtgtttaaacatagccaaaaactagcagtgtgcgcagtatattgctaaaaagaatatttggtcctttggtttttatatatgtgtttgtgcttcgttttcctgtctattttaataactccaagcctataccatttttcctgtctttatttccaaaacgatttaaatctaaatatgtacgtattaatttatggttttaaacaaaattaatgtacccaatacataaatccttttgatatatccacaaacaaattaggttagttactcagcaatgcacgcgctaaacgcgtgtgatgtatcgatgtatacataatatattggatgtgtatgtatatgtatatatgtatggtgggtatacatagtatattatatgtatatggtgcccacagaaaatgtcgatcgagaacatggcatgcatctgagtactatactagtgcacacagcggcaacaggtgccagaagagtagcgaaagaagggcctcatggtacaactagctttcagttttggcaaatttgtagcaataaaaagaagctataagttaaattatatatatttttttattttgtaagatcagaagaagaactatctacttttgcctttttgatgcaatatgtctatttagttgtgta

SEQ ID NO: 2667 - DNA, 2344 bp, Cannabis sativa
tcaaaaacttatgttccatcaattccttcaatcaacattgaatatgtctgggaatgaagctggcaccccattttttccataagacttagaagttctgagcatttatcagctaaaccccttttgagtaagccatcaatcagaattttccaagctacttcatcataattatacccacaacgtagcagactacagaaaaaagattttgctttctcgtcattctcttcttcatataatccgcaaacaagcaacttggagcactccagagaaggtaagtgaccactctcaatcataatatctactagcttcattgcttctgcatacacttgcaactcacagcaactactgaaaagtgcactataaatatcctcactgggagaaattccttggtttatcatgtgatcaaataccatttgtgcaacctccaagcacctccgtttgcagagacctatgatgagcttgctataagtcccaacgttaggtgcacaaccatgttcattcatcttatcaaaaagcttttgaactacattgaattccagtgtgctccacacatcattaagatcttcaaagggtgcatttgaagctaaatctagtcctgcagtatcactagttgtcttcatcccatcttcattttttatatgcttgattaggaaaccataggtatgatgagaaggctcacaaccagcattagtcatgcgcttaagaacatcaaatgaacgctgtataaaccccatgcgtccatatccagcaattaataatgtgtaggtcaatgaatctggggaaactccctctttattcatcttgaccatcaaatcctctgctttttccaaatttcccacactgcagtatgcatgaataaatgtagtgtaaataaatacatcaggctgactaccagccaaaatcatctggtcaaaaaccttaagagcatgttcaaagtcgccttctttcaacaattcttttataagaactgtatatgtaaggacagtaggcttcacatccctagacaacatggtctccgccagcaatgatgcttcccgcagctttttctctttgcacagaccatcaatcagaacattataggtataggagtttggcaaacagtcatcaccaagcattccgttaaacaaagattgtgcctcattgatttttccaaccttacaatacccatcaataagagcagtatatatgactttatttgcctttattcctttctccttaagagaatcaaagagggcatgggcttctttcaaatttccccccttgcagagggtatctatgaaaatactataagtccactgatcaggaaccaaaccactttcattcatcaaattcagcaacctatatgcactatctaaatgaccaaccttgcactgcccatgaattaaggaattatatgtgattacgctaggagacagcttccggctaagcatctgacttagtaatgacattgccttgtgcacatctttccttttacaaaacccacaaatcaattcattgaatgttcgagcatttggacaagtattgtttgattccatcaaacccaagatttcaagtgcggcatctaacattccttccttgcagtatccatcaatcaaagcattgtaagttaccacagtaggaactaaccgtttttccaacatcccattcaacatatttcgggcttcatcaagcttactttcctcacacaaaccaccaataagaacagtgtaagtgtgaacatttggctgacaacccttctctaccatcttcttaaataaattgtatgcttcaattctcctacccgatccaaacaatgcatgtataaggactgtataggtacgcactgttggaaagcaattatcctcccccatttgaaagaacaagttgaaagcatcattgattcggccagcttcacaaaggccatgtataagattcgtatatgaaacctcattccttcgacaaccctttctcggcattatctcaaacaccttacgagcagtatctacatccttgttcctacaatgtcccagtatcaaagaagtataagtaaacgtatccagactcaaaccagcttggactatcttagctacgtacaactttgcctcagcaacattccccaatttacaataagcatttaccattgtatttaacgtatatatattaggcacaaccatgttatccaacatctccaaaaaaacacttttcaactcatcagtcatgagaaatttagccagcgacatcaacaacatattgtagcacctcaaagtgagcttaaactcaaggttagcatcacgattcatccgccgcaacaactccaacacaaatctcgcatcttcaatcgaaacacaagctttgaccatggaaatcc

SEQ ID NO: 2668 - DNA, 1360 bp, Cannabis sativa
tgaatataaaactaaatcttgttagttaccaaacacccctatatactattattattattattattattattattattatttccttattcaatgaataatatacgtgtaatgaagccagacttattttggattgagtgatcttgactcttgagtgtgcttttaggactcaagcacctttaagtttaatttatttgaaatttttgcacctaaattctctccattattatatcacttgcacttaacttaattttttaaatttaaattttaagtgtaaaattcttcaaactagtaaattattaataaatataaagtattatctatttttcacaattaactgtagactacacacctttatacacatcacatgtacttatattagtatagtacttaatattattattattgagataatattgtctaatattcccttcatcatcattgtctcacatcgattaaatgagaatattgtgcgcactatataagcataatattaattttgatatgatggttaattaaattatctaatacatattataacaaaaatatttttatttttaatatttaattcactttttctcacctaaaaaaaggctctcttcactttagttggtcaccttaattaagttgcctaataacaatgtttatgtatataaatataaattgaaagaagaaaagaaagcatttattatctccaaacttatataattaaagacaatcttaataaggtgctacgtacattactatatagctaataattatcagcaaactatggcgctagagatgatcacgtatacctatattaagcacgaaaaacatcatcatcagcacttataaaactatatacgtagctatactctggatggatcgtgtcaggtgtcacaatacttacttagaagctcttccaagtattctggtcccaaatcttcaagcaccaccaaatgattttctgttgatatcttattattctcattcatggaagtagtattaatgttgttgttggtgtcttttatttgcaccttcttttgggaccttacagcagcagggccattattatgtctgagcatggagtactttcttttgagagctaagaccggagaccaacctcgggtatcaaatccgtactcgatatcctttagcgactgcccaaccttgtccgctggaaaattaaggactgccagcgacccacgcgttgtgaatgcagcttgatcataagccaaagcagcctcagccgctgtgccaaaggtcccaagccacactcttgcgccatttctcgtcgagtctcttatctccgcagcgaattttccccaaggccgctttcggactcctctataggacacctcatcatgatcacgatctttat

SEQ ID NO: 2669 - DNA, 775 bp, Cannabis sativa
tacttgaaatctcttacatgtcaaagaaagtttgcatccttgaatcgaagctttcatctgtgatttgatcccaaaacttccgtagctcagctttgtctattgaagaaacattttcacttctttttctagcgattaatgcatcaaacaactccatcgcgaacctactcctcggattcttatcttcctcatcatccatccctgtaaaaatttttttataaacttatctaaagacatatcatatgtacgtataaacttttatatttttttagtttttttttttttttttttcattttctcacgaatcaattgtgttaagttacgagcgtacgtacctcatttcaaaaaaaaaaaaaaaaaaaagttacgagcgtacctatgcatttaccaaaaagcgatctatggagtagtccatcatcaatattagcatatttatggaatcttttctcgatgtcatcccagccttgtttctcattactaatgaatctgagcccattgtaggaacttttagtggatgtaagtctcttaagctcctccgacacttggctgaggctaagcgacgaagaggaaggcaaagagttattattattcatgtggctcccaccgccaccgccactgccgactaagccatcaatttgaccgttgcagtatctgtaccggccaattccaccactgctgcggctgatcgtgcttcccatctccggatgtgatcgatagttattagtatggtactcttcaatctccatttttgatgatcaatcttgaaatcaacacttac

SEQ ID NO: 2670 - DNA, 3258 bp, Cannabis sativa
attatatagttatttacatggaggaggatagcattgttcccattatccttgggagaacctttttggcaacaggtaaagctttaattgatgttcaaaagggtgagttaaagttgagagtccaaggagataaagtagtattcaatgtactcaaggccatgacttatcatgaagctagtgacaacttcttttcagttgatgcggtagacaagttggtggagacaaagaagccaattaaagaccttcataatctgactttggtgcaagaagatgtggttgatcaagactgtaaagaagaaatggaatatgctttgtggcttgactcatatgggctattgaacaaaaagtactatgaacaactcggagtgattccaataaagtcagttccatccatcgagaagccaccagaacttgaatgaaaagtcttgtttgatcacttgaggtatgatttttttggagagaataagacatgacctgttattgtgtcaacctccctttctacggtggagacataaaagttgttgagggtattaagaaaatacatgagagccattgggtggacattggctgatatcaaggggatcaaccctcaactgtggtgcctaaaattctaatggaggaaggagtaaagccaatcattgatgcacaatgaagactgaattttccaatgaaagaagttgtgagaaaggaagtgttaaagtggttagatactggagtggcttagcttatttcaaatagtaagtgggtgagttatgtccaagtggtgcctaagaaaggaggaatgacgatagtcaagaataaaaagaatgagttgattccaaccataactgtaactgggtggagaattcagatagaattcaccagatgcttgataaattggctggccaagagtagtattattttcttgatggctactcaagttatcatcaaatagtcattgcactagaggaccaagagaagacaacatttacatgttcatatgacacttttgctttccaagaatgcaatttggattgtgtaattctcctataacattccaaacgtgtatgataaccatattttctgatttgattgagacatggatgatttctctatttttggttcgtcttttgatagttatttgagtaatttagaaatggtgttaatgagatgtgaagaaagatgactaagaaagatgtaatccaagactaattcgatgggttcttctccttcaagaattctacctgaagatcaaagataagaaagtcacagagaatttaatagcagatcatttatcaaggttggaactagaagagagccagaatacaaaggaggtacaaattaatgaagagtttcccaataagcaactctttagtttgagggaaagctcgatagtaccatggtttgtagattatgtgaatttcttggctgccaacattacacctccagacttgagtaagtaatagttgaggaaattattttttgaagtgaaagattattattgggaagagtcaatcctctacaagcactattctgataagataattacgaggagatgttttgtatcttaactcattgccatggtttacatgatgtggaggctatttcaatggaaaccagactgttgcaaaagtcttacaaagtgggttcttttggccaaccctattcaaagatgctcatgaattttttaaggcatgtgatcgttgttagagaattggtaatatttcaagaaagaacgagatgcctttgactggtattttggaagtagagatgtttgatgtttggggtatcgactttatgagatcttttctttcgtcttacaataattcatacataacgtgtcaaagtgggtggaagcagtgacaacacactctaatgatagtaaaatagttctaaattttctacaaaagcacatttttaatttactcggttaggtattcctagagccatcatcaacgatgaatggagtcatatttgcaacaaacaatttgaggcattacttgcgaggtatggagtctgtcacaagacaacactaccctatcacccacaaagtaatgaccaagttgaagtatctaactgggaaatcaacttaattatggagaaaatagtgcaacactcttgaaagaattgggcaaagaagctagatgatgctttatgagcttacagaactgcatttaaaagacctattggtatgtcaccatataattcggtgttcaagaaagccgatcatcttctagtagagttagagcataaggcacagtgggccatgaagaccctgaacatgatttagcagcaggttgtgaaaagagactgttgcaacagaatgagttggaataatttcaaaacaaagcctacgaaaatgccaagatctacaaagagaagaccaagaagtggcatgatagaaacttggtcagaaaagagtttcaacccgaacaataagttttactttttaactcaagattgaagttctttcctaataaattaaagtcaaggtggtctggatcgttcacagttgttaaagtattcccatatggagcggtagaactcaaaggagataaactacagcctttcaaagttaatgaccaaaggttaaagctctactagggtggtcagatgaccaagccaagtctaccattctcttggcaccgctatgaggagaagatcagtctctgactatatgacaataacgacagtgcttttaggaggcaccttaagttatttattactttaattaagtttgagacatttgcaattttattcataaaaatgtaggcacagctagagagcccgaaacacctataaaaatggagtttaattttgagaaaatctcataaaaactaacctagccacaaagcacaatttttaggcggacgctttttttgatatgtagatataaataattaatattataaatgtagtttttattagaagattatttattattataattttcttaaaaaaaattaagagaatgttcactaattgtatattgtatacacgtgcaagcacatgtccacttatgcacgtgcaaaataagtcgtgtaaactacagattgaccaaatataaacagttttatatatagtttatctggaatggggtggaaatgaattatatattttaatggccgaccaaatatcatttagccgccggagagattcatttagtaaaattatatataaatcatgttcctgtttattagaaacaaataatgttttctttaatttttgtcgtacatacaatatgtttgtttataatctatttagagagagatctatcatcta

SEQ ID NO: 2671 - DNA, 1159 bp, Cannabis sativa
gccaaaccacctcttttcagagcaaatactagcatccataaataaattatactctcccaaaatcaacttaggacccacccttgctatatgagaagaagaagaccgttgtgaactcacagggaccagcatttcaaaatggttttgggcatcttgaactgcccgagatagctaagagcccaactactaaccatatcatcagaaatcaacttattatcatgcacaaatgtgttgcgacgatactaaattctcaacaaaagaacaagaagtttctcaatttcttcattagataagagatccataactccaaccaaaagttcatagaaactggacaccatctttaaactatccaagcccctcaaactctacccataccgaatagatttaagggaaggacataaccacaaggcatggagagttgtttcattgttcggtaaacaaataaggcatgcattaatgcattagaagcgttcattctatgtgtagttagattagcataagttgggataagatttaagctagctttccatacaaaaaattttatctttggaggaagagagagcttccaaagaatcttccatcacttagaaggcctagaagagggggaggtttgaccccacccaattcaagctactgagctccaataacaactctttattgtaaaccagtcattgtcgaaaaaattccaaattaatatatcacttttatcgaagttggaagacagaataaacaaaattaaagaagcctctgtatcattcaaaagatcatgagtaagaggagcattacacccacctatatcaagcataagatcacatatcctatccacatcaacccccaaacgaataaaatcgacccacgtggtctttaaggatccaagattcctcttgtatatgaattgtatcaccactctccaccaaccaagaaacccttccttctagaggtcacgcctccataggatgctcttccaaagaaatgaagtacgtttagtctccactacatcaataataaaactagtagaaaaatagaaccctttgataactcgccctgctaaagaatcaaaataattatagagacaagaaacatacaccatattgtagagctcatcgcaaacttctaaatggtatatagaatatccaatatagacacccgagtaaaaagttat

SEQ ID NO: 2672 - DNA, 813 bp, Cannabis sativa
aatgaacttgttgggccaattcctccaacattgtggagtctcactaaacttgttaccttggaacttttccacaacaaacttaacggcagcatcccacctgagattggaaacatgataaacttgatagtatttgatgttaactcgaataatttggatggagaattgccaaatactatttctaagctcaaaaacttaacgggtttcttagttttttccaacaatttctcgggaagcattccaaaagattttgcaaggagcaacactaaactaaaccgtgttgacttttccaacaacaacttctcaggagaattaccaaaagaaatgtgtaacgccctggctgtggcaaacaacgacagtgtaggaaatgtccaatcccagagcttgagaaattgttcagagttcaagagagtgcagcagcttgacgataatcatttcacaaatgaaactttacaaaatgcagtatgtgtttttccatatcttgaattcatttcattcagtaacaacaattttgtgggacaaatgccagctgagtggggtgactgtagaaatctcactaacttgcaagtggaaagaaacagaatttcgggaaaaataccagtcgagttaggaaacttgaccaagttgcatcttttgagtttggattccaatgagctaagtggaaatatcccaactgaaattggtcgtctaacaaatttattcaagctcactctcagcaataatcatttaactggagaaattcctgagagtctatcaaatttgactggcctagaagattttgacttatcagtaaacaatttggaaggtaagatacca

SEQ ID NO: 2673 - DNA, 1184 bp, Cannabis sativa
gacggaggagaagggcgtggacatgtttgagttgattgaaggatgtgaatcgttgaaagagacgagtcttgatcgttacggaaatggataatgaagaagagcctcctccgattgagagactgctcatagccttattcccgccaaaaatgttccaaatgtttagtttagttagttagttagttcaattatccaacggtcatatagtttttctattgaaaagtacttcatatattattatattataatataaataaataaataaattgtccttagcctgatgaaaaatacaactggcaatgacttatatggtttatggatggataaaatcaagatcacatttcatgaactagtctttgttaatttaagaataatttattgtgtgtaaattaaatacatatataaattataagtaacttttttacaatcttatattagagagtatatgaacacataaactaatcttttttttttctctttgcatttatatgattcacttcataatttaaggaccaactgtggtataatggaattatagttgtttatatagtttttttttttttgaaacataattgtttatatggtttaaatcgaaatatttttataaatatctcacttaagttttatctcccattctttaaatataaaatggttacttgcatcaagcttagcactaattcataaaatggttacttttgataaattattgctctacaattttcatttctatgtgtccaattattgctctactttgaatacttttcatagacttatcttattttttaatgatgtacgttgtcttttaccttctttccttggagttactattactcatgctcgtaggtaagttaataaacctacccatggcttgacaaagtacactctatttataataatatagaaaattttcaaaaaaaaaaaaattattatgatctttatatttccagtactttatttccaatatattccagtcgattaattatgcttaaatcgttgttgaattactaactaattctatgaacaatgcagtgagaactgagaaggattaactaagctgataaatcgagtacaaatttcaagttataattattggtaatgatatattgcaatcaaatatactttaggtttggttaactcctcattgatacaaatgagagtaaagcccaactaaaacttaagaaaatgaa

SEQ ID NO: 2674 - DNA, 1591 bp, Cannabis sativa
cccaaaacgaaaatagtcacatcatgtataataggttgagagttgagagagtcatctacacatgtttatttggttttgtcgtgtgatggtggaattgtggcccttgcagcatgcaaacacttttataaaatacaagcatgcatgaaatcaactttaatttatttcaaaactgactaatattgccaaaggacgatatacatattatatatatatacatatataattcaaattatatggttacctaattcaaattattaggaattttgaaaaataggctacaatatagctaggtactacatgttaatttatgacctggataactacgtacactgttaaatctgcttaatttataatgtgttatatcggtaatggtaaagagaaagtgaactgctctgcatgctaattagtgccttgattgatatatttagtatataaaaatctaaatgatcattgtttttgttgacaaaccaaaactagctactaattatagtttatgaggcaatccagttcacaagtttatattagagactcaccaaattacttcttccttttaaaacaatagtttgtttagtgataactgactattttcttttattatattaaattgaaacatttcctatttaaagtatgcatccatatagagaggaaggagttcacgtttagtctagtaaaactattattgtatatttctagtctagagaaagcaaattaactaataatttaagtaaaaaactcacgaaattagatcttacacgagcatctaatcatttgatctagtgaagtgccttttctactaatatcgttaatttgtgtataatctacaatatcatattctaaccaaataaattaaaaaaaaataaaaaacaaaatataatttcatatatagatgtgtatatataggtcattatcatagttagttaaaaattattaaaaaaaaataatagcagtactaatacattactttcaatatattagagtactacagttataatatattattctgctcacatatagagacgaactcaaattataatccccttcaatcaaataattttagttgtaaaacagagtaacaaaggaatggaaaaatggatttcattgatcaaaggagctcgatacaattggtttgcttttatacagttcagaccagcaactaactaatagaaaataacaaacttaactaacttcctaactaactcaaacatacacaacaccttacaacaaactattcttgatactcccccttaatgtagagtgtatatattgcaaattctcatcttgtttagaatttggaattggttaggaagtagagctttagtgcatatgtctgctatttgttctttgctggtagtatggactgttttcacaactccttcttagaccttttccctcaccggatgataatcgatttctatgtgcttagtcctctggtgaaatacagggttagcagcaatttgttgagctactttattgtcacaatgtaatattgcagtcccaatgtgatcaatgcttaattccttcaacataaatgtcaaccatattagctcacatgtggtatttgacattgctctgtactcggctttagctgaag

SEQ ID NO: 2675 - DNA, 2713 bp, Cannabis sativa
caaagaagggaaaaaaatagaacatcaaatcagcttttttttctgtgtgaggacaagaatacggccatcttatattatccgaaataattatagctagcagatgtagctgaaacactttgctcaaaactgaaagagtcactaacaagatctacattaatcagtcatttgcagggttaactcagttctccttctttgcaacaccccataacagaattaatcatacaaggaattagaatacgaaagaaacaatgtggtgtgcttttcatcaactctgaggttaatctttttattctcattacacaaaaatactagaaaggctaaaatagaaaaagcttacaactggttgagagatgcattgattgacatcacccctggcaccatcagatttagctaactccctaagagcaacttcagcagctgactgctcggctgcctttcggttggaaaatccaggcaaggaatcgtatctgacattatttacaatcacggttgacttaaaaaatggctcatgggagggaccttctttagtagtctcatacacaggagtacctactcccaccttttgagcatactcctgtaatcggctcttgaatacatagcaatttgaaacacctaacattgaaattgaaattaaacatgaaaaacaaattcggtgggcatctcatactgttgacatttcacagaatgtacatcaccagtacctatctacctgctatattcaggtgaagcttaaaaaaaaatcacatttagaaacataaaactcgctctaggtctctataattagatgcaatgcaacctaattatagagacctactatcactttttgagcatactcctgcaatcggcttttgaatacatagcaacttgaaagttcgtctggtacgccgtataagtttatattgtataattaaattgtattttatatcctatttttatatgctaaattttaatctatactaaaatattgtatatttataaaccaatcaaacttaatatcacttatactttttaatataatactatataacaacatcatatacaatataatacggcataccaaacgaacttgaaacacctaacatttgacatggaatcataaatttataaaactttgaataccaaacatgaaaacctaatttgatgggcatctaagttagttgagacttaagtcattttgagcttaaaagtcacttaacaatgtacatgatcagaatccatctctatgatctatctacctggccattttcaggtgaagctaagaaattaacatttaataacataaaatatccaatgtgaacccatcctaggtctctattaaattagatgtttctcaccctagtaagaacaaagtcacatatagaccaaaccctaaacaaaggtttaagtagaaagaaacctagaattcagaaaacaaaacaaaacaaaaaagataagaagatgttaatgttgataaatcagagatagtaagattatgaatacctggaacaggattgggaactcttaacatggtgagagaaagagaatgcaaacaagttgttgttgttgttgagtctgatcaactcaccactctaaaacatttcccacctcaactttggtttcctctaattcctctgataacaatacttggtgatggaggagggtcctttgtctttgttggtatccattgatgcccacctctgatttctgccgtttttctcgtgcccagaagaatgagaggaagtgggaaaggaagaggaactgtgcagagaccctttttataccagcaaattcgggcgggtgcccacgggtcaattggatcgacccgacccgaataaagtttgggctttttaagcgtttattatattaagcggaaccctcaaaatcaaaactttgagacctttctcagctccgaactcttgcagccgtcttcttcttcttcttggaaatccgacagttcgagagttcatcaggtttgtgtggccttttttggttttctttctcgctcttcggtttttgttttataataaatgttgaaatgcaagtgttgaagggttttattgggtttgtaaaaatgaattgaattgagttcgagcttttcacgatgctaattctgtatgcattgattttaatttgttgtccttgttatgacgttctcagttttgaatttaaaactaattaaaagaacaagcttgtatactatgattgttgattgtattctcagtcttaatttatgattaatatgttatttcaagttagttaataagtttgttagaaagaaagaaagaaactgagtttgtgtgttttttgggtgtgaaattattgtcaaatttgccaaattaacaaaaacaactcacttaacagtgcaattttcagtgtaattcatacaaagttaatttgctaataaaaatatttaaaaaaatcattttactaataaaaattttcataaaggttgagttggaggttatgagagaatgggcagtagtggtttgaaggatattttggctacagtagttaaggtgggagtgagtgaagcaagggcaaggatatttgggcatgttcttaacccaactggccaaagatcttcacacaagttgttacgaaagaagctcattggtgacaaagtttctcaatggtatccacatgatatcaccaaggatgatcctcttatcatggctcgaaaagaacaagagtaacctctctcactcatcactctactttctacattcatttcata

SEQ ID NO: 2676 - DNA, 3159 bp, Cannabis sativa
atgatacatctcattccgcatcattcacaatttatggtacactcctctttagagagcaggtgcctaaaggaatgattatgaagccattgcaccaactccctaccagaagaaaaattcagggtcgtggaacagaaatttcactgagaagcaaaccaaagatgttgcgtgaccgtgcatatcgaaagaaaatgatgtacatcatccccctcactttgaccacatagcatacacggatccggagtcttaccaaatatactctgaagtcttgatccgaaaggaagaacatcacaacaaagtttccacaaaaacagcttgagacattcatgaagttttgacttccaaattaaggagcacatctcatctttttcagcaactatttccttatttaaatcccaataggcaactttaagagagaatttgccatcagaagaagacttccaatacaccgaatcactgtctgctaacaacctcctatccaccgagattaaggaattggtcgcttcaggggtaaaataggccgagagcctccgccgatcccacccagactacgagggatcataaaaggaatttaccaaatcaatgcctttgatcttcgggttaaggacaccagcatcatattgaataccattaccacaagaccagtggtaatcccacacattgacttccgagtcttgaccgatgatccaaatgctattttgacgaatgaaatcacgcgtagcccaaatccctctaacaaccagcgatgctttcgaaggccgaggagtcgaaaagaacccttcaacttgataatacttagcattcactaccgtagtccagagagaattgccatcagatatcaaaagccaacccaatttagaaatcaagctaaagttgatatcccttgctcgcctgaaaccgagacccccacaggcctttggtttgcaaagagagtcccaagctttcaaagagaggtagcggccttctttagagctccccgtccaccaaaactgtctcaatgaagcgtcaatacgattcgtgattttgcgaggaagaaggaagaccgacattgtgtaaataggaatggaggccagcacactcttaattaatgtcattcttgctgcttgagacagcagattagccctccatccttccaagcgcgaagaaatcttttcaataatataatcaaaatcactacttctgttgctcttgaatagcagagggttgcccaagaacttctcatcacctttcatttcagcaaaacccagtaaatcacagaattccttgcggcattcaggcaaacaattctttgagaaaaagatctttgacttagccacattaattacttgcccagaccaattgcaatatttgtttaacacattgcaaaccacattcagattgctcctgttcgccttgaagaaaagcaagaggtcatctgcatacatgaatgggtgataataggaccttcacggttcaaggaatacccagtcagccttccttctaactcttctttaagcagcagtctagagagaacttctgctcctataataaacaagtaaggcgacaaagggtctccctgtgggagacccctttgtggagagaaagccttggtaagacccccatttagaagcacctataattgaaccgaactcaggcaatgaccaatgagattgcaaaaacgctgatcaaacccgaaccctttcaaaaccttcaaaatgaacttccattccatccgatcgtaggctttggacatgtcacatttgatactagcaaaagccaatttccccgatttcctattcatatcatgaaatatctcactcgcaataatagaattatcggcaatccatcttcctttaacaaacgccgattgataaggagcaatcagcttatccagaaccttgctgatgcgattagccaaaatttttgcaacaattttgtagctagtattgcataaacttatcggacggaactcatcgaaactactagcacccgatttcttagggatgagaacaataaaagttcgattgacttctctgccgaaattccccgattggaaaaattcttggacaaaattaatcacttggccacccacaatgtcccaaaaatctttgaaaaactttgtggggaaaccgtccggcctcgcggatttaagggtgggcaaagaccatacgacacctttgatttcttcagccgaaggacaagccaaaagagctaaattttcattcggagtgatacacgggtgaataagatcatccagatcaggctcaagacaagggttagaagattcaaaaatcttttgaaagtgattgcaaaaataattacctattgagtcccttccttcaatccaactgtcattagagtccttgacagcccatatgaagttgcgtttgcgccggacaacaatcgaggcatgaaagaatttagagttgcgatcaccctcctttagccaattttcccgagatttttgtttccaaatagactccaatctttgttcaacttcatcaatttccaacataatggtgccctcaagctcaacattttctttggatggtgtgcgattttgaacatcacccaggagcttttcaagggcctttaactttgtttggcagtgaccgaagacctaaacattccacgcactcagggccttcgtcgtgatcttcaacttttgacataaaatgaaactatgataacccgagagagcctccttccaagcctcctctataactctgcggcagtcatcatcgcggcccacgcatcaagatatcgaaaaggggagataatcttctccctatcaagcagagtatccaaaagaattgcagcatggtcagaatgtcttatagggaggtttcggacttctacctttttgaactgagttatccaaggaggagacacaataactctatcaagcttttcacgcaccagtcaatcccaatgttgacagttagaccaagtaaaaagagcccctgccccttccaaatcgagagccccaagatcaaacataaaacttttatgaccctgaccttcggcccaagttaccggcctacctcctgacttttcttccgacttaagaaccgaattgaggtctcccatgaccatccaaggactagcgaaatccttcatagtattaccaagattatcccaaaactcccttctatgttctctacggggggagcgtaagtgaag

SEQ ID NO: 2677 - DNA, 2325 bp, Cannabis sativa
aaaaaaaaaaaaaaaaccccatcaaataaaactagttctttctttaatggtttgtcacgtcgtttttgtatcattatttctaaatccaaacatcacaagaatctctatctacttcatttgttcccaaaattttaaattattaattaattaaattcacaaaaagtggtggcttctacctgttccatggtaaacaaaacccgcaccttcttttgtttttactttctttcccatttcaacggctaaaactaagtcagccatggccatacgggtaagcctaactattctcaaccagtccttctttcttctttttttcgctttctctctattcctccaaaactcttctgcaactaataatgcagctcaagctccatcacaaacactcttcactgttaacaccgcagacaataatggtactaacggccatttcatggcgggtcctccttctccgtcgtcattgtctccaccgccgccgaacgaaaatcccacattttcctctttcaagccaagcatagttgtcatcgtcggcgttctcacaaccatgttctccatcaccttcctcctccttctctacgctaagcattgcaagagtggaaaccttgtcgtcgtcggcggcgtcggtggttatggcagccaacaccaacaccccgccacccgtaatacagaatacctctccgtggtggaccgaaaaaactccggtattgacagggccattgtggagtctctacctgttttccgatttggatctctattgggccaaaaagacgggctcgagtgcgccatttgcctcaaccgattcgaatgctcggaggtccttagactcctcccaaagtgcaagcatgccttccatgtcgaatgtgttgacacgtggctggacgcacactccacttgccccctctgtcgttatcgggtagacccggaagacatacttttggtcctagatgatacgaagatcctgtcccagaacgacgccgtttcggtgactgaaacgcgagtttcagatccctacaacgctgaagaatcgggtccggatatccggcgagtatcgggtcgccactcgtcagctggggaaagagggagtaattggatgattcaaatagtggttcaaaagccggaagagaacacatgttgtaatgaaacgacgtcgttcaggaggtcgctcgatgattggtggtggttgagaaagaaaagggatccatctgtcagcacagtcggatggtttgaccggccaagaaaagacgggcttttgttgaccacgcaaggcaagaagataataagctcggagcaggagcagcaacagcaacgcacgagtaggttcgaacaccggatcattgtatctcccggatgtggcggtgggctccaccagagatggagcgatgtacagccgtcgaagctactgtatctacggtcagagatgataattagcgacagccgtagattctcatccgcatcgggatcacgcccgtcagtgacacgtcagcatctgttgcatcagaatagccaggtggcattgcacttggactgtaaagacggaaaaggacaagaggtggagagaggtggagagaagattggcattgattgtaacaggttgttagtagtaatagtaatagtaatagcagcagtagttgttgtagtaatggcagaagagtaataaattcacgaagcgtgtctgaaatcacgggccttagtaggtactcattaaacaacaacagtagaacctcaaacgacagccacaaccagggacatcaaacgaggcgtcatcatcaacggcaggcagcagctcaggcggggctgatgtcgagatgggtggcttggatttctcagttgcggccagctgttgggtctgaatgcaacgctcatttgtgaatggtgattgattggttggcaggtaggtagtattgttataggagatagtaagagagaaaaagagggtgtggtgtggtgtgctattgggccagcacaacgacgacgtttctgaatcattattaaatggcattagccgcattaccaattttaccatacgtacgccagacaaaaccacgttataattattgagaaacaaggaaacaatgtcccaagaaaaccacgtggagagaagaagggataatataatacagatagactcatttatttatttatttgtcattttctgggtcacatcttatagagtctactctggactttaattgctaacaaccctggggatttttctttttctttgtgccataagggaaactataattttttgaaagaaaaaatttattgtaaacaaaattagattgctttaggattccatcaatgaggatttatttatttatttatactttt

SEQ ID NO: 2678 - DNA, 1095 bp, Cannabis sativa
cgtctaactcgacccaatcgcaagctccgttcgcatcacacggctcgaacttccgtatcttccggagaccgtcaaggtcaccgccggtctgaagaagtgttccgtcaggaaggaactgaccagaggagcaccacgtgtcggtttggatcatcagaggtcggattttgttggtgttaaggtcgagaagtacggagtgagcgtaacaatcccgtttcaaaacgacatcgtttggatcgttacgacaatgaccctttctcagcattttccgggtcggtccaatattggtccgatcgaggaggacaacggtgttgaaccgggtcacggcggtgtgcatggaagctatgccagcattctccactattacctcccacgtgccggggagttgtgcacgtgcgagattgaaaaagtaagtgaagaagagaaaggagagccaatattggaaagtagtagctgccatggtttagtaaattaaggacactgaacttcttttcttcgtgttttaactttttatatagtattattagtgtagttgaaaagtgtttgaatcgtatacggtaacctgcatggtaagtcaatgttaacggtcagaaaagtttgttgggaccctccttgggttaggattgcgttagtgggacccagttgagtttgaggttgacgtgaagagaaagtgttagaaaaaattaagtggtgggaccaagtatcatgtgtgcattttccatgtgtagtgttggcatgaatgcttcctattttgcaaggtttggcattattttaagtaagtgggaccaattgttttagccgacaaatgcattaaatggtaaagtactggagctatcttctcttctaactctttttctgtactattcactgtccacaccatagtaaaatatactgatatatacacagattcatttatgtccacaacatactatccataaatgacatatatagatttattaagaatgaaagttagaaaaaagaatgtctaaaactataaaaatcaagattatagaagaattcttggagacaaaaaataatctatgtttgggggaaataatctatcaaacatatgtccttagagagaaaaaaaaaaaaaaa

SEQ ID NO: 2679 - DNA, 1518 bp, Cannabis sativa
ctccattgatgcagcttcgatggccttatttgatatcaatggctaatgatgcttctgctgagattaagtgcattgcagatattgtttgttcttgtcattggcgaaaggtagttgtgatttatgaagataatgaatatggcagtgatttgggatccttggctcttctaagtgaggctcttcagaatgttggttctgagatagaataccgtttagctcttccaccttattcaactctctctaatcctaaagaggttgtcttagatgagctgttgaagcttttgggtgtacaatctcgaacttttatcattcttcgatcttctttgcctatggttactcatttgtttagagaagctaagaagataggacttttagagaaagagtcggcttggttgatgactgagagtgttactagtctgttggactatgctgacaaatctgtcatttcctccatgaaaggaactctagggatcaagacatactactccaaagatacttcttcttataaagcttttcatacacaattccagaggacattccatcaagaaaacccaaatgaaagtaacaatttgaacccaggaattaatgctttacgagcatatgacagcattagagctattacactagccttagagagagtagctactgatactagtccaaaattgttaaaggaaaacatattatcttctacttttgaaggtttaagtgggactgtaagttttgatgaaaacaagctattgtctgatcgaacattaaggattgtaaatgtggttgataatgaaggccaagaaatatctcagccaaatgcagtatatcaagaacttgactgttggagaccaaactattggttctcaaactgctttttcacagaaaaagataaaatggaaaacagaacaactgatgtttgtcaaggctcccaaggcatatatggttctgtagtttggcctggtaacttaacagaaagaattccaaaaggctggtcaatacctactattaaaaaacgattgaagattggagttcctggtgatacccaatttaaacagtttgtgacaattaatcaatccaagaagaacataaatgaaggttatgatggtttctgtatacgaattttcagaatggcactgcaacatttgaattatgacctgcaatataaatttatagccttcacaggttcatatgacgaactcattgaggccgtatataacaaggtaagctcacatattaaaagtcctaaggttatcttcacacacaatatataaaagaaaatcatgtgctaacttctttattttagtttcaataattttctatttattttatagtattaaagaactttctgtaagataacaattaacaagtaatttatttcaggttttccttaaaaaagaatgtttgaactttaacaattgaatttcattaccttaaagcttctcttctatagcctgcacattgaaaacactttaaggctaacctttggcatagtttttggggtgttatcttttagctagaaaatagaaatgtcaa

SEQ ID NO: 2680 - DNA, 2025 bp, Cannabis sativa
aaacccatcaggcccaggggatttcagctgaggcatctcccagacaacccgtttgatttcctccgcatgagggattttcaacagagcttcattttccgccgtcgttatgctcgaagaaatcaaggaagataagtcataatcaatctcaaccgacgaagacttgaaagaatccacaaatttcgtccggaagtactcagcaagcaaagcccgatcctccaaccaattcaccccatcttccgacacagcccaaatgaagttcttctttcttctcaccaccatagaagcatggaagaaacgagaattacggtctccttcctttagccacatctcgcgagattgttgtctccaaatagcttcctgtctagcttcgatctcatcgatctccaaaagcagagcactttcaagttgcaagttgtccgaggaagggggacgagactgaacctcagagagaaggttttccaggaaactcagcttcttcttgcagaacccaaagcaatctttgttccactttgcaagagcacccgccgtatgtctgagtttcgcgcaaagaataaagctatgatacccaaagaaatcatgttgccaagcctcttgaattattttccagcacccttcatccctattccaagcatcaaaatagcgaaaaggggccttgtagggggttgtatccataaaagtgttgagaataatggctgaatggtcggagtgtctaattggaagattcttagttccggccttagagaaaatcgagagccactccgtagaacaaacaacacggtccaacttctcctgaatgaggctattccaatcttggccattagaccaagtataaagggcccccattccctccatatcaactccaccacattcgaacagaaagttacgaaggccgcggccctcactttcacacaccggtcttccccccaccttctcctgttgattcaaaaccgcattcaaatcacccataatcatccaagcctcattgtagcctttcatcgtataggtcaaagtatcccaaaaaaagtcacgatcacctcttctaggggggcatacacaaagccgcccacccaagccttgaagttcctatcctcttgaaatctaaccagaatcttatcactgctcacatttaacacttgaatattccatcccgctctccagaaaagagccacaccaccagacgcaccattagaggagtgcgccacaccatgggcaaagcccaacctacgccaaatcccttccatgtcagtactatccctcttcgtttccatcaaaaacacaatatccgggtttacactgcgaattagagatcgcagcgagttgactgcctgaggtttgccaagaccccagcagttccaagagagggctaacataagggattggggggcatgttttggcccacctcctcggccttgaaaaaatcctcctccgcaacattttcctttgcttccaagtgcgaattctcccttacaacctcaacgatattcttcggttcagtattgaggggaagagaccccgtgggcgcactaacttcagaagtctcaggcaaaacacccgattccgtaaccatattagtgaaaattttctttgatgaccccataacatccggcccatcatgcttttcaactccccgattgcacacgtccccctcacactggtccaatctccttttcttcccaactgagggcccaggcccctttccttccaagctaggcccattagagagattaaggcccaatagaccatttttccccaaagccctattacttctccttggccctttcttcacatcagagcaattaggcgccaacatacttttgaaaaccatcgccaggtgtccaacctgggattctgtgggccccgcaatgtcaggaaaaatgcctccactactgattgtactattcgtacctcccccaacgtcctaccatgttgcatggcctcaccttcccatgaggccccttgctcttccaccatcgtacccgacgacggcaccaccgtttccaccgataccctgccgtcaacacctat

SEQ ID NO: 2681 - DNA, 1226 bp, Cannabis sativa
tgcttgtacaaagttcactgttttaagagttttaaaaagaatgaatatacaactgaaacaaaatatgtgactagtgtagattaatctaaaaactattttagttacataagttttttttatataattaaagtaaaattaaattgttgaaatattgggtttcaccatatagcactaattaacatatagtgtgcaattctattgtcaagcatttgatttagggagttcaacacttgaaattggaagtgtctcagacacaacacaatctcgataaatcaacataaaatttgctaattttcttccctagaaatagaatctgcaatatgtagttttcctttatgttcacagaatataatttcataacctaaacccacgtcaacaaaaacttgccaagtcaagttctcaaagttgtggtgcgcgtcaaatacatcaatatttatcaaaaaaacttcagcaagaatagaggaactgatgaattttaaagaggagtgcttaatactagtaataaggaccctaatcatataattactaaactttgaacaagcttaatttcagtcttgaacacagaaaaaggaccagaccaactaatagctattatataatagagcataatttacttaaattagaaaatgatttacttgacaataatttttttttcttagattcaattttatacttaaatttagtttaaaaataagacaaacatagtctaaattggattttaaatcaaaaattcaaagttcaaatcaaccacagtgcaaatcaaaatcaaatataaaacaatcaaccaccgtaaaatccaaaacagctagtacagtaatacaaaaccagtccaataggcaatcatctaaagattccaaaagtacatagttaccaatgtcaaaacttgaaattgtgagatatagattagaataaatatttagtttgtgtttcatttaatcagtgattttcttccattacaaatggttaaattgacgctattttggtactttactagttcagttttgaagtgtgaactctttatttcaatggaagctaattacaagaatccaatagtgcttatattttttcttcaaagtctagacattcaaacatgttgaagttgatcagttcattaattagttctaagaatttaactcttgaaaagatcattaaatatttgacaatagaatgaaaaattataatatgacctttataagataactattaattagtcattttatgaatca

SEQ ID NO: 2682 - DNA, 2386 bp, Cannabis sativa
cttaatagctctgcacacttttgaagatcgatgagaatgtttgccacatatgataatgtattatgcattactacactattgttatgtaaaattccattagattcaaaatttaaattaaatacgcacacaaatatatatagctctactccatggtgggagattttggtcccgctagcatattatgagctatatatatatatatatacattagtagtataattaggttgttttgatattagtcatggtagtatgaaattaaaagagaaatgctaaagggctaattgtgtctaatactttcttacgtatcaatatcattattggtacaattaagtattgggtcctatatagtttaatataataatttttatagatcattgttaattaatcgcaagacaacacgtctaacaatgatgaaattaaaagcatattacagtagagagaagttttgaacattaatttgttagtatggagctgaaataaaaagatcatgggaagaaaacacaataaaggaataaagggatacggtgaaaaatattatgaaagggttgtaatttgagtattttcctgggatatcgagagcagtggaaagcttgtaattaataaacttataattggatatggtgagagatgtcctggttgtgattatataaattatttacttaattgtgaactacaagtctacaacttatattctctgataataacttcactattcctcttttggtttttggtattgctgaggatcgtctttggtatatatcttggtgggttgtaatccaatccttttagtcttgtaactttaagtttatattgctaggtcttctaatggctaagcagatgtcatttgctaagtggtccgtaggtccaaaactgttgcttttaattttggggagctgccccccaatgtgctagtatatactatctacaataacaacatagagtaagtctgcctaggtttttgcaaaacaattttgtacatatatataggttttgaatgtagatgtgtggttgtcaaaaatgaagtatttgctcaagctagtataatatatattacaagtttagtttttacaaataaccaacttatatacactaatttttatgttttacaatgtgaaaatgcagtttagaaagtaaaattggagtgaaatttattaaatattagagtccattcaaaaaatttaatcatgtgtggagtccgtaatttttaatttttataattaattgaattttcacttgcttattctaagaattagcccagaaaagagaaaacaaaaactatatggattaaatggctggctttgggggttcttattgggttggtatggtggtttttatcttggcgctttcgaggggtcaccatgattacctattatcgtatttaaatttggaaaattcacctttacatagttgtaattcctattggtctcatgttttgtggtttgatattttaggatcgtcctttatatggttagttatgttctttctttttatttttgtttaaataataaggtagttattgcccactaatttttgggagatctttggctgatagctattaataggtttgaaatatagtattcttcactcttttgacatgaagcttcaaagttggtggcttagtgatcctttcgttggagatgctagtggctttcttttcttattattattgtaaatggcttggttagcctattattgttactctactttaacataattatcatgtaatggattttgtctaatttactattttaatgaatgtttccatttttttttaccaaaaaaaaattatgaactcttgtgtatgtgtaatatttttgtgattgtgggtatttaattaataatcttgttataagatattcaatttatccatcaatacaaattaaaaagggaattcatatttgctcaattactatttaataatattgaatataattttcaacatatgacatattcatataatttttttacacacaattatgctaatattaaatatatatcaatcaattaaattaattatatgcttaaatgtataatgtcttattagtattatgcagtttcatagtattttttgtatttttgaaagggtgacacatgatatttctaaaagtgtgattgatttgaaatgtcctggattaaagcccatccgtgagggaaggccaatccatacgaaagatgggctcgagcccatctgaagcccagaaggctcgtctccaaagacaagactcattcagaaatgaaattctccagatgaatgttggaatacatccagagacgatattcttagaggcgcctccaaaagctcttagtagggcgacatggctaccctttgatgattggtcctattatgtcatatctcatccccttagaacatgatagtgtgcgcacc

SEQ ID NO: 2683 - DNA, 1386 bp, Cannabis sativa
acgcttgatatatatttcattgcagtatggcaatctccacaaacccgaaggttcttataaatccgaactggtgcccctggtggcaccgtaagaagtccaaaagcaattgccaacttttcactatgataagttaaaccaagctccttaccctcttcatccatgtcatgaagcgcaaaattcatgtctggcacatacccagcttctttgatcaacatcattatctcatcaagctttgaatatatctcagttgttcttggatggcttctatcttcagacataaacctatgcacttggctgttcatctcaatccaactacaaccaggttccttactgatccccattgatttcatcaatctccggatttttgcagcgtcatcccatctaccggctgcagagtacaagttagataagagaacataagccacagagttaaatggttccaatttaagaaggttatctgctgctttctctccaagttccacattgccatgtactctacatgcagcaagaagtgccttccaaacagttgcatctggttccacagtcatttgattcactaatcgcttagcctctttaagttttccagatcgccccaacaggtcaatcatacatgcataatgttcagggcctggtttgattccataaaccttatccattgattcaaaatatgttctaccattttccagaagaccagcatggctacaagcaaacaacaaaccgataaaagtaatgaagtccggatttgtaccagttgcaatcatctgatcgtagaactttaaagagtcctttcccctaccattttgtgcataacctacaattagagctgtccagctgatcacatttcttactcgcatagagtcaaaaactttgttagcttcttctatacacccacactttgcatacattgttactaaggagttatctactgataatgatggccgaagaccagatttagtacagttagaatgaatttgttgcccaaattccaaaactgttagttctgcacaggcacttaaaacactggcaattacaaattggtctggataaacccctgctactctcatctcgtgaaacaattcaaatgctttttcataagagccattgtgtgcataccctgacactagagacgtccatgatatcacatccttatctaaaataagattaaatgtttgataagctgaaaccaaatttccttgtttggcatacatgtcaataagagaattaccaacaagcacataagcctcaaatccagtcttgatgatcaaaccatggacagactttgcaggttcaatttccttcaagacagcgaatgagtttagaatggatgggtaagtaaaatgatcagtcttcatatctctagcatgcatttctttaaacaagatcaaa

SEQ ID NO: 2684 - DNA, 1320 bp, Cannabis sativa
atttatatacatatattgtaattaattacgtaccgtattataatatgcatgccgtgaatgattatatataatacgtgtgtacagttaaagtatgacccatggtgctcatcgggaggccttacagcggacggtaaattgataggaactggcgggtgggacaatggagtcaaaacagttagatatttcaaaccctgcgacacttgtgatttccttgaataccagaaacccttggccgacccaagatggtaactactcaactttatatcattaatcattaatatagtaatatgagcatttatagaattaataatctaattgagtgttatacttgaaggtatgcaacacaaataacggtcgacgacgggagatttctggtggtgggagggaggcgagcatactcgtacgagttcgtaccagcaatgggagaatcaaacactcaagccacattcctagcaatgcttgacgaaaccactgatttggacgaaaacaatctctacccatttgtctacctctccaccgacggcaacgtcttcatcttcgccaacaaccgctctatcctcctcgacccaaaaactcaccaagtcgttagggagctgcccccactgcccgggggtgcccgaaactacccggcatcaggcatgtcaacgctccttcccattcgcctcgatctcgtccaagacaaaaacgacgtcgttccagctgaagtcattatatgcggaggagccaaacacgaagcttacgctctcgctggtaaaggcactttcattcctgccttggacgattgtaaccgcttggttataacggaccctaacgccgtttgggaaaccgaaaccatgccctcacggcgtgttatgggagacatgttaatattacccaccggtgatttattgattgtcaacggcgctcatttaggtactgcagcttgggatttcgctgaggatcccaatttcgtgcctcttctttaccggcctgatcaacccgtgggtaaacggtttgaagagctcgaaccgagcgatatcccccggatgtaccactcctcttccgccttactgcccgacggaagagtactcattggcggtagcaacaccaatgtcgggtacaattatactgcaaagtacccgacggagctccggattgagtcttttgctccgccgtacttggcagcggagctggcaaaacacaggccaaaaatcatggagaagtccgcgaagagagcggctgtgctttcttacggacagaatttggacattgattttgtgttgaaagggccgcggactagcgcggccgagatcaaggtgacgatgtacccgccgccgttta

SEQ ID NO: 2685 - DNA, 1966 bp, Cannabis sativa
attaatattacgttacgttacgtcaaaataataaatgaaccatatttaaatctaattttcagttccgctctttcttactttctctctctctctctaaatattcttcttcgaaccctagctaatctctacgtacacctctctctctctcttctcagattccgccatttttgttacactctcactcttggttgtactcgtcttcttcgtatttgtggcttggagtctttgaatttagctataagatggagtatgaaggtggtcgcaagagagcgagatttgatacttcttttcatggcaatggcggcggtttcaagaaatctaagccaggttcgtcttcttttatatatgtttacttgaatttttattagtttaattatgagtttgagtattggagtctgtttttcgattttttgtttggtgaaaattgtggctttattttagttatatattggtatataatcgttaatggggtttgtttcaaggaatctaagccgggttctacttctttttatgtatatatgtacttgaattcgctctgttattcgatctgagtaaactaggtttttttggataagtgagtttttattagtttaattatgaatttgagtattggagtctagttttcgatttttttgtttggtgaaaattggcttgattttagagtgaagatagaactttgaattggtataaaatactgatgaaatggagtgaatgagagaggaagattaaatctcaaaaaccctaaaatacttcagaaatgattttattttaataagggttattctagttgaactttgtaataataagaataagaataagatggtggtgttaaatatttgtaaaaattgtgaagattaataagtaactgagggaaataattaatgctctcaacagaaatggagacctttacacctggtataggaagcaaatcgaagccatgcacaaagtttttcaggttcaaatcttaaacttatctaaaatataagtagtctaatgtgatttttccctattgatgataaattcataccaatttaatttaagtaaaatcttttacaaaatatttagaactaaaatattatgatgtggactaatggaattagcatgtaaagctgtgatacaggttgttgtactctctgttctaatcatatgataacaaagactatgaacagattacggttgaatgacaagatgtagttcataactacttgctggaatatatctaaattttaatgcagttgaaagaaatgcagaaacttattttctagtaaaaagcgtagtggcctattatagaatcctgcttttcatcccgaccatgagcggcctcctgagccatgtggggctcaggattggtgagcaggcctgcaaggctgctgaccaatcccatagcctcacgttgcttgggaggctgtttcaatcgggatggaaggatttttttttcctactaagctctctgttgtgtgatttaaaattgttgcatatatcgtcaattatggaaccagtggaaaggctaaaaaaggagaaagaataattacacgatatgctgtgttgttttgcattatttggagtataaatctgcaatttcagcatattaaaggaacataagatttgtgtgcaacttagtgctacatttgtttcattagcattctctgtgttttgttatgctgtttcgccttggtgtattcctttttcctttctcttgttttctcatgttatgtgatgaataacaatgtgaactatgcatttccgcattgttttttaactccaaggtcacgactagttgcgccatgcattttggtttaggttaagctatttcagttgttttcttaatcatttgatttttctattgagctcttttctttcctcatgggtgcagagtatattctgaatctttttgttaagtaagcttagaatctttttagttggaatgaagtaggaaaagtcaattatgatttcccatctttacatt

SEQ ID NO: 2686 - DNA, 3611 bp, Cannabis sativa
tttctttcaatctcttcaaaccatacaatattatatcatgtctcatgataaataatacaacgaagttaagtttcctttaagtttcaatcaaagaaagtgtttttgtttgtatggtgttcatcttggcttagttcaaggtcttagtattttacaaaattatttagtaattaatcgaatttaaatgatattattaatgattggagtttgggacatgacaataacattaaatctattcccatgaaataaaatctgcataccaacggcccctaaatctataagagatatataaagacatccaataaagtataggttaacatagtagacatgtatcccatataataaatacattttatatcccaaatcatacatatgagtatacaaataatttccctaaaaaaactttagttcttttaacatgttaattaatcactttgtttaagtttttacttatgctttagtaatcaaggtcagaaacaaaaataacacatcgacaacttaaaatgacttgtatgtataagtatatatttgtgatcttcaattcgagtccttaacttgagtgtttagcacaaaacttggaaatgccatcgttatatccctaaaatatgaaggaaaaaaaaaatgaatatatgagaaatatgattcaatatgttgtatagttagtcatttattcattcttaaatactatacaaaacacatttgtatgaaatttactattttttaaagactctaatggtcatagaaagaagtgtttaatttttttttttaaggaaaaaggtcataaaaagaagaaaaagaaagtgattaggtatcaaaagaataattggtaaaaatggtaaaaatagaatatttcttttaatctttttgtaaatagtcttcctattagaatattaaagtgtcaaaaatggtatgtttgcaaataattgtcaaaacatttaataaaagtgtaattggtaaaaaatactcatcaaaatgagcattattttaagagtaaataatattgtagactatgtattttgtaaaagtcaatgattaaacactcttattttgttaaatgataaaataatctcagtattttttacaatagtaaaaataagactatgagttcaattttcgacaattttttttttttaacataactaacttgaagataatttttaacatgaacaaatacaaaaaaatataactaattttatcataaaatctttagatcaaattattattaattttattttttgacaaaaaatcagttcacggtcatatttgtactattttaaaaaatacaagattcattttattatttaaaaaaatagacaatccaattaataatttttgcaaaatacatggttcaaaataatatttactcttcttttaataatacttattcatgacttttcatacaaggtaataaaaaatttaaatacatattatatatgtatattaataaaattattttgccacacttattttacaaaataatattgcaaaaaaatttctcaccttaaatatggaagagtcatgttcttaatgagatttggatgtttccatacaaactctttccattcttctttatcaattttcccatcaccttttgaatctgcttctgtcattgtctgttaaattaaaatacaaattatttagaaataatatatcaaataatcattattaataaatatataattttttaaattacatcaaattaattaattaataattgaattaaaaacaatggaagagaaataagaccttttccacaattgattcaattacttcatctgaaagtgtaagatttgattcactaaaaagagccaataccatctccttcacctatcaaaaatttcaaacactaaaactatgataaagagttttggtgaaaatatatatatattataattttgagatgttaataaatttttgtgaagtggttttctccatatgaatatctatccattagtaaattttttggagtgtcaattgttgaggaaagtaaaaaaaaatgttatttttcaaagaaattaataaatattaggattttgtagagttttgcacagatacatataatagggttattctagaattcatacttaaaaaaatgcaatctctatttattttggcatctaaaattatttttaatataattgttttttatattcgtgtacgttataattatctaatattatataaaattttgaaaaattcagaataatttacaatatagaatacaatgtttaataagtctattttacacgcgtataaaataaaatagtcacacgtgcaatacaatgtttgaaccctatttatagcatgttaatttttttttcgaattttttaaattttacaggatatcttaaataactataatatacataaccatgagaaaaaaaattgatagaaaaattattttagataccaaagcacagatagggatacatcagtgcattccttttaagatatatcatataaaattttgaaaaaaatcagaataatttacagtatataatcagagtataatattaataactgtttgaaaaagagcatcgttattgagtaccaatggtgtttaacaccatcaggtggcgtcttgcgatttgttaacaatatttcttaaaagttattatattaaattatataggattcgatacttaattacaccaaaaataataatgtgactatcagaatcccgtgatccgtaagaggaaagatcgagagttgtgcaatcccacattgcattgggaagactaagtgtgatgattatgagactgtgtaggtatgtgactacacaaatgaagatgacttaaatagattattgatactacctatattaataatatgcattttgttttctagtaatctgatataattttaggataggtgatctcttgaaaaaacttcccaagaagcgtgccagtgagcacaaagcacacaatcagagtaatgtattcatatataagagtcattattcaatgaatgtaagagtctaataaaagcttgaagtaggatcattacaaataagacaccttaaagggtactaaacaacactagtgtctagtgcattttaatatttaataaaggaaatataagaaatatagcttaagaaagatgtgagttaatgaaggaaagttgtaagtaaagaatgattatcatcactaacctcttcaggctcaataaatccagtttgtcttagatcatagagtctaaatgcaactgcacaaacataattaatgataatattattaattaatttctaattaattagttaagccacttaacttaacactaataataataataataataataagtattcatacataaaattttgtcttcttgagaagctttgggatggaatacatttaatgcccgaacaaattcaccaaactcaataaccccatttctcttataatcgaacaaatcaaacacctattttattatatatataatcaaaatattaaaattagagagaacaatatttgttaagtattattatacataattaattaaaaatataattaccctgtctgcaaaaagattcttctttttactattttgaaatagagctaattgaaattcttcctgttcacaaagttcaaaagattttaataataataataata

SEQ ID NO: 2687 - DNA, 1013 bp, Cannabis sativa
tttcttggataaggttctagaggcgttcgggtttgactgtgtcttcagacgtctggtggctaaatgtattcaatctgtgagtttctcggtccttcttaatgggggtcctttgaaacagtttaagccctcccggggtcttcgccaaggggatcccctctccccgttccttttcattctgggtagtgaggtgttggctcggctcctagcccaaaaggaagcgaatggtataatacacgggtttaaggtttgtcctcaaagccctgctgtttcccatttaatgtttgcggatgacacctttctcttttgtaaagccacggtcagggaagtggaatcgttacgtgattgtttgaatctctattgttcgtggtcgggtcagatgattaattcctccaagtcggctttggttttttccaagaactctgatgcggttctcaggaaaactataactgatgttcttggattccgcttgatgactaaggaagataagtttctcggtaatcctctgtttttctctaaaagcaaatgccgtgatttcagctttgttcttgagagggttaaaaaccggttagaagggtggcggagtaaactgctttctcaggctgggagaactactttaattaagtcggttatcaacagcatcccgatgtatacgatgtccttgttcctgctgccggtttctatatgtaactctttggacaaaatggctcgtaaattctggtggattggttccagtgataaacatcgttatctctccctgttgagttgggatgcaatttgtaaacccaaagctgaagggggtgttggtttaaagaaggctcgtgatcagaatttggccttcattgctaaattgggttgggcgttggctagtgggaattcttctccgtggtgtaagcttttcctatctaagtattgcaagagagacttctccttttggtcggccccgatacctcctcaggcctcttggggtgcaaggggtatctttgccactcgggatctcattcgaagggagagct

SEQ ID NO: 2688 - DNA, 2256 bp, Cannabis sativa
ccattcgcatcatcattttctaaaccaaccactaacacaagacaaattagcataagattaaccataaaaacagtcaaatataagtcataacttaaccaatcaaacgtaccagtatcagctgttggcgagccaatcgatactacatcgccttctttcactcgaggagtggaaggaattactcgaaaaaatgagtccatcctctttaagcttttctctttgttattgacagggactgaaagtgagcgagctatatttcggttttggtttccttttttctgaacatacacaaaagctaaagttaaaaagcatatcaaagcgaaacaaccatgaatcttaacaaccatgaatcataacacttacaattatgtttggagtgctacctacacttccactgggtgtggattccgggtttgaatccataatttgagttactggtagtgacgatgttctgtttatcctcggtgtgaacagcttagtaagggacattgatctcgagatagtagtaggcttctctcgtggcgctgtaactgatgcttctgaagctaagttatcacccttctcaacatctgaagaagttcgatacatgaagctgagtttcggaaagagactttttttacatgattttcctttggatgaagatggacctggagatccatgaacctttgaattagtagagctgggtgtcaaggtgaaattcactttctttgggttaggacttggtgttggtggcatctttattccaatgaaatccgatgatgatacatcggatgctcttgggggtatctccaagacgagattcggcctcttccatggatgaacttcttgtgtttcttcagttatgttaattgacacttcaacctgaacaaaacaagcttatgtcaattgaaccatgaatgaacaacacaaaggcatactatttcattgaatgaagataacataaaataggtataattgtgccataactcccaaagttttgattttgtaaccaatataaacttaatgttttttaagcaatataagttcttgattcgtcaatacagactccgttagtgttttgaacaggatgaatctagatgaaaaattacagttttactaatatttgatacttgtgccgctaaagaaaacaagcttatgtcaattgaaccatgaatgaataacacaggcatactatttcattgaatgaagatatcataatataggtataattatggcataactcctaaagataaatttaatattttcttagcgacataagtacctaatgatagtaaaactgtaatttcgtcgaattttgtcaataaagactctgttagtgtcttatgctgttatttactcaaatgtcaaagatgggtttggatggttattttcaacttaaattttgcaacttgatcacttgaaatggggtgaaaaagttgtgtctttgaaaagtgaaaaccccatcatcaaggaagtacaccataataaagtatggccttttaaatgaagttgaaatggttaacaaggaaaaatccaagtcccaaactagatggaactttggtcagtagtttcagctgaacatagataattctaattcaataaaatccatcattaaaggatcccaagattcctttgtatatttcagaacaaaagaaataaagaggtaacaagacataaaaactggggtccaaattcactgcagattctacatatttctataatctatttctaccaaattcacacttggggtcctgtcaatcaatgttttaaggcttattcctcagcttattttaggaaattacaaatctttaattcatgcaatcataaattttaataagtaaaactaattgagttaaatactacctaacatgaataaacactaacagatctaatgacccaaaagattaaaagagcttaaaaaaatacatatatatgatcaaaacacaaaaaacagcaataacccaacacaaagataaagcttaacaaaaaaaagggaagtaattaggaccttatgattgtgattaggagtaacaagagtagtagtttcttcagaacaacactcaagctctctgcccacattcttatcttgatcattattagtacccatttcctaaaactaaaaacccagaaaccaaaactcaaagctagcacaaaagctgagacacaaactccatatttatatcttaaagctcaatttaacaatagaggtgaaaagggtaagagggaaaaacacaattatggagacttagcttaataagaaggcaagagagagagagagag

SEQ ID NO: 2689 - DNA, 2880 bp, Cannabis sativa
aaaattttagaaagcaacataacaacaatcatgtgaaaaaaaaatataatataaatataaaaacaacatgaaagtaacataatataaatgcttaatgaaataaaaatatttaaatttattttataaatttgtatttttataatattttgtctttttaaattagttttaaaagaatcccaaaaattaataataaaaataaaacattatatgtattatgattttttataatctttgatatataatataggtttagtaagattcggtgtatatttagtattcaactatacaaaataattttgcttacaaacaaaactacagaaaatatttttttaaaaaaaaaatcagaaattgtaaaaataaaagattatctaaaattgtaaagataattaaaaacatagattttgtaataaaaagtacatagcagttaagaaaattgaagacttaattttaagaaaaaataataataacaattaaagactagtggttttttttttttttttgtattattgatttttttttttcatagttgattttctcaaacaccgtggatggaatttttaattacataatagtcaaaaggtcaaaactcaaaagcgcactaaaatatcaaaacacaattgtagtcttttcttttctcttattatttatttattattttttaaaaaaaaaccccttcataattatgtaattatttgtcaaggtatttctttattattttttgtttttttaaaaaagcccagattgaaaacaccaaataccaaacaaattaagactaggacagataccataaaattgtaatgaaataactcatgcatgcacacatgtactatattatattatatatgtattaattttatactaaggtttcagtaattacaaatattaatgttggagttagctgacccaatttgtacaattttttaattttatgctgttatttattcttatgacactttcattgtgaactcaatatatatataggaaacttattaatttttttttttttgagcatttacattgaaagtgatgatcttttatgacattttatatttgttcaattaattaattaaattaacagaccaaaatcaactctaatacaagtactaattttttgttagtactattataagtcaaatagtcttaaaaaataaattcttgaagtaaactaccggagtctctttcttgacttatactttaagaataacaatacataattttcaaggcttaaagtttcaacaaaacaaagttgaataatgtgaatgtgacatataagaaatttaaagggtattaaattaactatttttttctttaatttattttgagataaaaatttcatattttggtataacaaaccaaagaaagaaattaattaagagaacccaattaacattcttttccttccttgtgtttatatggcagtattttgttgacaaatataacctagacagaatcataaacttataaacagattgagtgtgacttgtatgatgttttgatagtattattgaattattcaacacaaatattataaggaccaattgatgagattttatcattattatggtattactattctattaccattatcagctattatttaatttttttttttaaaaaaaaaaccaattaaatgaaatagttaataaaggtgtattaaatttaaaggcaatgttgaaaaatatttattaaaattgtctgacatgttcttttgaatttgatgcctgaaaatgcctttctttcttggtccttttggagctttaagaaaaaataataatgaaagcatttgtgtaagtaacacctttaaaaaaattaaaaaggctacttttttatttattataattattttctttcaaatttaaagtttctgccccccaattccaaaagctgggctcaaatacttttcttcaaaaatggtcttaacctttttataagtacctataaagtgaataaaaaggtctttgtaagatgatgaagtaacatggaagttgggaaccaaagtccccatttttatattttgaactattttttgaagctaaagagttaggaggaggacatgacatgatgttttattgggcaagagggcattttgggtagagtaaagaaaacataaaaaactaacacaattcttaatgacttttctacataagaatcagcatgtctctagaaggaattaatataaaattcaaagctatttgccaaattatagatatttagaatcctcaaaaataaaatgatttaacactttataaatatatttattttttatgatgatgtaactccactaaagttcatatttttatacatgtgtgagatgtgtacaataagttatgttctcataagatactcaaaacattattaaaagaaataagattctcaaatcaaaattttcatgacccaaattatgtttaatcactatattacacaaacacaattctttctccaaaattcattcataaacagccacaaccaaccaaactcagctaaaagaaaaccacataataagatgttatgtcatcttctcaatttggcagttggtgcattataatttgtggttaggaatcatatgtccttttttttttccaaattctccttctctataatgaatcacacaacacaacacaactcactcaatgagcatcatcactagaccaaaacccctctattttctccattcttggcctaaaaaaagagtaaggaagtgaaaaaaagatgggcattacttgctgtggagatgaggattcaatgctactaggactggtcttggctttggtattggctatggctttctttatcatgtctcatccaccaccccaaagaagagtagccatctaccattgttcttaatattttcatgggttttctttggttcataatttggag

SEQ ID NO: 2690 - DNA, 896 bp, Cannabis sativa
aagaatgatatgtatgcacatagttccccttctgttaatgatgtaaggaaaatagtcatagctcttgctcggtctatttcgttcgagatgatcgttcgaatgagtactgatacatgttttgattcttcataatgtgtcaaggttgaatttgctggagtaggtggatatggtgcagctttttactgtggtactggatgttttcatagaagagaaagtatctgtggaagaaagtatttcgagggtgaaaaattcgattggaatgttcaaagcgaaaaaaatgttcataagagtattgatgatttggaacgatcagcaaatattgttgctagttgtagctatgagaagggtactgaatggggaaaagaggttagtattttatctcatgtattttgcaagagttacagataagattttttattttgttaaacaacggtatattttaaaatagtacataataataccttaagctcaaattaagtcatttttttagtatgactaaaattgaaaaaatgtaaccaaaactcattcataacatcttagcttattattatgttcaattttaaaaaatacaggatttgaattgagtccaatcgataacttttttaaaatatacgaaccaaaatggtatttaagattcttttttgtcctaataatgatttgtttttttgttatgatgtctataaatgaatttacagataggattgatatatggctgtcctgttgaagacaatgttactggcttggcaatccaatgcaggggttggaaatctatttactacaatccgaagagatacgcctttgtcggtgttgccccgacgacattagaggttgctcttgttcagcataaaaggtggtgtgaagggttgtctcagatatttttatcaaagtattgccca

SEQ ID NO: 2691 - DNA, 698 bp, Cannabis sativa
aaaataaaaattatttattgtcgtcgttgaattgtggtattggtcgccctagacgcagctgaacgctgacatgaacgatatctgggtgtgctttcaaaatctcctcttctgctttttttgctacctccattgcatcactagaataaacaaaatgttagttattattatcatatgagaagagaaaaattgcacgtgaaatcaaaagatattatgaagattgttaccgaatgaacatggagggcggcatcgaaacctcaatttggagtagcacttgtccttgcagtgagtgacgagttatgtgttcaaccaccatgttctgaagaccaaacagtcaaaattaatatagtaaagtaaccacaaagctcatttctctggataatgcatcgaacatacctcttgaaacttgtcagtgatgatgttagaaactgcagcttcaatttcgtcacttttctcacatgtggtcctcttcgagttttcttgttggtggtttacacttgaggaaatttgagaagttgcaggatctagaagcaacccgaatgtataatattacataatagaaatcagaatctctgaagtgaataacattgacaattaagattctacggatggttatatgtaaaacaaagcaactccaatttcccatgctcagaagtctttgggatgaacactttagctatactgataatttattgaatata

SEQ ID NO: 2692 - DNA, 2056 bp, Cannabis sativa
tggtgaagatgaggaagatgaggtttctattaggatcattggagcaaccgagaatcagcatgaacttcctaccgttgatggtgctaatgtcgttttacgcagtggaaacgacaatgcaggacccagttcagggagcgaagatagcgagggcaacgccgagtctggagctggagctggagccacgagtaatagcagagactcttctccttatcagagatatgatattcaacactttgctaggtggtttgagcagattctcccttttactttgctacttcttcttgtcttcattagacaacattatcaaggtaactgtttttctattttgatttaacaaaaagacaagattttctttgaaatgcaatatcagaatgtccctttttttattggttttatttgaattgagtttcaggtttttcaattactatttggattgccgcagttatgttcaaatcgaatgatattgtgcgaaaacaaacggctttaaaggtgctttaacttgcattttgatcttatctaatcatggtggttatcagattagtttaagggtcttgaatttttttttgcagggggagagaaagattcctattcttgtgtgcataagttcagtgttcatgcttcatgtgatctgtttttactggtggtaccgaaaggatgaccttctgtaccctttggcattaattcctcccaaagtggtaccccctttctggcatgccgtattcatcatcatgataaatggtaattactgaaaatacagttacaatttaatgctattatctattgaagttgatacattgccaatgttattactgaccattcacattttgtggggattgttgtattatggtcaatggagtgaaatcttccgaaggctattgtatgaactattgacattcaattagataatatcattctgtgaatcataaatctattcaattattcaaatcattgctgtagtttatatgaaatgaatgaatgaattgtatgaactattggcatacaattagataatctcattctgtgaatcataaatctattcaattattcagtgtatctttggcatcagagtttttatttggatatgaatgaaagaagtgtctctgaagttcttatgtctactgtcttttttgctattttcttggaaattaattagattaatttgccctttggattattgattttgttatgaaatttgtcagtattccaccagtgtttttttttaatctgcatcataagaaatataaatataattgtttgagtaatatgatagtggtattaaaactcttttctagatcagttaccaatcttatatatcttagaacttggcaaaggctggtggagtaacttgtcacttttttcttggagcttttaaacttcaacaatagaggataaaataacagaattatataaaaggaaagacaggaagagcaaaacaaagtgcttctcgcttgacaatgataatgtcatgatattctttgaaattgattattttgtagatattatggtccggcaggctgcaatggccctgaaatgtatgcttttggtgtttttcagagatagtagaggtcgtgactaccgcaagcaggttgctttctctataaagttttctaagttgcattatttaatatctcaaatttgccactttttgttgatggtgctaatttcttccagggtcaaatgctaactcttgttgagtacctgttactgctgtaccgagcattgttgcctactcctgtttggtaccgatttttcttaaacaaagaatatggaagctttttttcttcgctaactactggattgtatttaaccttcaagctcacatcggttgtggagaaggtatagattcgtcaatgcaaaacaaattcttttctttatgctgggtcaattcgagattcaagattcaagattttgaagaaatgttagcttgaaattattgtattaataatctaaattttattttgaaactttaggttcagtgcttttttgtcgcattgagagccctatcccgtaaggaagtgcactacggatcatatgctacatccgaacaggtcagtgt

SEQ ID NO: 2693 - DNA, 1339 bp, Cannabis sativa
ggtcaatctttgatacttccggttcttacttctcttatgctctgtcttcattactaccctggtgtttatttttttcttctcagagatttgattttgttattcgatctgttctcttctgggttctaaccaagctcttgctcttcgagtgggattcaattcattcctgggtttaattcgttgttctttcaaatgggtgctttggatgagggacatttccatgaggagcttgagaaaggagttccattaagttgccatgagatgggttttgagggagaaccagagactatggctattgaagatgccgtcaaagttctgcttcaaggtcttaacgaagatgttaacagagaaggtctcagaaagactccacttcgggtcgccaaggctcttcgagaaggaactaaaggtattttgcttgttaatactagatcttcttctctaatatatatgctgattctgatagtgatttttgctgacaaattcctttatatgtttctttttcattttagtttacttcaattaaaacttgctcagtattataagctgatgtttcagctttgtgtacttgttcattatcaataaatttgataacttggtaatactttattattgtttgaaaactatgttgagattcttattacaaagttcttttgtctttttgctgtcaatgaatttaattaggcatgcccagatcagtatccaaatgggattgtgtaggtaggtaataatttttggttagttgtgcctcaaatcagtatgtggattcattaaaagctgatgataaatcattaaagtccactactaggaagctatgattgagtggttgggtgagtgagcttgtgtgtaagtgaatctatgaatggttttggtagattcttgtgtctaaccaaactaataattaagtacgaaataatcatataatttttccttgttcaggttacagacttaagactaaagatatagtgcaaggtgctttatttcctgaagttggtgtggacaatgctgttggtcaagctggaggtgttggtggtcttgtggttgttcgagatcttgatctgttttcgtactgtgagtcttgtttgcttcctttccaggtcaagtgtcatgtgggttatgtcccttctggtagacgggttgttgggctaagcaagctttctagggttgctgatgtttttgcaaaacgtcttcaagatccaaagcgtctagcaaatgaagtctgtttggctctgcatcgtagcatcaagccagcaggtgtggctgttatgctccagtgtttacacattcatttcccgaatctagaatctgtctttctcgactcaaatcacaaagggtgggtggagtt

SEQ ID NO: 2694 - DNA, 1435 bp, Cannabis sativa
tatatatatatatataaagttcttcaagatgaatcaagttctctccacaaattaaagagattatcctttattaatgtccatctttttgtatcatgcatggttaatattttagcaaatcaagtttcacttcccaattaaaacgaaattttctgagttgaaatgatattcaagttttttttttatttttttttaattataagaaattactttatatactatttttttaacctttttttttttcaaatttacggtttgagtttctaaataagttgcagtgctagttgcaataggggttctatacaattttttgctgcaatttaggttgtagctctagttgcaataggggtttctatgtaaaattctataaaaatacaaaataatttgttttaaagtgtaaaaatgaaaaagatccaaaaataaaaaatgatgtccatatatatatatatatattgagaaatagaatatcataactcctaacgcaaaatctatataatgaaattggtgtgatccctataaattcacatattaataaatctagaaattattaattacatattttttacatgacaactgacgataattcataaaaacaaaagcctatataatttgatatatatatatatatgtatataaagttgacttggatagctataactaaagacttatacagttgcaacaggctcatgtgcaaaggactcatataaatatatatatatatatatatataggcagagatctgcatgtactgtctagtgatcaagacttaggatactttcttcattttgtttgattaacaattttgtacttattattatctcagtttaagaatctaattaattacacaaacacaaacttatacattttattgtattttagtacttttccatgccctaacttaattattttatggctattaattatgtccttttagatttaactcatctctttatcacaatttcttgacaagtcataattaattcacaagtttctttggttttatttctatgaacaattacctactttgcagttgcatgcactctctttatctaacaaagattttttttatctatgtaataatattttacaaaacaatttttaattgttaagagaaaaagaaaatatgaatttcggaagaaaatcttcatgtaacaaagtgatatatggattagaatgatagtatcgatttataagtttcttacaataattgtgtattaattaataatttcaaaacatgtaaaaagaaaatatataaatatatataagaaacactcttaaaatgtaaattcaattgtttgaccataaataacaagacttttcatgaaacactgctagactctattttagtggatgacctttgaaattttatacatttttcctattagggtcggctccaaaattaaagtgtgtgaattatagccacaatatatatatttat

SEQ ID NO: 2695 - DNA, 879 bp, Cannabis sativa
ctttactcagcttatctccaataaaaatggcaactaccctttctctagtatggtattttcaactgatatcagtagtgtcacttgcaatttgcagcttatcaggcaccacacttttcctaatattttctttcatttccatttcccctagaaaatagatgttgtttttggtctttgctaatttatgttcttttttctatgctttgtactagattgctatgatccaatggatcctaatggaaacattactgtcacttttgatattctccaatggacatcaaatccaggtggctatctggttagtacaatatgtcaataacaactgtgataaaaaccttacccaaaacaaaatcataagcaattttgtgttgcaggcaagggtgacaatccaaaactactatcagtatcgccatgtggacaaacccggttggaatataggctggacatgggcaaataatgaagtgatttggtcaatgaggggtgcttttgccacagatatgggaaattgctcatctttcaattcccaaataccacactcctgcaagaaagaccctattatagcagaccttctgcttgaacaggcttcgccagaaagcatgaccgcaggctgctgtagaggtggcatgctttaccctcaaaccattagtccttcaaactcattctcttcctttgaaattcaagttggcactccagaagggcatgcttcttctgcacatgcacctaagaatcttatcttacttgcaccgggtcctggctacacttgtggccccctttcagatgttaatcccacagtttcttcagatattggaggcagaagacgtgtccaagtttttagtaagtactttgtaccaaattaagtgttacaaaaagcccaagtgaagt

SEQ ID NO: 2696 - DNA, 996 bp, Cannabis sativa
ctgaaaacactaagcactatatattggtgttttgatgggttatatatatagtattttggagattttcgttaattgtattatattcatataagggtgatatatttataattcattatatatcgttacaaagtttgtacgtctcttgagaagtttctcaaagcagccaagttaacccaaaccaaaaaaagtaaaataaaaataaataaataaatgctgtatttggatcttttacttttgaagtttctagatgagagtgcaaaaccaacttggatattattttgttcttgtagctagagacatattaatttttttatatatattattatagttttcagcttaattaacaatatttttctgattattatcccatttgattagttttagtgataattttttagttgcaagatataattttgtaattaaatgtaatttttaatcataacaaaaaattattaattttatgactaaaacatatacagtacttaaatataaattatgactaatttaattttagttacaactttaattttacttttagttacaaattttattattattaaaaataattttttttatagttgttatgtaataatataatattatccaataatatatgtgaccaaatcaatattctttcgaaaaatatatagttttgaaggagatcacgttctttaaagcttaaaccctaaaattggagatgtgtggtgttgactaattttcagacttgtaaattgtaattagtaaatagaccattataattgtgagttaaaaagaaatccacatccaagtttatataacctatcattttaattacaacaatatttatactatatattattctacttaattttaccatgaatcctaactaataaaaatatgtttttttgactcgaacattgagctcactttgtttatatttataggtttgagagatataaatataatctattctttaaactaatacaaaattttaaagttaattagtaattttcctcc

SEQ ID NO: 2697 - DNA, 2462 bp, Cannabis sativa
  modified_base (967)..(968): a, c, t, g, unknown or other
gggggggggggtgcaaaattgtgtattacaatattttgtaattttttatcataacatagtatacaagtaaaatggagaaagtataaattatataaaaaaaattaaaatgacattataaatgcaatgcttggctaaattttggtatttcatgtaaaaacaaaaaagaaaacctctaaaagaaagctcaatgattggtctctacgatataataattatcaagaggctgcaaaatgcacacatttttcatgacttattaatacatcaaaagcctatataatattgtttttagtttagtcaaattgtgggtcgtaagcattactttgaagagacaatcaaagggtttccttagcataaataatattaataatgaagatttatcccattagacatgagaccgatctcttcctcattataaattatgttcatatactaatgtcaaatttattattttatatgtatgaatttgaccaagtcaacatcaattcaattattagcactaaaatatgatgtgtgtgtttcttttttcctcaacatacaatttgtcacatgcccaaatgtagtattagccgacataagaggtaaatatataatagttataatcttgaaaaaaaaggagaaaacattatgcagtaacattcaggaatgtggaactttaggccactcagtgtagaactggatttgattatagtatattggtgattttatttttaatttagttcaattcttttttattagttaagattattattcgttactcacaagtttaattttgttaaagtggcacctatacagttattttagattaaatgaacaactgatatgtaaaatagttctaactttagaaataaagttagtaaattaatgttcattttttaaaaaaattattaaaatagtaaaatataataaattattaactaataaaaataataaaagtacacttaaaatatattattttttaaaaaaatanntataataattaaattaagttatattattttttttaaataagttatatcatttttttaatattgtataataatatattctaacaaaaacgaataaatatattagatcattaaatatatacaacggtattatatactgtatcattaaaaattaatatactgttgtaataaaattatataccacaaagaaataataacaatactaaattaatactcaaatatatatattatactaataaaattatatatattattattaaaatatatacataccaactatataatatctttatatataataaaatagaaactaaatatcatcttaaataaataatatactatatacaataaaaatcatataccctattacaaaatatatatacttacaataaaaataaaacaaaataatataatattattaaaaaaattatatatactaaatagtaacaaaattatatacaaccataaaataattacatcatacttacaaaattatatatcacttttatacataataaaaaaaaaactaaacatacatatgataaaaataatatactatacaataaaacttatataccatatatatgacaaaaaaatatataccttataatagaaatatatataattaaaaaaaataaaaatataaaatatatagcatgctaataaaattatatgtcacgtcaataaaagtacaatagaaaatagaacttaaatattattttaaaaagaataatataccgtataacaaaaatatatatatattatttaccaaaatatatgcactaacaatataaaaaatatatattactaatatatatgtatactatactaaatcacaattaaaatatatataccatgaatcaaatttatatactgctattgtatattattaaatagtaactaattgaatataatttaaaataaataatatatcatacaattaaaatatattaaaataataattaaatatatgtagcatgttaataaaattatataccgacattaaaatacttgtattatgttaacaaaattatatatcattatactgcaaaacaaaaatatattatacaacaaaatttatatagtaacaactcataaaaaattaaaaaatcgacataactttaaaataaaaaagattttaataaaattaatatagatatactatacactttaaataatttttttctaataataaatataaatattaaataatataaaaacattattttttatttacatattttaaaatgaaaatatttagttgtatagtataatttctctcaaataaatatgtgtgggtggatattgaaactgtgtgtaacacgtgttgggtagttaattaaaataaaacaaaaactttcaatagtttcatcgcaaaagtccggcatgtcaatcaaactagaaattaagacaaagatttatcaaataaataatatggactagtatgattgaattccaacaaagtggtggattgaatataaacaattttcctttatg

SEQ ID NO: 2698 - DNA, 1668 bp, Cannabis sativa
aatgcctatatatgacaataggacttattttctatgcacatataataataaatgctaatttaatcactaataatatactaattttcatgtctaagtgcggttattacacgtcgagccctcgacaatccccgcctctccaatacacttacttcactcgattttctttaattcgtcactgttaagtaaaatacccataactctcttatgcgaattccaaataagacaattcaagatgctatgaaaagctcagaagagctacaaacttcattcacaaagtttttcaagaatataaatagaaaatgatcaaattaaggcttgaatttttagtattctgtaaactaaacccgagttatgccaacttgtacaagaatcattaaatctaccttaactttgtatctttcctgagtttttttcaacacaaatgctaaattaaatattaacaataaatattaaagaaaataaatttaaaacacactaatattaatcaaaatcctaaaaaaaaatgaaaataactctatttcatagagttaacagaccccgaccctaactctggatcctacattgaccacgaccctagcctcaaacacctgagcttggatcccgaactttggtcctaggccctgaccctaatccagacccagacctcaacctcgacttgactccagtccctgaccccaaccccagatcctgacaccgaactttagactcggacctcaacctcgacctatggtcctagacctcgaccccaaccgtggacctcaatcttgatctcggcctagaccccaaacttgggcgctgacaccgatcccatgctcgacctcggaccctaggccgccggccccaaatttagagtattattttgtgtcattttgaaaaaaataatttaacaaaataaaaaaatttaaaatagtatttatccaattgatacactttgttactataaacaatttagtttttttttgaatgtaattaggtatttttttaagtacaatgtaatgaggtactgaagtataatacttctttttaatgtaattattatttattatacttctttttattgtcaaaaaacagtataataaataataatttttttatttgtattttaaaaataataaaattattttcatttttttaataaactaaaaactgaaattaaaaaaagaaaaatcaaaatccccaaatcgttaaatcaaatccccaacccatttggaggccatttggaggggtggcttctagacgacgacgacggtaactcgactcgatttcagtttggcaaagattcaggcgacgacggcacctgcgacgatctgaagcggatatctagacgccggcgttggagaagaaaaggtatggacttcaaatctgggagatttcagatctgggcttgtgacgggatgggtttaccttttttctttttcatttctttctgcaatgagctattagggacgccgaatacatatatatatacagagagagagagagagagcgagagagagagagagggagagagagcgaaagagaagaagtggttggggttgggtcatgatcgggaagggttggcttgggattgattttgttctctgtttttgaatatgaattctttatggtttatgaatctgacttttttgctctagattatgcttgattcttcttgttctttgtaatttg

SEQ ID NO: 2699 - DNA, 1372 bp, Cannabis sativa
ggcctgaagattatcatttatgacaataaaacctcaagtgaatgtcacgttgatcaatataaactaaaatttactactagcattaagaaattcaaaataggttgaggactgttttaaatatattataaataatagacatgaatggtataattaaagaatatatgtttaggtgatggaaaatgtacaagcataaaatgactaacaaacaatatttccacttgttttagtaggacatcatagacattcaagagttcggttgaccaaaataaatgtttcttacaaaggaaaaagaccatgtaatcctttcaacaaagctaaaattgtggctataactgaaactaataatgattcaaatcttagtttagattaaaattataatagtccaaaaaacatgtgaggtgagtttggcttgttcaaaacacccaaacaaagagacccatacattccctgcctaacccacatgaatcaaaccctacaaaccctaacccctcattggacccttgacattgatttgtgtgacatttcatgtttcaacctgtgaatgaatatgaaacctactccgagtggtcaatgttttcgtcaaacctcactttttggattaatcttttttaattaaagagtggctaaaccagctcttagttttaattaattaaccataaataaaacaagtacccttttgggatttataaaagcggtattgctttgatttgtggctcgattttttcttacgacatccaccctttaaatattattcatggcttttgtttttgtttttccccaaaaagaaacaaaaggtaacaacaccctcaaacatttccaatagtaattttttgaaagtgttaaaattttgagtatgatttaaaaatataatattttgttttattttttttttatattatttgatatttttatttctaaaaacactcaccatttaagaatgttattacaaatatattatttattttaattataaattgtataattttatttattttaaattattattaaaaaaaaaatagcatcaataccattacatgacatcaatacaaatttctaaaatgatatcatttctctctaatagtattagcactctcatataactaatttgtccaccttaataagaattctttaaaatttaattattggagatgctctaaaaatcaaaaacttagaaaagtactagtacccgctctccatctaacatgcattatttttgccagttgataagagtaataaatatataactagagagttcgtacataaattgaattgttccaaggtttctctatattttagctactttttaactaatttagagagtcattttttaatcttactccaactacactctctatgttagagtatttctaat

SEQ ID NO: 2700 - DNA, 2229 bp, Cannabis sativa
gaaggaggtattcatagcacctctgaaaatgcatgtgcaagcccaacgcactaagcttctggttgatgatgacatgagtaccaatgttaggtactggtgtgggaagctacaaacagaagaaaaagagacgtgaaagttctcatcaatgattcaatctaattgctcttcacataataaaggaaagtaaaagagaggaaagaaggatacctgactaacagagaatggtgactgaggagtagcttgtagcagtccttgtgcagatggaagctgatcagacaatcctaaagctgccaacttatcatcctccattaatgtaccagacgaaagatgtagaggagcagcatactaggccaaaaaacaaataataaaacattagaatatcaaaccaaagagaacccagaaaaagttattgctggcaaaaccaacctgagataataaatgaggatgtcctgcagaattagatgaaggagcaacctcaagtggtagctcaacttgatttagtggagacattagggttgatttaacttcagcaaccatttgaggttgcgatgctcccacatctttattagaaaaatcaggatttccttcaacttctctcttgcgatccttcagaagggcagttggtgttatctccttcaaatccacatttaggtttttgaatagaacctgagacaaaaaattagcaaagtttgattaaaacacacacacacacacacatatacataggatcaaccattggtcagagaaactacagcataactagtacctcaatgtcgaatttcagattcattttcaagtttggcatcgaataaatttcagcaagtaatccaagaattcccatagtccagggattgggaggttgatatgctagactgacattgcatggttccaggacctgcaagtggcggaacattagccctacatcacctaactcagaacggcaggcatgattagtataaagtatatatttatagttatatacctttgatgtgaatggtattacagcaatcatcaagcccttctcatatgcctgtggagacaatgaacatgagcaaaataaccaaaaagaataaaacaaaacaggaggagagtaatgagggcacacagaaaggaaaatagctgacaaaattagtacctctataatcaaggatttgggatctatttcccgagcccgtaaaacttggtttcttccaattgtcaactttccaagccagcttcctaaattttttaataatgaacgctcttctgaacttgattttattagctctgaccccaaaagaacctaaattgcgcaaaaatgttaaagtccaacgcatcaaatcaaatataaaaacacaaaatgctcaatattaaacttgtcagacataaccttgcagttctcataagtggcctgaataatctctttattcaaggcctttgcatttactttgtccaggaatttcaagtacaaatcatgaaaatttggctcaatacttgccctgtaaaaatagtttcaggagatttaatgaacttttgaacataatataattgaagttcaactgctagaatcaactgatcacaaaagtaccagggctttatttcacatatcataatatgttttatactaaaacaataataagactcttggacaagaaagattcttcttctattgttttaaatgtgtaatgagctcacaaattgaagaccctaactagttttttgactaactggtatgttcgaaaaactccaaaaattaattactttgtgctaagtgatacctaaatatatttaacagagcacatgtatacatataccatgtctaaataacataatttttttacaatgcatggcatttcaaaaagtctaaccttttcataaccatgtattgtgcaaaccatggatagtgctgctctttcaatatgtcaatgaattcctttgatttagcttcaagattagcagaagaaatattattaattataaacgagatcttgtcctgaacctctgatgctggagcctgttaacagaacatgggagtttatttcagatcaagaaaacataaagtaacaaaacaaaatagactcatgatttcctttctcccaaggcagttgatgggtctgcacatctgccatacaaaggtatgcaatacatttctaacattgaaatttcaatttcttcaaagagccaaaatttattggaacatgtatatttttaacaaattatatattgaagctaaaatgcattcaatgatag

SEQ ID NO: 2701 - DNA, 1575 bp, Cannabis sativa
tgatccaataaacacccctaaattttgcatgtttcttttaatttatgtagtgcttgattctaagactaattagttgacctatgatagctgattttgtatacagcccataaatataatatattttaaataataggttattttgtttaaagatgaaaaaaaacagattttatccttctccatactagttttgctttaagacacaagtaaattcacacacaacacatcaatggtagcatttgagagacctacctcaagagcagcaactcctatcaatacaacaataacttgagataatttataaatataacactagccccttcaatttctcctacactatctaaatatattccccattctagaaagtcttgtacacttccccaaaaccatcttacactcttttgtaccatttttttatgggacactcttttgtacccttattcccatgtcttcactccccactacttattcctatgaaccctttattgggtgcctaacattttgtttgatgcacgggtaccatcagagatgaaaactacaatggtcaagtttagtatgtctgaaaaaggacatatttaatttagtttatgttttgaaaatctctaatttcccgaataataattcttattattaataaagaaaacaaaatgaggatagaataatattccgcaatgtaaacagaaaacttatgaaacgttaacatgaaactgaagatacattacgtggactttcatacctggactagctcggaagtgccatataatgactcttcatgctcaataagccgttggtgaagagttcgataatgatccaaatccaaacttaccacaggttctgtatgaatttgcaaccctgccaattgtgtgacaacataggaggccatcacttgtccaaatattgctgggatggtccctagtacaggtatgatacgaatcctaaaacctggcactatctgaaatacaatatgccttacaaagtcaaccaaagaagaaataataacagcaacaaagcaacactagataacataatatttaaaaaaaacaccattagctagaaagaatgtcatagaaaaattgacaataaatttacttttctgcctatattacaggttcatgtgtctgctaagcattttctttattcttttgataaaaatagagttgccaaacatgggtttgtcatgtttttcgttgtataacaaggataatgggtaggcatttatggtccttccagaacataagaaatagatactcagtgcattgtaatataaattttatatttgaatattgaatcgtcatttcatatcggatggccaagagtaattttgtcttttattaagatacagaaatatatgttgcagaaaatagtgtatatagaggcatttactcggtattaatccaatatggaaaccaagctctataagttggataatagctgtgtaaattgtgtagttattgtatttgaatgatttagtctttaggctaattgatgtaccctagaattgtgtttacactggaatatatggtatttaataccagatttgtacctctcagtacggtgcctaattaaaggcctaatact

SEQ ID NO: 2702 - DNA, 2530 bp, Cannabis sativa
gggggggggggggggctatttgtttatttcttttaaaagcatacctaaatatttgacatattttattgagagtagataatgtgtcacctattggactaggaatttattttatgttgctttgagataaaagctaaaagtcaaaacaatatataaattgaactagctataataaataaataaataattttgagaaaaatttcatacccaaatcataagataggagtaaaagaagaaccacttaaaaataacatcaaaatttagagggaaaataataaaatacaaaacaagttgcaaaatgataatggtttttcttttttaagtgtagatagatgaaaaaaaaaatgtgagtaccttatggtctcaaatatataagcaagacatatttttagtagtaatacaatttaatatcggtgttaaatatacaagtaatataaaaaggaaaatttaaattaacattcatgaatttgggcaagattgatacactaaacctaatataaaattagttagaagagaagagaagggtattatggatattaatataaagtgtcttcatgttttttttttttttaattttattgagtttgtattctaaaaatttaatatgtaccaaatgtatgtatataatttcaaatttccttatagaaaattgttagcctttcaagaagtgttatctcttgttagacaccttaaaatacctaataacaatactaaataaaaggacaacgtgttgtgtggtgtagcggtaatcatactttaattggtatcatttcttgcttgggtcaagagtttgaatcccactacaacctttcatgggatatttatattaaaccttaattggatgtgaattttcgagatacatactgatgacccaattaaaaaaggatcaaatataaaacccctataattagcacgtattccccgttgagattcatggggttccatctcaaaaccaattagctatgagtagagtagctcatgttctttatatatggctcaatatttttacatttaatccatgtgagacaatgttctccaatattcccttacttgagtgattagggttatcaatacaactaccttgaagtatatttctatatattttttaagcaaaagttgagtgattagggttttaggttaattggcaaactcatataagagttcgaccctattaatattatgctactttgtgaaaaaataaatgaaaacagcaacagttgttagcaagtatacaaacatgttagtgccaataacatttcctaatgtatattgtttgtcctatttattaaatttatatatatttatatatgattttttttttttttgaataatatatttatatatgatttagttgtcctaaaaccgataaatttgaccaacttgtgtattttaataatcatgtacgtggtgagcaagggaaataaaataataatagtagcattaataaataaataacacctttaaatcttcattataaattgaacccaaaaccaaacccaattgagaatcatgctcatttggtcattaggcacaatgtgtctcaatgcttatttcttttaattttttttttcttttatcttatttctctttgagtgaaaatggacgatgaagatgataatgttcgctcgtcgtacataacggcgaaattgccttgatgataaatctttcaactctgagtccttctcttctcattattatttttattatatatatataatttttcttatataatacaaaatatacacgctatttagtacttattgcaaaaattatattttctttttctttctaaatatatattgtattgttcttagttaattactaaattgtcgtttttttttttcatatatattatcttttttttttttttttggaacaaactattcatatgatttttatcttttgttttgccaacttcatatatatggtcgttgtttttaataaattagtagatttaagttatattacttgatctcttatgatcttgttatttcaaaattttgatgttgtgtgtattatatatcatatataaaaaattgtacttttaaaatgttaatattgtaatttttaacattaatttagaaaaaagtattaattttattgaaacatcatatatgatatttattttattttagtatttttttatttctagaaatatttatttcataaatttataaaatagtactttataatgaacttagtaatcaaatatatatatatatataaatataaatagactaaaaatcaacatatattaattaggaagtgccaagtttttatttcttgtttcctcagtacatataaaaatatcaacttatagtcgttagacatacaagtataaattaactctaattaattctgtaagtgctatattttttgttgtgcaaattatgttttggacttcatctcctaacatgttaattgcatctagtttgtcatgtggaggtgatcatccaatgacctctcaaatgcatcttgtattttgggcttatttgtgtgtttttgccatgttagctttggtggataaaaatat

SEQ ID NO: 2703 - DNA, 783 bp, Cannabis sativa
atatatatattgtgtcttgtcatttcctgggacacacttcattaatagtgtaattattattttcaaaagaagcataagtttctaaatgggccttaagtaaccagatttgtcagaaacaatacaacttgaagagtaagtccaaaatccaggattttctattgtaggcaaatggtagtaccattattattattatgtttttttattgtcatgtcattaaatgagaacattttatcatttgtctttttctcttctggatttgatttactatgtgtccatcccatttattgataattatgaataaaaacaaaaaaaaataaaataaaatgagcaaaatttacaaattagagtatctttagaaagtggtgtaacacacaagaagaaaattttatcaaaaaaaaaaacataccattttgttatactacattattactgtaaaaacctacccttacccaatgaatatgcaataaaaggaaaagaaataatattggaaatatatgaattataaggtaggggagatgaatttagctataaaattggaccattcaacttatttcaataacaacaaatgaatcttcctaaagatggtatcatgttattagttttattcttttcttattttttaattaacattttagaagaagatagagataataattatacattgatttgagtcaagcaatggataagtgcaattattactattatttataattgtatcatatataaaaaataaaattgcttgtgaactaaataaaaagaaaagattattcaaaaaaaaaaaaa

SEQ ID NO: 2704 - DNA, 1072 bp, Cannabis sativa
taggtattcttcaagttatccctagtttttttattaaaatgtaatgaaaacgtataaaagtaattatatcttaaaaaatataaaataaagataaaaattaaataaaataaacaatctaatttcatttagtatataactagcgattatttcacaaaaacaacaaatttttttaatgaaaatacagttttacaaaattgtaaacatttttacaatttttaaaaatacaggcatttcattttattttatacaataattaatttcttattaattttttataattttcccatatacaatatttgcaaacataaccaaaaagactatgttaagctggattatatatggtcactaacctaattaaaaggctaaaaaaaataataattataaaaatacatattgtttaaaccattttcaaaaataccacatttactttttttaaaaaagccaaattttagaaataattgtctcaccaatccaattaatcgctctactattaatcgaaaaaacaaataacataaagttatttttaatgtggtttctattaagattaaataaataaaaacaaaatatgtgtaataaaatctaaaaagaaaacaaaatatgggaacatctgaatgcataaatctcaaaaataaaagaaaaatgccagaatctcagtccccaaaaatcattattggcaacgtacagcgctaataacactatcaaattaagcattacagagactctaatttattgccttttatttcttcaaaaaaaaaaatcaaatataaattattcattaaataaaaaattaaaaatatggtaacatctgaatgcattaatttccaaaaaaaaaaaaatgccagaatctcagttaccaaaatctaatttattgccttaaaaaacagaatttaaatacaactgtttttaaaatctaaattcaaaaacacataaacgcaaaagctcagaaacagaacttaaaaacgagtgtttttaaaaactgaatttaaaaacagtgatattgaaatatgggaatcatctgaatgcgtaaaactcaattgaaaatggagttaaacgccagaatctcagttctcag

SEQ ID NO: 2705 - DNA, 1294 bp, Cannabis sativa
aaagtgttgggatttcgttggcaaggatgtggtgaattgcgttcaaaagttctttcgtactggggtcatgagtccgggattgaatcacacttttatctgccttatccctaagggtatcaaccctgacagtgtggatcgtttccggcccatcgccctctgcaactctatgtacaaaattattgcacgtattctagctcaaagactcagggtggttctggactctttgattgcccctacgcaatcggcctttctcccaggaaggtggactgcggagtcgtctatcctcacccaggagattgtggatgttatcaaaaagaagaaagggaaaggggggcttatggctttaaagatggatatgaataaggcctatgatcgtatggaatggcgtttccttgagaaagttcttcagttgtttggtttcagtccgacgatcactagtttactaatgtgctacgtgacttcggtgtcttatgccatcctactaaatggcagacctttgcataaatttgtcccggggagagggcttcgccaaggggattcgctatccccttatctattcttgatatgtaatgaagttctgtctcggctcatcttccaagagcaatgtaagggtacaattcatggtattcgggtgtctcggaatgcgcctgaggtctcccatctcatgttcgcggacgatactattctcttttgcagagccaatacctctgaagtggaaactttaatgcagtgcattggaaaatatgaagattggtccggccaaatgtgtagcagacagaaatcgagtctccttgtgtccaagaattgtcaaccgggtttgaaagccgccattcaaaggatactgggggttggaaacattcaatctaatgaaaggcatctgggcaacccattcttatttggtcgcagtaaaagaagggatttcaactttattaaattaagaatgtgtgaaaggctggaaggttggagacttaagcatctatccaagattggtaggatgacttttattaactctgttgccctttctatgccctcttactctatgtcgacattcaaaattccaaggctttcttgtatggaattggactccattgttaggagattttggtggattggatcggttgattccaaccgttttcttgctgttaagtcttggaatgctctctatcagcccaagcaaagagggggtcttggttttcgtcggtttgaggatatcaatgactctttactctcaaaactggcttggcagcttgcttctaaagaagatcgcccttggtgtcatgctatgaaagccaaa

SEQ ID NO: 2706 - DNA, 1159 bp, Cannabis sativa
attaggggtggaccttccccgccggtaataggttcgcccttaataagaaaaattgttgtattgatatgaaaatgagagtgaaataaactataacaaaatgctcaaaacaaaggtactccacggtaaaaaagaatttttttcctctagacttatacattaattattatgcattttaaattttttagcccattaaaaataatctcgaacgattcacagtattataaaataatttttatgtcaaattttattgcatggcaaacatcataatgatatggttgcttagattatcgccacacatcattgtcaattgtgtaattaattaattcgaaaaataatataaaatttgagttttacttaaacttttttgttaattattaattgaatttagtttaatagtttttttaatatttttattttaaagtatgcatatagtgttgatttgtcaatagtctaaacaactatattatcattcaacttgtcatgtgtgacaaaaatggacagaaaaactaaatttataacactgtaaatagtttaaaggtcattttaaatagactgaaaaattcacaaagatacaataatgcataggagcattcacatgactgtagctaaaatagcttaactttaaaattttagctaaaaaatgataagacaaagctccatcatcaagtgagctaaattcttcttcattttaacttaaacactattcatgttttatatgtagagaaaattaaatagataaaattaaattttgatgaggtattttaaaatatttaaatactctaaatagtaaaagaaaaaagtactccttccatcttctatataaaccaccctttccaactccaataattttgcattgcttcatcatcactagtcagtcacaccatactatacaatataatagagatggttccagacaagaagatcgtagaagatgtctctggctggctcagactctacgacgatggctctgtcgaccgtacatggacaggtccaccagaggtcaaattcatggccgactccgtcccacctcatgatcaatacatcgacggagttgccactagagacgtcatagccgatccaaactcgggtcttcgactcagaatctatcttccagagaagacacccgaagaagaaactgctaaactacctctcttacttc

SEQ ID NO: 2707 - DNA, 1242 bp, Cannabis sativa
gtgctcctttttgttgagagattgcacacataattcaaggcaatactccaaatagtgagaaaaactatgtagtatatttgttgtccaaaggagaatccaggttcagatctttaattaaactctgctacaaacatgaatcaagagttagaggtttgaacggaatgagtcataatattccactggaaccaatgtaaggatttctatatccgatatgtgtttacattattgttttagaaattttatatttaggatgctagattagtgataatcggcatacttgaatagtaaattaagatctggattaaagattttccaacaactagtactagagctatggtattgatttattattcatgaaatataaatttaaaataattttgtatgttttcatggttgatttggatgattcatggtttgtttatgtgccttgatgattgaatgcgatattgaaaaattttctattgataataattttattttgcttttgaaattattttatattgatagttggttgaaaaataagaaaattagaattttacgaatctcaatttagattaaaattgagtgagatatggtgtttcgaagtttagtgttcatggctgctgcacacgaactagggttggctgagaaactcagccagaaccttagattttattgttaaaaacatcatctgccggtatggtctcccacacaagattgtatcagacaatgataatcagtttgacagtgatatgtttatcgacttctacaatcgacacaacattatcaaaagcttcctacagttgctcacccacaagcaaacaggcaagtagaagttgtaaacaaaacccttaaagacacatttaaaaagcatctggaagaggcaaagggaaactgccttgaacaacttctagaagtactttagtcttacaagaccactgagaggatgaccactaggcaagcaccttttgtattagtttatgactataaagcaatgctacccgtcgaattggaaccatcgtctcataggagggtatcctacgaccaagaagtaaaccacactctcctaacaaaatcacttgacaaaatcgaagaaaaaagagatcaggccaacttaaagttacaagcttatcaacaaaaagtggctagataatttaacaagcacatcaagaacaaaaaattctttgtaggaggcatggtacttcgaagatcttttttaaacacaaaagagcctatagcaggggtacttggcccaaactggga

SEQ ID NO: 2708 - DNA, 857 bp, Cannabis sativa
cttgccaccagagatgtcgtcgtcctggtaatttttaagtggtcaaaattagctttatgtataaacataagtatgtgtttggtacgaacatatatataacaaattaacaaataaatggcgcatagatcattacatgcacatgaagcaaaatataaataacttaataaactataattaactatgtgtgtatgggcagactggggggcaatcttacaaagtggaattgggaagaagagatgggagaatttcttctaagtccagcgtacaaaatcagcttcctcacccaaactttaacttgaaccaactcaactccatgtttgcatctcatggtcttacccaaaaagatatgattgctttatcaggtataaccccataaaaactctaaactaacgcctagttgttttttttatttctatttttctctgagaaagcatacctatgtatctttttcagttatcgtcaaattttaattatgattttatatttttacaatattctagctaacaagcaaagctaacttaataaacttcaacggctgaaactgtaggtgcccactcaattggtttctcacactgtagtaaaatgtcgaaccgaatttacaacttcagcccgaaaactgggagaactattgacccaacactcaacagaaattacgctttacaactgagacaaatgtgccctagaaatgtggaccctagaatcgccattaacatggaccccacaaccccaaggacgttcgataatgcttactacaaaaaccttcagcaaggaaaagggctcttcacttctgatcaaattttgtttacagacaacagatcaaagtctgttgtaaacagcttcgcttccagccctgcagc

SEQ ID NO: 2709 - DNA, 1099 bp, Cannabis sativa
tcattatatattatagtttggacatgtgagacctttttagtgtaatcatcccaaaaagagaataaatacaaaaaggttcaattgttggtaattaaggttggtgcagcagcagctgcagaccagaacaaaaaatgtttgttcgcaacaaacttacaagtcagctatagcttaatataaccgttttttacagtctgccgcaccacagtaacagggcacctgtttcacctttccatcggggccgagcacactatctagggcatagccataatcataggtgagctcctgtcaaatttaatccagtacagttttcaggtaatcaaaaaagaggattgggaatggcatgacttaagtgaaaaaaaatcatgaaatggcatttccttgtaggatcactaataatgtagtgttagacacagtggtgtcctttaagtatttctcaaacagttatttcaccagaatggttggttgaaaatatatttatattccaaccaaaacataaaatagggatagcattggattgaagtgagtttacctgcaaaggtggtatgttgtctgctgcaaacaacattacccgagcaagtttcatgtcatggtgggcgtgcaaaacacattgaacgaacagattgggtccgcaactatgattaataaatctagcaatgttaccactgaaaccagcatcgatacaaaactctggggtactttcagatacttcatgtttctctgatgaagtgatctcagactcagatgcatctcgtgaccgccgctggtttaagattaaacaaaaaaccgaaaatttgtctgaatttaaagttgtcaattacaatccgtaaggattttgaaagaaaatgagtaaattagtgaacacattattgagaaagcactagcgatgcagaagacatacctctcttccaccgagacccttcattgtttgcaagcagtctatgtcaaatatataatcattaccagacacactatctacatcttctgtcctcttaagtattccagtatattcacaaatcggtgcgccagaaggtatgaaatcccacgatctgacagcccaacctttctttggtgtgcggaaaacctgcaaacaaaccgggaa

SEQ ID NO: 2710 - DNA, 1111 bp, Cannabis sativa
atgtgtaaatgtttaccacatcctacaaaaatttggctcatgctatctttcgtgccaaacagaaattaaggaagctcatcttttttgaccaatatgtgtaaatgctccgaaaataaaaagtaaatatggcaaaccaaacgcggccttgctgatgtatgttacaaggcacgtttatcaatatggaagtcgagtttcgatgacccttgtaatgggaatttttcttatgtgattgatcttgttgagcaacatcatcatacttaccttgaactattcatccatagggtctgcaaaaatttgattagaatctctatttattagttgattgattttgatggtgtgtttgtaacactttttttttaatttttttgttaagttgcataatacataaatgtcaataacttgtcaaaaatcaacctttaaacaaggtttgttggttcaacattgtggtgacatgaccctaatagaaaatgactaaagctctttgagaacaacgaaggaactccctaaaatttatgggaccaaaaaatttctaacttaggtaaacatcaatagtctgcatattaatcttctgccagtgtggatttgttcaacttgcacgtatctcttactccattatatatacttgtgtacttttcttcatgacaaaaattccatcatcaacagtttgtgatgtaactaaagaaacttcattgttttgtcatttagaactgtccatattatcttatagtttgcttactttattaatgtttctatcatttgggtattggtaccaaattatcttagtttgattgctttattaacgttgcctttgggatcacatatgttagcctttctgttggacttaaattttaaggaaattgtttgtcaatttatggtaacagaataatcaacacgtatgaactaaatcaaatttgttgttctctccaaatatagctaatacaagagaaaacaaaatatagctagttcactaccacatgcatgtatttttccacaatgaccaagacttttccgcaaacaagtgagaatcatgacctactcaatatatatatatatatatatatatatatgtatgcattatatatgtactaagtaaagaaatacagagaatatg

SEQ ID NO: 2711 - DNA, 1956 bp, Cannabis sativa
ggataataaccatatttagttacaaaaaatctgctactcttttggaatttttaaaagggataataaccatatttagttacagaaactaaaaaaaaaaaaaatcttattttactaaattactagtccaaaaaaaattctagaattatttagttcccatcccttttttttattttattactgtagatagccttttctatgactgagatattctttactagttcaaattaatagcaaaaattggcattgtcgttatgtacagatatctatagtcctacacaaaaccatcctaaaatgatggtgaattacaaatttaacaaataatggtgattaagtaccatcaccaaagacaaaattcaattatagcataaattggggcaatcctacaatcatcggaagatgatcaagtttcagctcagcaaaggggtttttgcccgagctcctgccctcttaactcctcactgcttcaaattgtagggatattacctcattgtcatcaaggttcggacccttttttctctttcggctcttttggcagtgggagttctcctcagcttctgcaactcctccattactaccttctcaactttgtcgatggagttgagaagtttcttctgtggcgtcaagcaatctgaatcatccccagttgtctgattggctattccacgcaaaatctttggaactttgccaaccgaactaactgaaggcgggaaaagcttggtgctcctcacagccgtatatggagtagtagcatcataacgattctgctccagtggagcagctgaaggagatgcaaaaaccccaaggtcctgtgctgtaggactgcccatctctaggccgcttccagattctctcaatagagcccttctcctttcaatagcctggaaagagttcaaaagattggtcttaattcaaatgtaatcaaacattgatcacttatcatcaaaaaacttattgatcttaatcatgaataattataagaaacaaacacagaaaagcagtacctttagtcaaagaggaaaaatattacaagcaggtttacgaaattgacaaatcaaaggcatcaaagcattatttttctctcaggacagaaaagttatgataactactattttcaatcatgtttcctatgtagaaagtttactaaaatggttaacaaactatgatagctacattcccaatataaatgcacaaacttttaaaaaaaaaactccatattataaaaaattcaaaggcaatgcggattggacctaatgatacccttattgacctaacataaaagccctatatctatgccatcgaaaatgaagggaaacaacaaataaagaatccaagataaccaaatacagttagatattatctctaaacaaattaagggttaaacatcaaattacattgcaggcaaactaaagcccacgttgattctaccaggaccaaattgtaaaagtaacataatcaagtcaaacttaatgtcaaaccaaatattgtacaacaaaacagtagtaaaccacattcaatttaaatcatgataaaaacaacagtcaataaacagtttcacgaaacaaaaatacatactcttgtaattgcagtgacatcacgcagaggggttcttgggtaccaagaaggtaactgtgtggtccggtttcgtccccgtccacgaccccatccccgacgagcggttccagacatgggtgtgctctccctccgccaggtcccagctcttggggacaccaaactctctcttctaaccccgccaccatcgtctcttgcagccccaaaacccaccggagtaccaagaacagccgccgtcgttggtgtcgcggttgtcgtttgtagcatgggcggagatccaatcaaggttcgagccaccacgggctcatcgaccagaacaccaaaactattagatctccgttgagtgaaaattccggccacgtcaacaggccttgacaatctgtctct

SEQ ID NO: 2712 - DNA, 2554 bp, Cannabis sativa
cagttggtccaacaatggttgttattgctttcatgtttgttgttagacctgttgaaggtcataaacaagttagggaatctgatgactccagcttcttgtttacttatagcatttgtcttgttttggctgcttatctgcttggagtcttaatccttgaggatactcttaatttgaaccaatcaataatcactttacttgccataggtttaatcattctcatagtacttccaattataattccagtagtattagtattcttctcaacaccacagccttcatcagaggagaaactcctagctaatccattgttaccgagacaagatacaagcgagctcattcttagtgaggctgaggaagaaaggacctcagaacttgatgctcttccagcttttgaaaggcgcaaaagattggctcatctgcaggctaaattgttacaagcagcagctgatggagctgtgagagtcaagcgtggtaaaagaccgcgaagaggagagaattttaccttgacacaggctttggttaaggctgactttttgcttatttttgcctccctcattctagcctctggatctggtatatcaattattgacaacattggtcagatttctcaatcacttggttacactaattcaagtatctttgtttccatgattagcatttggaactttcttggccgtgttggcggtggctacttatctgagattataacaaggtgaaactgaatttgacatcatctttagacttaagaactattgatataattttttctgctgctgaattcacatgtttttgttactttttttttaaccagagattttgcctatccaagaccactggctatggctatgctccaagtcattatggcatttgggtttttctattatgctatgggatggccagggcaaatctatgttgtgactgttttgataggacttggttatggctcccactgggcaattttgcctgctgcagtttctgagctatttggattgaagagttttggagccttgtataacttcctaacactttcaaaccctgctggttcactaatattctcagaggcccttgctagtggcttatatgactattatgcagagaaacaagcttctctcctgctccaaaatcccatatcaactcttggacaagacaaatcactcacttgtttgggcactatttgctattccctcacttgtggtatattatctggactatgcattgttgcagcaatgctgagtttggttgttgtttacagaacaagaagagtctacacccaattgtatggaagctcaaactctctcatttgagtttccaatagaagctttagaaaatggtgatgttctactacacaccagcatatgcatgtgaacaatccttttcattcttattattttttgtggggttttctttcttatgatttaacactcttgtatgtgctcttttagcagcatatacactaaacctcactttgtttttcacttcaaaatttgggtttttctatttgcttataacacactgtctcgatgctatatcatcattaattaaaaagctaaataaaattatcactaaaatcacttagaaatttgggttctctatttttcttttcctcacatcctcaatgtttcatgatagcattgttaagacaccagtaattctcaacaccactatgaggtgggatcatatgtgagacttgatactaaattgtatctaatataatagtataacatctcataatcaaattgtgtttggcactagtatctttttagcaattctttttaactattctattgtgattttgttaaccttaccccttattaaaaatgaaaaaaaaattgtcattccaatttatatcaagggactttatatataaataaaatgtatagatatttatataatgataagccttaataaagaggaaggaaagtctgcaattaatagcagtaaaagtagcctagcaagagagcaaaatatctagccaaagaagtaattacaacatcagaagtggcaacagtattgatgaacaaactacgtacagactaataaatgcttttacaaatggagtgaaacaaattacattatttccaccagactggcaaaaaataacatcttttttttttggcttcataggtagcctataacagtgtgtttttgcatacataagtaatcagaatgttattccatggcatcaaaacttggagcataccaacctaattggtctatgattttcttcatacgctcttcttgtccctttgaatcccctaaagctgtggtgaatggatagacataagtaactttctttgccatagccctgtaagcaactacatctcctttcaccaaaaactccatcacatctcgagcattgaaaccgccatcgacctcggctaacagatattggcctggagttttctaaatggtcagtaactttgaagaattgttcacatttatgtgttatctttaaggtgatattttcccaaatcaaagatagtacagtacactaggctatgcatcactaataccaaaattgcatacacttcattaatatgatcttcacacaaag

SEQ ID NO: 2713 - DNA, 2080 bp, Cannabis sativa
aaaattgggagaaagaaggttaattgtagggcaaagatgtatgaaagtgttgaggctttctgagcaagaagtcggtgcgaaaaagaaagggttcactttggttagaagattcttgatgaagtaaagaaaatgacttcaatcgtcaaaagccccatttatatgggtggaaacggctggaaggattttgaaatacacggtcttgatcaaaatgattaaaggcaagatcattcaacgattggggatacaaaggttgatatttaatgcatctgaaaagagagaataaagcattcattgatcactattttctgacagcatccccaacgcacccgaagacagatgccttttcaaaatcaaccatcattccccttcccaaggaatgcacctaagataaagagtgtgggcctcacagctccgctaaccaagtttcatgctttggcaagtcctctaggatatcaccaagaactggtgtcacgcatgctcccttcagtctccaaataacctatttgcaagacaaagttacgaatgcaacctcttggggaagatagcaagctcccgacactctcaaatccagagagcttgggggtaaatattatcactattaccagattggttctacgtggaagtagcaaaaaggtgccacattagatcgtatgagaatgtcccagattcccctttcttttaagataagttgagaaaggcatcaaagtatctaggaaagcgcacccgttgcgaaggaggaattgatccttgatgttgtaacccaatgcttccgatattcggaggcatacacgaagtataggtgttctaggggttcttaggaattggctattctaggaggtcctgagtttcacttcctagaagtcccctacaacctaacctggagatacactcgatacttgcaccccgtctaacaccaagtcagatcttgtctcttgcgtcagaccgtggttgtgcgtgtacgtgcctatgtagggattattgtccgatgacttgtctaggatatttcttttaaaggagaaacctttaaatgacatgtgtccatgtccacgcgtgaaaactttcattgattacgcaacgtacgatggaagagctaccgaccaaatcaacatttagatggtcttgtagtgttttacagcctcacttatgtgctgagtaagaaaccctggctgagtaaaaggtatgtgcatacctacatgtttgcctatgaatatctccattttttatgtaatgggggtgaacaaattttacttatgaaaactctactgaaattcctacttagctttcctcttagagagaaacaaaatgaatacatagattaccattataaacatttttaatactcaaacattttctgaagaaggctaatacttctgactagtggacgaaggttcattaatgccttaaccacaaaaaatttttgattgtctattatataatattttgcatttccttaagctcttattaatcggtttttgaaaatctcggtaaacactatcagtctcttatttctttattaaataaagacgacaacataaacctagcacaaatattatcatcatgccatcggttaaaagctctcctgactacgtaaccacaatattcacgcaatgatatccagggagtttcaagagagactagttgaaatagattttctcattgtaaaagaagctctatttcgattctccattcatatttgaagttaccatcaaattcaattatattataatagaaatatgtgttcatattaaattgttgatctattttatatcatttttagattgaaataaaaaataaataatgcgagaaataagtaataggatataaatacaatataagtaccattaataaaaaataaatatcaagtttagaattaaatatgatgcatgagcatacttagaaaaatacataaaacaatttagaaatttcataataagttatccaaaaattaaagtttcgcctatcgaataatctacaagacttgttcttgtctttagtaattgtcactaaaataactcttattttccttataaaataaagtaacatttgtttggtcaaatcatgttccctagtttcaatgaca

SEQ ID NO: 2714 - DNA, 3083 bp, Cannabis sativa
agcacacttaaaagcaacataatgtgttcaacaatttggaaatcactaacaatactttccaataatatgcaaagaatcattccctgaaatctaaacctgaaagaaaaatctacacagccttgttcttacatcaagaaggttcaaaatcaaagtgactacaaaattgtatggtttaagctgatacttgaccattattctcaattctcattttccagggacaaaagaaaagattgaacagttttctgaactccaattccctttaatgtccacaatagaaagtaccctttccatttcaaaaaaaaggaaagaaaataagtacccttcacaaactttaaaaatttactttattaagatggtagtgggagactagattgaaacaagtcaagaacacagaattggaaatttacaaaaaacaatcacaacacaacacacagaaattgccagtataaatacaaaatttatatcagagacatgagttgggtccataccaggcctgtccttgcctctgaaacgcatcactttttgaacccaatttcacacaagccattttatctcaaatcaaatcaaatcaaacccaaggctcttgctatacagctcaaactgaacccaaaaaattcttcaagtaaaggcaatgtgcaagtaacgacagtagattttcttctctcccaaacagcaccttggttccttctctaaccaagttttgaaaaaagttgaacaccagcaccagtgaccaccacaatgtagctcctctttctgatctgtgacccaaaaactaacccaacacttggagaattttcctgctaaacactcccaaatctaacaataagaagtaaaattgcttaaaaaagaaaaccccagttccaaatctgcaaaaacctatggacctaaacccactcactccattacattattcataccccactttccaaaacacaccagcaaatctcaaaaccaaataatcctaattaagacaagcaatttaggtcaacccctcccccccaaaaaaaaacccaactgttacaagtctctctacccctacaacaacctaccaagaaagattccaaaactcaatagtaaacaattcacaatggaccaaaaccactcatacccatgaaagtaaaaggttgaaaccacgtcactgtggtgccataatagtgtctcttaaaggccaaaaaaaataaaaagccatgggagagagagtagtgaaccaaaaagaataccccatatgagctttgaaaaacccaaacgcatgtggggtctttagcttaaaacgcactcattgcttttctagaactgatttgagtttttagagatatattatatagaaatagaatctttattagcataaaaccaggtagaagaagaagaagtgtaattgacctctctctctctctctctaaagagattatcttttgtatttatttaagaacagtttttgagttaaatgacaagctttgaagctattataccaaaagaacaaaaaaaaaaagttaaaaaaaaaaaaagaaaaagaaaaaattactttaaataaatatataatgcattattattattgttattattatttttacatatacaataattgttttgtgcatgtattaatatcattatatctatttttgtagttgtacagctaggccatgtgagtacgttacaatatatataattattgtatgtatgtcttttctaatataataattaattttgctagagttgagattttcagtcattatcaaatattaatagcatgcattaattataataatatatgaattttaatttttaatttttatttttagtggactgactcattttacctgaccaaaataattaatataaatgcatcaatatcggaaggtgttgtttatggttcatgtaaggagtgaatttattgtcctcaaaaagagtgggggaccaaaaattaaagaatacctatgtatatatataggtaagtactcttggggaaggatttgtttataaaagagtatataaataaataatgcttttgtaaaaagaaataaataatgctaagtacacatatttcctttaaaaaatttgattggactaaattccataatgttttatcatctcattttataatttaggaatatttgtgaacaaaataaacaaattagtaagtatcttatctaattgatttcaaaagaaaaaaaagtatcttatctaattgtttaattgttaaggtataatacttttatttttaaattttttttaagtataatttggatttttgtcctttgaattttggcatatactaaatcatattttctgaactttcaggtcgttaaaaattctcctgaattattgacattgttggatttaaagacttttgttcaattttactaaacaaaatctgatgtggatgaaaatttagagggcataattttgtacttttgaaagatcggggacatgatttagtaaatatcaaagttcaaggggcaggaattagtatatggacaatcgtcatattagtaaaattgaatgaaattggtcagaagtccttaaatctaacaattttaatagttcagagagattttttaacggcctgaaaattaacggcctgaaaagttacggcctgaaaagtttagggggaaaagtttagggggcatttagggggcataatttggtacatgtcaaaattcagagggcaaaacaaaacaaaaattttacttctattagtttaactttaaataatttaaataaaaataaaacgaaaaaattatgtagatattttatataaaaattaatttaaatttacaatgcttaaaataagttatctaccgcgatatctcacttgtgttttattgttcatataaaaacgtataataatcacattcaaagggcaaatcaatatagccgcaattactaaaaaaatcctcaaatataaaaatcttaaattctatttcttttttttaaaacaaaaaatacattacctaattaaaaaaaaaataaacatacaggtattgcaattaacatcatctaattatacctaattaaaaggaaaactaattatacgtgcaatgcatgtaatatcatcctagtatataatataatatgaagaagaa

SEQ ID NO: 2715 - DNA, 904 bp, Cannabis sativa
cctcctgctaatctaatcattcaccacccaccaccccacatctggtgaattttcaaaatcaggatcacgatacatgaagattttgaatatcaacctgtaaagcttgcagttcattcccaacctctgatatttcagcctgaactgcaagtagcttctctagtttactccgtgcctcgttctggtaaggctcagcaactacttttacgaagtgttccaagttgtcgagcgcttcaatgagatccttttgcatggcctcttcaagttcacgagccaaggcatcggctgttttgttcactttgtccatcattgcttgcctacgagccgggaagttcgaaatcgctaatagtctaacacaatgaaagacaattgagatataaggataccaaatggtgattcattttgttttcttttgccttgtggattttggttaaaaggctaacagaaagcaacttaaaaatatagaagtgtttctcacaataacctattcttagtaatcaatttgaaaaatgaccttccatacacattcgagaacctattaaaaattcttaagacataatctagaggccattttgcagaaatatctaaagaacatccttttggaaactgagatcaattctctcctattactaataaaaagaaatcgatgttattttcatcttcaaactatacagacaactctatggtgtcaatttgcaaaaagacctccaattcagacatggtgtcgagcatttccaatgggatatcttcaattctcgacagggttttgagaatttccaacaaggtggtaaaagtgtttggaaggccatttagcaaaaaattatcaaaacaagactattatgatatagttattctaacaaacactgctagtaactatgattgagatcaatgaaatgaagcattgaaa

SEQ ID NO: 2716 - DNA, 1280 bp, Cannabis sativa
aactaaaagaggatgtcatgtctccataccatttctcacagtatgcatactcttgtttagcagccaaataacatctttcacttgtcatgtttactcctcttcgcccgcggcttctctcttgttggcttagattttttatgactagaatcaggttctgttttctgcataatgttatcaagggatttaactacaatgagaccttcaaaaacctcaccacatatattaaaaataataaaaacaaaacattccgcacaatatctattaccatctgctttgacctcttgttctgtaatcgacgacgttgtctctgcctgccccttttttccctctttggtttatcctgaattgaaacaacaatcttgtcatttattaaatattgcatctcacaatttcaaggcttccattcccaaagaatccaagacaaatgaaaaacctgtgaaggaggttcagcttcctcatgttgctttgcaggtaagtcttcattgtcaatttccccatcactgttgagcatactcttaagccttccctcgttgagtaatttctctgaacgggaatgtctctacaatagtaacaagttgaaagttaggaatgaccttatcccagattaaatttcaaatctcaaaagctattccctcccaataaggaattgagccttaaaaatcatggcatataatgctttactgttaggaaaagcataaacacaaatgagaagccgtaatagtagagcaaagtaactataaattacaggagggtaagatttctgatgcttattatcaacatcgttaccttggacttcaaatgagccttcaatgactcctcatttaaacagactattcttgggcataacttgcacttaaaaacagatttggacttcaaaacacattctggaaaacctgccaaatccaactcattgtctgacagctgactgtcaattcgatttggtctttcatttccagaatcagaatcctcttcatctattggtagacctaacaaaatgacatttaaaataaacatagttttagttaaggaataaattgcacaaaaacatttatgagaaatgctcttaaagagttccagtttcgtaactacttcaacacccgaattctcaaaaccacacctttttgctttctcatctaagttatcagttatatggtggctcggttttgctaagcttattttgtttataatagctaaaaagtaagaggattttcagctgtaaaaatagtttagaattctcaggtccttttaaattaaataaataaaaagttaaagagcttgta

SEQ ID NO: 2717 - DNA, 1253 bp, Cannabis sativa
tattaagtaaatgaaatatcacctgcagcaacaaagcagctggcatgccaacaatattgctccgaccaactacaactgccctcttgcctttgatactgacgccagatctatgcaacaattctatgcatccttttggcgtacaaggaacgaacattggttccctatcacgcatggctaaacaacccatgttaagcgggtggaatccatcaacatctttctcaatgttaacaacatctaagatgtttgtttcattcatatgctggatacaataaaagaggggaaataattgaaacaaatgaagtcataaccttccaagaaaatagaacagacccaactaaaattcatacagtaaacaatatttaaggcatctaataactcgatcacgatttagatgaatctttttcttgtttcttttgggggtcggtgaagcagctccatgaatgcatatttcaaaaagaccaaccctataactttatttaaggtagtagaatgaggtagtaatacatcaatgtcaagttaaaaaaccattatgcattgttaattcctgcatctcattctccttatacagactaaatggcagttcttttaaaagttgttactttacacgtcaaatcactttgtcttgaagtaagccataatctgatcccactaagctcacaattcacgattttgctttttcttttctaatcattatcaaaaattcaagtttgaaagtaagaagcttacagaaggcaggggcaactgaacaagaatgccatgaacagaagaatcattattgaactctgagatatggttgattacttcttgctcagtggcatcctcaggcaaacgaacttcaaaagagatgatcccaacagactcacaagctttcctcttgttccgaacataagtcgctgaatccttcctgtcaccaacaattataaccgctaaccctggaacaacacctattgcatccttcatcctcgccacctcaacacttatttcatcccttatttgcttcgcaattgattttccatcaatcactttggccgtagctgatgccgatgtcgatgcctccgttgaaaatgaagctgtaacaacatcaaatacatgaggggaagacggtagtctcacaacccacaaagaaactaaataaaaaagctcagcccaaaaatcgttcaacactatgtctcgatgaatagaaagctaaaagcgatcagagacttctctgtaggaacatatgggttctaaaagatcgagagtcatttctcagt

SEQ ID NO: 2718 - DNA, 1627 bp, Cannabis sativa
gagagagagagagagattgtacgtgtaataacctgacattttcatagtacaatagcattgatttcttacaatttacgccaccaacggctacattaattctaccttttacgctcaatctgcaggtaccaaaagcattcaatattccacctacactttgcaaatttctataagccacctcatgaaattaaacacagttaaataatccaaagaaaagagccacccacttaacagtttcagtctttcagctcctttgttgtctcatgcacttaataaaaacagaaatactaaaaggcacggtaatacttggtaaatattattattgattacttggtctatataatttaatgtaataattttaaaaattatccttagccaatcacaaacaaaataacatatctaggagatactaataccatcatacccaataagaaaatgtaatatgcaacgaaattgcttaaaaaaataattaaacaagtcaaaaaactgcttaaccattcatatcttgccacgtcaaaatagatcctctgacgtggcacagccttggtgtttagtactttacaatataatccgataagaaattgccagagtaaatattttccggcgactgatatatatatatatatatatcaacaaacaaacacactcaaactccaatcatatctaagctacaatggaaggtaccaccctcttcttccactcggccaatattttcatttgagtagaactgttttaactgctcacgacttggagaaggagaaggagtaaagtacagaggcgaagcacaaggagtcgaaaacggcgtcgcttcatccaccttcatactcatcaccgaatcaccatcgtcggtcaacgttgaccttacaaaaccctggtcgtcgtcatcatcatcgcgatcagctgaagtagtaatactaatactactctgttctttgctctcctgatctgttttcccagcttcgaaatcttcctcctttatagtgaaaagcaacctcgtctgtctgtaaagctcttgaagcttcaacaattcgtccacctcaagcgccgtctgagtagttgtgttattgttcgggtcgggtcgattgttggtaatattgggttcgatccgagcccggttgttgttccagcagaagaagtaaagaagttctttagaggaaagagcgtaggttgagtcatcaccggtggtggcaactgattctccgggtgagaaggtccgtcgttgaaaacggcgccgtcgccagatgacgtaaacgaggtctgcgatgagaactagaaaacagagtatgaaaactacaataagcgtagctccgagcttgctaaggccgctcatggttgacttgggttggagaaatggaagtattattataaaagaacaagacttgggctttgttttttctttattattaattttctcgaagggaaactgggcaaccggttggttaccggaaagggtatggaaagtaagcagtactgagtgtgatgggtgtcgcgggtcacgtgagttgccggtggatgaaatggatagaaggagaaaagttaggagttgttttaaaagggaggaggaaagacaataagacttttttttgttgaaaggttattgtggtccatttgaaaaatataaatttattaa

SEQ ID NO: 2719 - DNA, 1119 bp, Cannabis sativa
tctatgcatttttacctgatgctattttacctgaaatacgtggtttcaggctgttaatttgaagatgagtcaacctcttcggcttaatccccaggtaattattgtgattgttggacttttctgtttatcccattgaccagaaacgacacacatattaatattgacgtgtgtaatgtgtaaaagaaatctatttcatgccatgagtctttattgagatatttcacacttctcactttgcaaaatattatttgcagtgcctctcaaagaaccaaaaggatgcattagctgagataattgatgtcttaagggcagtatgtcatgcacatagattgccccttgctttaacttggattccttgtaatagcgaaggaacttctaatgaagtggcaggggtatgtgtcggagatggcaaaacaagttcaactgagaaatgtattttgtgtgttgagaaagcagcatgttatgttaacgacagattgatgcaaggttttgcaagtgcatgtgtagaacaccatcttgaagtaggacaaggtttagctggaaaagcacttcaatcaaatcttccctttttctttccagatgtgaagacatatgatataagtgactacccgttagttcaccatgctcgaaagtttggtttaaatgcagctgttgcaattaggcttagaagcacttatactggtgattgtgactacatattggagttctttcttccagttagtatgaagggagcatcagaacaacaacttttgttaaacaacctctctggtactatgcaaagaatctgcaagagtttgagaacagtttcagatgtagaaattggaattgcctctcatgatacatttaaggaggactcagtcccaaactttatacctttgccaggagagagttctaatatggtacaattagatggtgacttgaattcaactaatgaagttcccttgaagctggctgagagaagaaatgaggcacacaaagtagataatgtccatgaacaggtagtatttcaaactgtctctcttgtttgtttgcatgcttcattttttcccctctagaaacaaatcagttatatacttggtattttttgcgagggggatatttctggcaaaactactcctt

SEQ ID NO: 2720 - DNA, 1909 bp, Cannabis sativa
agtgataaagaattttaacataattattgatataatggtatcgatcactaaagactttattaaagaatatgtcaaacaagtaataaggctatgatgcttggatgcacaaatttggatattgagacctctttacgatgtggttaagcacttatattggttgggccatgttgtatgaattaagctgaggaggctactcataatcacagtaatatctttaatattagggtgcttaatacttttttttcaaaaaaaaagtacccaatactatacttatgtagcatgttattatttattaaattaaaaaaaaaaaaatatgagaattgatattaaattacaccaataacaatttcatacctattatagtacttgacatttagtgccccttatttctcatatccaaatcataggtagacattcacacaccaggctgtcccataaccgcacagacaagaagaatcaaacatccattccttaattcttttcaccaaaaccaaaggtaattttcacacatacatgtatacgagatagattaattatcttaaagtggcatatatattcacatctattgtaccataagagtgcgctcagatccattcacaagattccgttaagtattttccaatttccatcaacatatctgggatatcattatttgtttcttgattcaggtttggatgtattttgagtggtcaatggtcataaattaagatgtcccacttgattgtatagtagtgaagttggtttcataattaactactcttttttgcatacaaattgcgctcttacaattcgaaaaatccaaattgatcgtatttaatttatatgaaaattatgctgatgagtgatgcttacttagatacaattgaaatgaatgaaagataggaatagtttagtttagagtcaattgctcttataatatattattagtatcttttattttgttaatggtgtcctacttttactccaataaagagaaattcttcacctgtacctaattatatataatgatcatgacaggtaactgcatataaagaaggaacttattaattaaattatattttaaaaaaaaacgtcaacatgagatttaatgacatcataacatcagtattaatgacccaataatccctgaagaaaatagcttattagttatgttacttaattaccacctacaacaatggctatttagtatttataagacccgaacttaaatatttgtgttatcaaaattttaaggaaatttattactacacttttactaactggattatttcataaatatataaaaatgacaaattttttatactcttacagatttgctttttttatatatatattttatggatttttttttataagatacgtagtgttgttttcgaaaaaatattattttaacgttgctgttagaggaaaacaatataaaagtaaaaaaataagtgaaaacatgtaaaaaaaaaatcgtaaaaatataaaaaaaaaaaaaccaattttaaatgcattgtgtaaatttcacttaattgagtacacttaaaatatcaattaataattaagaatgaatataaactaaataaactacattgatttgatataataaaagtagttaagagcaccaagttgaatataaatagcttatatagttcgtttttctccaaatgcgtttggttaatttcttcatcgacccatgccactttttctcatatttatctaattaagataactatggttaattaataatgaaactaaaactaaagtacccatattgaaagaaattgaatatatatatttttggtcagaaagttggttaatgtttcactcctattagatataatccatataataactaataggctgctctttaacaagtccgccccatgttactgtattgttttcttaagctataaatatatgacca

SEQ ID NO: 2721 - DNA, 1443 bp, Cannabis sativa
taaatcaatactcctaatttgaactcacttgcctttaatttagtcctgttaatgcaaagtcatatagtagcagagtaatattgatttaattttaaggttccttgttcctctacgttgcataactactattacatcatgaactttaactttttcattaatgtctgaaccctatgcttatttttatcttatatcttttcttttataggtggttgattggaactccagttctgatcctgcaagaaaagttgtggttatcacatctcgtctactaagtgatgcacatcgatacattttgcgttgtctaagcacacatcaaggtgttcgttgttgtactatattcacatcaatctccgaggtgcatccttgctctatatagttttccattcacgaaagtatcttttgatcgcatatttcaaccatcatttttgtattttgacttcaacaaaagtagtggaggaattcatacaatacttccgaaaaaaaagtcagagttaggtgtgaaatagggaaataaagctgctattttttagttcacaaactttaagactcattaagactgacttccccggcacatgtactcctctatttcccaaagtactgtagtgtgcttttcccccttaaatgattgggcaagaaagtactgttggttattaacttttatgattgtcaagcatgcatccaatgtttagattgattcttacatattcaaatctggaattataatacccctttataatcaggattacattaattcagcaagaccaacagttcagtgtggcttatcatgtgtgatctgttctttatgttgcttatagtgttctttttttctttttccaaatgtttgctaatgcagttagctcattcagcataccctgattcacctttaggaccagatgcatttcgtgaatatgaatccttgcttgtccaagattacgaagaatttgccaagaaatgtgtcacaaagaccaagcaacaagaatatagcaacttaaaggaggatatgaatttgaactctgaagaaggatggtcgcaactcacattcattgaaggggataaccctcatcttgatgccagtcccactggaagagatttttacaaagataatatagtagaaggcacagaagatgtaggacaaaagttgcttgtttctgttcatcacttcccaatgattttgtgtcctctttcaccaagagtctttgttttaccttcagagggatcgatggccgaagcatgcttatcagttgaacatgctgatgcctttagtccaggtttgcctcccttaagtactggatcaagttttgatggtgatgatactcctcctggagcaactcttactgcaaattttctttaccatcttgctgcaaaggtaataactccaatgtgatgtgataatgtatacatgttttgcttttcttattttagttgtcttactatttttttttt

SEQ ID NO: 2722 - DNA, 4176 bp, Cannabis sativa
caattgtttctttagctcctagaacgcattttcacattcctctctccactcaaatttgttgttgcctctgagaatgttgaagaagggtacacatttatctgtagacttggatacaaatctgctcaatgcagcaatgaatcctgttaggatttgtgcttccttgacagtggtgggcgacttcatgttcgaaagggcttggatcttatttaggtttgcttctattcctctgtcattgactatgaagccaaggaattttccatagcctaccccaaaagaacatttgagggggttgagcttcatgttgtagctgtgaaggattttgaagtattcgtctaggccctccacatgccccccgtcctttttggacttgacatgtatgtcgtccacataaacttccatgttgcggccaatgagatctttgaacatcatgttcaccattgatatgtggcccctacatttttcaacccaaaaggcatgattttgtagcagtacaggcctagatttgtcatgaagctagtgtgctcctggtctggcgaatgcatctttatttgattgtaacctaaatacgcagaaacttaggatttcatggtcagctgtggcatctacaagctggtaaattctgggaagcagaaagcagtcttttggacatgctttgttcaggttggtgaagtcaatgcatactctccacttttttttgggtttaggcaccagtacttggttgatacccataatggatagatcgcctctgttatgaagtcatgggctcatagcctcttgacctcatctttgagtgcttgggcacgcttcttgtccagcaacttccttttttgttgaatacgtcagatattttggatcgatgttgagtgcatgggtcatcatggaggggccaatcccgaccatgtctccatgtgaccatgcaaaaaggtctaggtttgcccttagaaatcttatcaatattgatttaatttctagcactaaacctttcccaatctttagtcttcttgttgggaaaatgggatcaacctccacttcttccaactcttctacaggtccaaagcttcctataggatcccgaaagcgaggatctttgtccgtatccctactttgggcttgacttcattactttttactaggcccatcttctgggcccttggcgagcatcttctctttcttgaccttagacaaggtcaggttgtaactgtgacgggcagactgttggtctcccctcacacatcctactccataccttgttgggaatttgaggcataggtgatagatggatgtcaccgccttcaggtcattgagggctggtcggcctatcatggcattaaaggctgatggaacgttgattacgacaaactacgccattagagttttggtggttggttctctccaactgtgaggggtaatctgatatacccgatgagagtgatgccttggctaaagaagccatacatcacttggttgcatggcgccaggtcgatgagttggagccccatatttttatgtgttgacttgaaaagaatgttggaggaggctccatcatccaccatgcaacttgctatagtcatgctcctgatttgtgcagtgatgattagggggtcattgtgcgggaagctgacttgagcaacatcttcttgcaacttgctatagtcatgttcccgatttgtgcagtgatgatcagggggtcattgtgcgggaagctgacttgagcagcatcttcttctataaaggaaatcgtgggctttccaagctttggttgcttaaagcccctttcttcaacagctaggatatcacttttaggctcttgatgaagtgtctgagcatagcgcttcctagctttgctggtctcacccgctatatggggtccgccaataaagacccctaagtttcctaccactggtggtggcattggatctccattctgggcaccttgtgcctgagtttggtcgttctacacataacgacacaagtggggattgttctgccttatgaggtatccaatctccctcttcaaattctgacactcattagtgtcatggtcgtagtcgttgtgataccaacagaacttcgacgtgtcccttttgttcatctcccttttgataggaaagggctttttgtaggggactgttccctaagtagccataaaaatggcttcaggtttcttcgttagaagggtgaagtaggtatacttctactccttgttcttttgattttgtggcgtgggagaagtgctaaacttcccattttcgccattgttccttcttgagtttttggtgttgcgtttgtttctagtgttcttacaactagtagtttggatagagttgctagtgtgtacatggggacctggtaggtcatgagactgcaggacatctcgtgatcacttgttattgacatgccctgcctgggcctgttgtacggcttctttgagtttgataaagtcatccgctctatcacgaaactccttcacgttgttggtggagatccttcagatgtctttctagaagtcactcaatgggagtatgccccccccccagtatggccgtatattgacctcttctataaggcctttgacttttgtagcctcggtcatgaacctctagatgtaatccttcaaaagttctccttgtcgttgtttaactttgacaaggtcttctagctatgatggtacaagtctcaaagacgagaattgtgtgtaaaattctcaagagaactcagcccaagagttgaatcttcctaggatgagtttgaagtaccactgttgagctatttctgacaaagtggttgtgaatatgtggcattgcacgtcatcagtaaccttctagagatagagttgcatctcaaagtatttgatgtgcgcaatgagtcttctcgtctggtatacattttccatactggcatcttgaacatgggcaagggcaaggcatttatgtatgatgagaatggtggtccccttgaccggtctagctcaaggcctgaaggctttggaccaattattccttgaatcataaccctgagtcggtccaactatgtttgcacaaaaggatctgttgttgtagggatttgactgactggccctccctagggggttgtcgatttgggtacaacagggtctgaccggccatactctgagagaatgtttggtgaatatcagccaaacctgtgttgaattgtagacctggccgaccactcccaagtataggtgtccactttggctggtcatgcctacactaagctgctgtctatggccagccagacctgcattgggcagggtctggccgcccatagctcctccatggctggccagacctacaaagagcggggtctggctacttgtgactccttagtggttggccagacctacatgcggcagagtttggctgccccagactcctcagtttactgttgttggcaatgtgtcggtaggaggtaaatcacaccagttggtggagtttggtgtatctagatatctgaggtgatcattttcacttctcaaatttccgttttgggtgtttccatccgtgggccttttcggttgaagattgaccttcgggtgtctcactctgctcagggaggaagtgttcccccctctccggccaaggacacttctccaggtggctggccaacaaaaggctgaatgatgggggttattgttgagcctgagatcactggctgcccccatgccactggctgccgagatctggctgttgttgctattaaacatttgaggtaatgtttgtccccccctctggtaagggaagatctgtcctagtccctaaaggaccaggttggtcagctcgtcgatagaccctccctaatatatcaactagtcttccttagagcgtatctttgatgagagtatggcctcttccatcggttctctggttgaactgccttatcagattgttggcctcttcgttgtggtgatccaacttcgcttggtgagattgaaaggtgtactcctagtcatctatccatctcaggaattcgcatctctactgagtgaatacatcacaatcaacaacatgtggttcttcagttaagtcaacttggcctacggcttctctcagtcttgctaactcgagatcttctcccaagtccacatggggcttgccaatcgcgagcttgccaactcctagttctatctctagcatagtactgttgggttttatgccc

SEQ ID NO: 2723 - DNA, 985 bp, Cannabis sativa
tataacaacaacacatctttttttcaagtcattttctttttacaactgacagtaactaatctagtcggcacaatacaaatgcactgcaactgctggttttccttcaaaaaaattaaaatttctattacagccatagtacctgatcctgactgacataaagcttttggcccattatgctgaattgcaaagatggacaaataggttcctttcttaagtggccaggaatcctgtcgtgtacaggagcccacagtcgaggaatctgaaactccagaaaatatctcagttcttcagcaggaggcttatctgtaaaaaaaaaattaacccccatataaatcaatatattaagcaggattacatttttaatctctactacagaacattacaggaaaatgatagtacccattttgaagcttggttgtcttacattcaagataaagattaatggcacgagtaagataatcctttccaactaccccatcaagaagagctgttatgggacaaaatgtcatctcaatgacatctggtgatgacctgatggttcttgcccatcggatgtggttttgttctagatcgtctcctccccttcttcggaaaatgactgtcacatcctgcataaaatatcagtttcaaggaattcttagtttaagcccttctggagatgcagtgaactgatttcaaactgtgacatcggtaaaaaacacaaacaacaaataaataaaaagaaagaaataaacttattagtgaacactagaaaaacttaacatcatattgaacaacaaatgaacaaaacttaacactgacattaaattatacctacttttcatccctaaactaataaatagataaaattttgaagaaaacacacacacacacacacacaatggccaattgtttgtgtgtgcgtgatttcgcttcaaaattttatctatcaatctgacattaagttatgctagcaaaagaaaaggtcaattgttggtttattttg

SEQ ID NO: 2724 - DNA, 2317 bp, Cannabis sativa
tgtagaatttagtaaataatgggggtgtatgagtcactttgatgagagagggctgtgatcgagcatgaatgggttagtatagtatgagggtacaaggagagcatgaagggaatttatataagtgggcctcggctcttggagagtactgggtctcttgaatacccagctgttctgttttctttatcgttttatcatctaatgtcaaacatcagatctgcctgttgccatctagtctcaattttctcaataatttggcctgttctctctgatattaagtgaagtcactggttgatcaacaactacttgtaggctatttcatgaactttaccaaatatcggtgtgataatattagaaagaaaaaacaacattatgctgtataatatataagatgtaggctctttagttttagtgatgttaactcataaaagggaactattgttttcatgtaatgtaatgttgacgatgtattttattgcaatgatggtgagatttcagcacttgacaagctcagtgtagtgtatgtgataattcaatgtattgtagatgtaatgtttgtgacgttgttttgattccctattcacacacaaaaaagtggttttggtgaagtttgttcatatgcatgctttctcaaccctaatataggagaaatataggcaatgtatataagattcaaggactaagggtgcagtttaggctttgagagcaagatttcagtttgacaatattgaaatgttatcataatgacttaggattgaaaagcttactaagtttgcagatgcatcgtaggaatgttagaagaaagaaattgtgagaaacccaaaataagttttcatcttatatgactgatggtatcacgtttgtttgtcaatgtcaataaacattctcttagcatctccaaatgggtacttgtatgagaatgcaaatgaaaacttcaagagcatcaaactcctagtcaacttttctacagttcttcagaagcttttcatttctgtttcatctttcattgacaaccctctaaggattgtatttaacatggttcaggtggtgccgtcgcatatttcctatccaagctacttgtagtttgaatgagaaggaactacatacacttgtatcaaagcttgttcttgatttcgtgagcgataaacaaaagaaactggcaaagcctttaaaggtagaaatttcagtgcattaatttagataaattgaatatgcatatggttatggtacttgctagagtgagaagtataagtcatcatgtgtaggtcatgtattcgcctctctgttgtaactcttttgtttatgctgtgtgctttatttgcctactttgctgtgctagcctatctttccgggcttaaacttagtttcatgtctgatatcttagaaattcatacttcccttaatgtcttgcaaaaattctcttgtgtccaaccaatttttcattcggtttatttattcttgaaagttgtttcagcatcctggtcttatcgtaagttttgtcatgaaacttaacaaattatgaatggtacaattcaaactgagatctgaacacgaaacctttcccaccctcacagaaaaacagatattcatgctgtgtttctttatttcacttaatatcaattcattttctctatcttgtagtttgcagttggattcaacagaagaggaactgaagaggcagagatgaaggttccgaaagataattcaaatatctcaaccggatctaacttgttggatcgtaacaactgcttttcagtagtggctgctgcagtcaaagaagttgtgccagattcagtagtggatcttcggtctccagaggtgaaaacttaatatatatttatgattattagttttgtgcttgcttatactgacttacaatgcccaaatacacagctttctgtacttgtggaactacttcccctctctagggtaccgaacggatcattagtcgttgctgtatcagttctcccacaaaatctagtcagcacaaaaccacggctgtgtataaaggctctggtttcaaatgtcaaaccaaagggtgcaaagcattaagcatgagattgttgtgttcaagttaagtaatgtgttaaatatgttattccctatatccaatgtgttttaggacattattcaaactagttgaatttggtttaagatttatttgtcttttctttatttccaatcatatcccagtctactaatcatgttgtttgttctgtactctttcagtaggcatagccataggaccctgctaaattatctccctttcaagttggaatggtcggtgctcggttaatttttcggctagagccatggatag

SEQ ID NO: 2725 - DNA, 1640 bp, Cannabis sativa
ccataatggttgtaatgactccagcatcacgttcatgaggcatggggcgggaagaaaatttttgaacaatctctttttctcgaataagaggtgacttacccgaatggtgattacggtgtcccctaggagaagctgataacgtcctcttttttcattttgatggtctctcttccagaggtagagacttggagctttcaatttgcacagcaggagcttcattggttgttgaattcacaatctttaattttttcctaaacagagtccctggagtattgctatgggttctgaccgccttcttctttggtctagagaccggtttcataggtgcctcagagggaggggggttattaaccattggttccttccccttggccgatgtttgcttcgccgtagtgattatcttcttcggtgtcgatgccagattagccgagttgaaccagtgcaattgatttcgagggttgaaacaactgaaaaatgctgtctccgccttcatccatgggtcgtaagcagggacggccttgccttcaggggggaaggcatattcagtatttctcacacaaaactgcttgtcgtgtccgagatatccacagttataacataacttcggaagtttgtagtaacggaattgaatccattctttcctccctctatagatatcaagatagaacccaggaatgagcctgtgtcgagtatctagttcaacctggaattttaaaaaaccccgcttgacaatagtcttcttgtcagccatatcgtatcccttgtaggctcccgccgtagctgcgatagtcggagtgttaaccgcattgagataaggagtggggagacccaatgcttgcacccagaatactgctttgaaggtgtcgatatcgctccaatggccctcctcaggccattcatgaataatgagaagtttgccatttatcagccatggcctgttctcaagaacataaacacagtcttcttccaggtcgaaaaaaattccccatacacctggtttaagggttttaaatcgccagttaccttttagtttgcccttagtcttccaaatttgagttaagatctccttgagtctggttctagagacccttttcccttcaaaaaaattagccaccacacctgttctgataacttcatcattcagttctatgtctggttcaagctccagagtcatagattcaaaaaattcctttcgcaggttctccacttcatcaatcccttgctccctagagggaggattggcattaatactagagccattaatattatctttagtgttgtgcagatcgacatcatttactctgtttccatctacctggtttgacaaaaaggtaaaagattccccctgccccatttggtcattaatgtcccccattaagaaaacaataaaggattccaaccaccacttgctttgactttcgaaactcaaaaacataaaaaaccaggagacaaaaagaactaaagagaggaccaaagagtagaatattccaactgttgaaaaggttgaagcactcttacgcacaccagatggtatagccaccaaaacaaaaagagtcgttaggttggagttccaacactctcatcctaagagaaaagcgtaaattagcatctagaacacaaacattaacgcctttcttcca

SEQ ID NO: 2726 - DNA, 2150 bp, Cannabis sativa
ttggaatgtgttaataatgatataccatcttttctgatgctattgtcctacaatacagaatattaggacaatctcacaataatggtgctgctgagagatgaaacatgttgggagatatgtaccaagatttttagaaactgattaattagagcttaagaaagatgtaagataataaacataagtttttttgcgtggttcaggcgttaattatccttgtccacgagtccattttatttgttttatcgacaagtaatgaatataacaagtatttacattatgtacttgaattctgtattcctctcgttcctcttgaagaagaagaagctctttaggaatttccagcagagttttaataagttaaaaatagttttttagactcccaagaggcatcctctatctcgtgaaatgtaggggtatttataggcaatctcttcattcacgtgctttgtgggttagtcttgctagaagagatccgatcattgatctagtaggtggctgctccatcatatggtgtgccaagatgacaacacgtaccatttggatattccttatgtgtcactcaaagacctttcctttttggactgccccgacaaatggctacttgaccatgggtaggtacaatggtgcgcgtaccttgtactatggcctgacgtgagggacaaaacctggcatcgtactagaaaaagcatggtcatcacttctatagtctgataggtacaaacaaagctttcccacaacatcatatagggatacaactcattctaagtccttcaacaacccacataagcatacttaaggaggccctcaacctccacagggcactccgcttctactcctgggaatacgagatgccatgctctctaatgctccacatgtccccgtcttgcgatgaaggtatccttcctggaagcccctcgtaggagctagggccaaaggcattaatcagcttgatgattatctcagcttcctcggttaggttccacgtgtcaagcttacaaaaataaggataacatttagcccctatgcttctgaaatgacccacagcttgggagcttgcagtgtttcctcgatttgctgtgattagtttatgacacgttgtgtagctttagattttattgtgtcatgcaaattgtcgttaactggtacatcactaatagaggatatcatctacatcataaactaacaatgctttaaatgctaactcttataattggagcgtgtgttaggcgcgtgtcttgggagacattaaaatggaggtgaatttattgaatagacccttcatttaataaacactcttcacgagacattccataatgaatgctaaatgtttgggctagtacagattttttgactccccatccgtctgatcttcaaatgtccttttggtgtataatctagggagtttgctttgtgtggaaggcgctccaccttgtacataatcaatactcacatcaatctcatcgatttctaagtttcaaactttctactcttcacaccagagttttgcaccttgtttcatcctacttttcactttgcaaagctcaatcaactgaagcatcctccatcgtgcatgcaaccaaacacggtacatttgagccatcccacataacactcttgcccatcattcaataagtgttttttgttacttgcattcaacttcacacttgacgcaaaaatattgaggcagaaatggtgtatattgtatacaagtctctattatctaaaaatgtcattcttgttagtatggtttgtttgtaaaaatagaaacttggtatcttgatctatgctgacccacttaaccccacactaactgctcgttcatgtgcttttggattcttcatgctaggcccaaaaaaggacattggttcttctaatgcaggtggcaaagacagtcctcgtgggaagaggaaaatgtaggacactaccttccttgctacatcttcgtctgcaccatattactgtggggacaacgcctaacatcatggtgaaccatctctgcaagcccaaccccattcgtgccatccatcttttctcttatagatttcctctgctggattcacattccccctaaaaacctgtacttcttgactccgccactatgcagatggagggtgagattaaaagagctcttgaggatgaaaagggatttt

SEQ ID NO: 2727 - DNA, 1257 bp, Cannabis sativa
  modified_base (508)..(519): a, c, t, g, unknown or other
  modified_base (577)..(592): a, c, t, g, unknown or other
gaaattttgattatttatgtatacattaggggcaaattaatttaaaattttcaaaataaattcactttatattaaattcaaaaatacttctctcattttctaaactcccacttctctctacctctgttcactctctctcagtctcttcgttcaaactcctaacccacgaccgacgaccacccacgtcgatccactgctgcaacaacgctcacaaccacccacgacgatccaccgccccaacaacgctgacaaccacgaccaccaacgaccatcccaatgtctaaggtaagttttcgaaccctcccttttttatttttttttgtattttttagtgatagagtttataggtttattggtttattgatttagggtagaaatttataggtttattaaatgtgacttttagtcacaagaaaaaattatttgtgactaaaacatatcatttagacacaagttatcactaatttagttttagtctcaataagtgttgtgactaaaaatatatttnnnnnnnnnnnnttgtaatttttgtgactaatatatttagccacggatcttttagtcacaacataggaannnnnnnnnnnnnnnngtcacaattttttttacttttagttacaaattttattgtgactaaaagtaaaattatttgtagtgatcaaaacaacattctaaaataaatagtcataaataattactccacataaccttaatattctagttgtctataaatcttgtcctactaaatctaagatatgaaaccacatctaagtgatgccaataaccacaattttgaattctactgttaccgagcataaacatgaaaatattataattcatacataacatgcattacacacctagaatttaattacatctccatatttaaaaaattatttctctaatgcctaaatctaaaaaatatctcttattttctactaatgcacatatagtcataaaataataattaaattataataagctagtaattatctgatgatatgtctaaatatatgatcattacactgagatactacagtcatcaaattcccttgaacctgtggttgtgacacaacaactgaatcaactaactttccagaaccttcagagaatagttcttgtttctcttgtgctaaattagctaatgttggttcatcattcccctgatcactcctttcataggcagttgtgctatcccaaaactaatcttagactttctagactcaataacaaccttcccttgtttctctattgcat

SEQ ID NO: 2728 - DNA, 1098 bp, Cannabis sativa
aaggcctttcttatccaagttgaccagcctagtacatgagaacaaacagtgaagaaatccacctctcctcgagtgggtcttggtgcacagaaagacactttttcaaattcccttgaagaataatggcagccagctttctccctacgcagtcatgggctgcttagcctcattctattccccatatccatcaaaaggcatatcgaaaggaatggtaggggtagcagcctcctcattagcttgatttgggtggccctcaccctggtcctcaatctcttacactttgacatcaccaacatgcatatctctttctcgtcggacccctcgacgtacggggcatgaactaacgacattagctgggcaagataggggtcttcagatgaattttcctataaattttcttagtctacgccactttcttctccttcgatggattcctggatgaaggaaaatgagcaacgttaatgactaaataagcctccatagcaggctaccttgaaggttttgaatcaccctcaataaaagaatctagaaaacatgctcgcaacctgtacgtccaaaaagtaggaaaatattgttaaagtcctcgattcgattcccaaatgaatcatccataaacttaaccactgatacgatataggtattagtgatgttgcacagaaggtttggatggcttagatttctgcttgtcacttcccactcatcgaagttgggcgtcaaaccctcactaaatgacaacgaggatgcatggagtatgggctagtcctcgtgaagtatttgtaacaattcttcatctacttggtttttacctctacagaaattatttgggttaatctacaaaagagggaaagggaggtgaaaactaggcagggcaacaagattgaaaacatctctaatactcagacttgaatagttaaaagatcaaagtgaagaaattttgtcccgatgacgagaattctaatttaaaggtgctcaagaatgcgagactaacacagaattcacaagaagcaccgcgcaaaacatatttaaaggaatttctttagaaaaataagggaattcatgggaatttagcaattatagtatgtgcacatatattcagta

SEQ ID NO: 2729 - DNA, 840 bp, Cannabis sativa
tctaagctagaaaattttctatgcttttattgaaagagtagaagaaagaaaagggcttatcaatttaagtagatgtgaacttgtagtactatttctattacacattattactcattaatgtaatgtgtgtacatataaaaataaaatgaaataaataatagtcataaataggaagggtacatagccaaatgaataggggcatgagcccacatgggtaaatgaagaggagtaaggccccatcttcatcttcatcatcatcatccatcagatttgatcatttgagatattttgttaacaaagtttgtcccatttagtatcaagtaggtgggaggatttataccaccttctccttctctcacttcaatgtactatactatactctctatctgaaattcacaaatatcttattttatcaaccttgagatgttagcattaaaataccaccctagtagagtcaagaaaaattttccacctaccagtaagattttattttattttttaaagataaaataaataaaagaggtctcattaaattattataatttgaattatgttttataaatataatcaatttgtttggcataggtggagtggaggtccaactcgaatcttttatctccagtattgatcaaaatatagaaaggaagtttggttaatttacaaatacatttataccctttttaattgttattttgaaatgagtaaatgatttagtttaggggtaatttttacactttaaaatactttatttatttatttatttattttttttacggaactttgtacatgtgaaacactatactattttaatatacatgtataaatgagaaacactttact

SEQ ID NO: 2730 - DNA, 1382 bp, Cannabis sativa
aaaaaaaaaaaaaaacttgttaaaaaaaatagaatccgtgaaaaaaaaaattcataaaaatgtaaaaaaatctaattttgagtggattgtgtaaattttccttaaaaaaatatcctaaaatattgaaattacaaaataatactattcttctcttggattccaaatttaacattgtcatttttttattcctctcccaaagcacttactctctctctctctctctcaacctcacttccaaaaattttccacaccaccacatacatacaactttaacacccttacaaaccacatctaagttttgactgagccacatcgaggagtcgcatcattgcaccacccacgcattgcagcttgtcgcaccactagcggtaccctgagcgctaaatccacaagtagtgattcacctcgccagtagtaacaaaatatatgaaaaaagttagaaaaataaaattataactatcgaaccaaccctatttccataaaaacactacttgtcaaacgtctatcgagagttatcgagccccatcgtgccaactataatgccatagaaacactacttgtcgagactccatatcgagacttgttgagctcatttagccaaccctaaacatcaaccccttttgagactcattgagcctagttgagcaagccccaaagccgtaaaaggattacccgtagagcttccatcaagacttatcgagtgaaacgacccaaaactacatgaccaaaaatactatttcataaaatggttctaaaaattcatataagtttttatttttagaaagaagtatgtgcatacttaaaatgtgttacaacatcgatctttaacaaaacataaaccattgctcaaattacaacatctttaacaaaacataaaccattgcccaacttccacagttgggcacatgcacacttctcaagacaactaaaacaacataaaacaacttgtccttacacttacctacaacataaaacaacttggcgcaagcaaaaatgcatagtaagaacaactttaaaataatacaacaaagaggcaagataatgacttggtcattgtcttgcatatcaaatatgttaccagaattaaggttttaagaatgaaccaaaatattgaagaatattgtaatgttcttatagcacgagccctaaatgtatatcgcgtacccaaagtagcaacaaatatcatatcatagaaactcgcatcaaatataacaataactattccattcaagataagaagcaaacatggaatcttggaacatctatttctaaaataagagacctcaatctcaacacatgtaattaatcattaataaacatgtaagtgcaataagctgttcttgtaactctaccaaatgagtattttccctcaaaaaaaaaaa

SEQ ID NO: 2731 - DNA, 2551 bp, Cannabis sativa
tcccttgccatgggagatcagttgagaacagagtagagagaagaaataatcgagaagaagaagaagaagcgaaagaacaagaacaaagagctcacgattcgtgtggctctgataccataatagaaatggaacattatacctggaaaatgaatgaattctcattaactccattgacgagcattacagtgcttatatacacgagaaaaccaaaggaaacaactagagcagagaaggttgttacaaactaacttctaacaaaatttgacagctcactaactaactctaactaacatacacaacaccttaacagtctttaatataaagtggctacgggtgcgccatcaatctcttatatgctctttgcggatgacaattattgtaaagctagtgatagaacaactagtaatgtgattaatttgcttggtatttttgaagatgcttctggccaacaagtgaattttgacaaatcctcaattttttttctatgctaatactagcagtgcttctcagcgtgatatttgtgatcatatgggaattgaagaagctagtggaaattttcattatttagggcagcctaacactatgggatgcaataagacatccatgcttagttttctcaaacaaaggattcgtaaagggattcaaaattgggatggtcaattattgtctagagcgggtaaagaaattctcattaagattgttatgcaatcactttctacatatgcaatgagtgtttttgctgcctttaaacctttgtaaggatgtaaaaagaatgatgagtagattttggtggggttcttagttttgtaagtgtaagacatatcacatatcttagatgtcgtgggatcgtatgtcaaagaataaggtagcaggttgaatggggtttaggcatttgacggaatataatcttgctaagttaggcaagaagggttggtgaatattaattgttcctaaggcattacccaagctttgtttagagaagtattttagaagcccaatctctagtgaaagctcaatgttatgtgttggttcaggtacttttattaatgttttgaattaaccttggcttcctgatcctacaaacccatttgtgatctctcaacaccgtgatttaattgatgtttatgtgaatcagttgatgcttatggaagaacgagtttgggataaaaatataattaaggattttgagtatccatttgagtgtgaaagatgttgctaatagatggagttgttttcatgagatatcagggaggtattcggtaaaatctgcttataaattatagatggatttgtcttgggacaaattgattcgaactctcacttttggaggaagctttggaatttaaaaattccccctatggtgtgcttcggtgtcttgtttactaacaaatgtaatgttgttaactaagaaaatgggggtagaccctttgtgtttctttcaatgtaatcggtgttctctgttagagtctctggaaggcaagaaatgaattggtatgggaaaatcactctcctattgctaaaaatattgttgcatctactgttattttcttagatcaattaaatagtgctcagtatgaatttttttgtctactcatagactgaatggtgatgtagccaatgtggagcactggttcaaaccaatgtcaaattcttataaaattactgtagatgctgctatatttaacagttaaggaaagtttgtgttttctttggtggtcaaagattctgcaggttcgttggcagaggctcgagttaacagtaatatagatcatgttcgttctgaaatggttgaggctttaggagcactaagttggctaaaggatcacgcagagatcaatgcactagaggattgttatattcttccatttgttttgttaaacggtttactaacactattacttattggtttgcagtagtatcgtgttctattcctagttgtgttattagagcggacaatatttcatctgttgtgttgcctttgttggctaaagattactttttttaattaagtttaatctttctttcaaaagaaaaatattaatactaattttaatttatattaataaaggaatcttggactattagtataataagataagggttattcatttatattaagttggccttttacatttaaaaaaatttagacttttttgcgtggggagcaagtgcaagtgcaactacacataatacacaagttggctacataagtatcaaatgatagatcgcttaaaatgcatagaatcatttgattaatatctataaattggtgattctcaagctgctcagctcagcccagtccagaatcactttctatctcaggtagagttttttcttgttatggtttgatctccttgattctaacagacatatatatatataaatatatatatcattctttaatctacatttatactttaccatctggttttatctttttagtttggtttacaatattttgtaatgcatcaaactcaggacatgaaaagcaaaagcttgttgggcaaaatgggaattaaattgggaaaaacctctgtaagtgaagaagaca

SEQ ID NO: 2732 - DNA, 1726 bp, Cannabis sativa
tattattattacgcgcaaaaagtgagaatatttcttaaggggcaattttcgtaattttaatcatcctttacctttctaaccagggacaccttcttttcccgctatctccgcgtttcgtctactcgtgtatcctaaaattaatttcttctaacgtaaaaaaacctttcatttcgaaaacaaccttcagaatcgtacacgattcaactcggccacgaccgactcggtttggtttattcttcatcatctgattttgaaatctcagggttaaatctagggcttgggggaagattttgatctgtctttcctagcagccatgaatcgtagggttcaggatgattgggagagactggttcgagcaaccttgaagagggagcagctcagagctgctggccaaggacacgagagagctcccagtgggattgctggttcagttccggcctcgctagtgaaaactaccaacattgatgcgatcttacaagctgccgatgagattcaatcggaggatcccaccgttgctagaattagtaagttttcatttttttttaaatatgtagaatttaggtttcgtgttttaaatttacgattacagttactggattttagtacgtaatctctacattgtttgaattcgttgtggtattgtagaaatttagcttacggagcttgtagttagctaattgagcttgaaaattagcgttccaattcaattgtcataaatttcttcttgttttttcatgtttttgtagaagagcttaacgaaaagtgtgttgattttttttttcttttttgttttttatagttctgtgaaaatttggcaagtggtgtagggcactagaattacttgttttgcttgattgaaagagggcactagaattacttgtttttcttgattgaaagagcttgcttgataactttcttcgaattttctttagaggaaaaaaaagtatgatatgaatggtgaagattcagaatttggtttgagaaaatttcaattcatttctaaaaacataatgcaaaccaataagtaaaatgttaccaagaaagcccttagctgtctaatttgttttttttttaatatcttcatttttcttataaaaattacagtccacttcaccagttgctcggcagattaacttttttcatttttgtgctttccaaccatttagttgttgtttgttatgtcacattggcatggtttaactaataatggcttttacttgtaccaatgtttaattttttttttagcaaagacagatagtcatgtagacatgtcacatgtgtgtatttttattttgttcccatattcacagaagttgtatgtttaaattttagtgtgtgagcaggcatacagtatggcacatagtttggatccagacagtgatggtagaggtgttcttcagtttaagactggtttaatgtctgtaatcaaggtatattttaagcttgagttgtttacattgattggtgaatggagagcaatattagttatatttcaactgttcaataaatgtggagcttactttggatgcagcaaaaacttgcaaaaagggatggagccccaatagaccgtaatcgtgatattgagcacctctggaatttttaccaacgctataagaaacgacatagagtggacgatatacggaaagaagaacagagaatgcgggagtctggaacttttagtactgattttggaaagtaggttcatttctttaatataagtttatta

SEQ ID NO: 2733 - DNA, 2381 bp, Cannabis sativa
tgactctattgacaatgatgccctgactgagaattatagcaagctcaatgttgctcttagcgtaatgcacgagtgttttgagcctgtcaaggaacctcttactcgaagagatctagttgaagatattttatttaatagagggtaaggaacatttttattcaaattttgttatttttcgacttttatgcttgttagcatattctaattctaaattgttgtagctgcattttggcttgatgcatgatattatgaaatttatggacttaattcctttttcttgttttatttgagggaacaacaggtcagatcttaaacgtctaaattttgaaggtttctatacagtactcttacttagaaatgatgagttgattaccgtggctacagtaaggtgagattggcaattcttttctttatgtcctgttctgtttgttttcttttacttgtcaaaaattggtctgttcttagttgaattgtgtactaaagtacttatcccccttcctctttgtaagggtttatgggcggaaggttgcagaagttccccttgttggtacaagatttcaatatcgccgactaggaatgtgtcgcataatgatgaatgagcttgaaaaggtaaaaatgagccttcatttgtgttcatgattttttttattgagaataggaggtaagggttggggtgaagatttttttataatatgactgcaacaatagcatcttagactagtcactgcaaaaactgtgtttatcaggcttttcagtttaatattattgctaactgatagtcacattttatatagtagagtaagagttagagacatgaaggattattagcactcatcaaatttctaattactgttgacaattttcttctttcagaaactcatggaattaggagtggagagactggttttacctgctgttcctagtgtgcttaacacatggactacttctttcgggttcttaaagatgacagcttctgagaggttaaagtttctagattatacttttcttgatttccagggtactgtcatgtgccagaaaccactgagtatcccttcggctggattaatcacacgcgaaggtaaacttacttctttcaagttctttgtatgaagaaaaaaggtttagagagaaaggtaatgcatagtttttacaaacaggcatacttattcttgtatgcaactatactatgcacgagcacaatccaattctcatgatagtatcattgaagtcgacattaagattggttgtgatagattaagtgttgtctctgaagtatatcaagtagaacaaatcaaagacaatcatcaaatcatggatgaagaacaattagagtacgtcctcacctccctatattttggaaaacggaatatgaaaacaaatttttttcactaaaatcatttcttgaagtgagaacttgtggtagaagtagcttagtctgtgaaagaatagactcaaagcttcttttctgctggctgtacttatttggaataattggtgggataataataattttaagagaaaaatcatgtcaataaaatgtgcttgaactggagtaaataaaattgttagatcttagccaaaatgtagaaaactaatgtgtttatcagggaggagaaaaaagtggaatcaatggctcgccttatgttatgaagtgattatatgcaatagtttcaaagaataagaaattttattcctagatgctatattagtccaaaacttaagatactcgaaaagatagttgagccattgtttaaggaattggaatattagggatattaggattcgagcttaagagtgagggggaggacatagtgaccaaccactctgttgtttagtttaataaatggctcaaactttccttagtgagtatggttctttctccttgatggagggagattcctatattttattggctgaatgaataagaaaaatttcacatttttcattcttctttttttcccttacacatgatatcaatgctattgttctacaggaactagcaacaagccatgatcaagaagaagacttttcagcgctgggcaatgcttgaagcacgatcagatgaaataacaacaacaatttatctggaatggggtcactgtggaaaattggcaattgatggatgaggcaagcttgaattgttgaatggcgagtcacaaaaaccactagaaggggagtctcctcttaactcttcaccattcttgacctttcaaactgaagaatccgagaaggaagtagaaaatttagctccaatggtggtcaaggctagaaatcttcaaaagaccaggaaccccgttctgattaggggtgtcagaaagtactgtagatccaaaatgtaccacaagagaagggtctttgagccattaatgccaaaaatggtg

SEQ ID NO: 2734 - DNA, 1567 bp, Cannabis sativa
aatatgatacctcttatagttttggacaccttaacgtaccctttaacattttttctttggttttctcatttgggtttttgttaagtgaaatgctaaaaggtaccagtggtgcataacaccacttagaggttgttggtgtattgttataggtgtaattaagtgtcgggtttcacataatttaagtgttggtgcctaataagaatgctcttttatctatgtgaatgtgtttgtgtcatggactaatttgattgttgtttggagatcaggtgctactttgtgtaaaggtctaaatagaggatttgggactttcatagctggatcattggcatttttgatagagttcattgcaaatgaatccggtcgagtttttcgagctgtttttattggaacttctgtttttctaattggtaagtttgaaaaattgaattttgtaataaacaatgctcatattgagcttcttttgggagccacaaaagaaaagaaaatgtagcttaaaacttaaacttttttttttggcaggagctatcactacatacatgagattctttcccaacataaagaagaactttgactatggagttatgatatttctattgacatttaatttgatagccgtttcaagttaccgagttgataatgtgttgaagattgctcatgaaagattctacaccattgcaataggctgtggtatctgtcttgtaatgactctacttatatttccacattggtcaggggaaaatctccacaattccaccatatctaagattgaaggcctagccaaatccattgatggtatacataacaaacttgttaaaaatttgtcaaaatcttaccattactttcccctaaaacactattattgttacatgttattttgcagcatgtgtcaatgagtactttgatcaaatagaagaaacttatgatgaatcaaataaggatcctatatatgaaggtttcaaggctgttttagactcaaaatctaatgatgagaccatggtaagtaaccagttaccatattgttttcttagctagtaattgactattttcagtctcttttcttattttgaaacccgaaaatcgagcaggctttgcacgcgagttgggaaccgaggcactcgaggcattgctacaaatgtccggggcagcagtatgtgaaactaggagctgctcttcgccagttcgggtacactgttgctgcactacatggatgtttaagaactcaaattcaggtaaccaaatagacaaacttgcaataagtcttgtactagaataaggtgcctaagttttgttgtagatgcttaaaacaagtaaatcatctttacatataacaaagaaaatattaccaaatgatttctctgtccaaaccaaattaacaagtttccacatacattctcattcatgatttactaattatgacaattcattaggattcttgtttggtacctatgtctatgggatattcagatgaataaggccatccgtaccttctcacacagaccataataattagagaataatttgctttgtttaaacttttaagaccttgttgtctttttttttttttttt

SEQ ID NO: 2735 - DNA, 2337 bp, Cannabis sativa
aatgccgcaagctttgattctttcggcaagagaaatatgatgattattgttccagcattcttctaccaacttggagcaaaggggctcacggctccaacagttttcataccgaaaatggtatgttttcttaggcagccacagaggttttggttcaaggaagataggggtgtggtcagatgaagagaagtctccattggtaagagtagcttggggaaaagattgaagccaaagatgggaaacaagagctttatcaagccgaatctccacactagaagaagttccgatgactcaaattttcattaataataaataaagtgttagaataaaaaattaatatttataattaataaatatataaacactttttacatgattttatagttaaaatttatatactccacaagtcattattatttttttgactatttcttgaaaatatacttagaatacaaaggaataactatgaaactttatttaatctcacatggtctcttcttctcaaaaaaaaaaaaattgatccccttccccttaggttctgtccctatttataggggctctagaaataaccgttattctcatttgatcttatctaagtattcgttcataaaacatggacaatccataaatttcatacttacaatatgtggataaaatgaaataattgccgataattgctttttattcttatccaaaagtaatttacctttatcaagatgacacactccagctatggctggtattattcgacgatatttagggatagttggtcctattttgcgagacactagttaagatatttgtcctcactatagcctttcacggtaactcttggactaatcttttgagattatgagattatttacaccttaacttttcaacatacttacgagtatgtaggtcaatgagttgcatgctctataactgtgtttgttcatttgccttttgtttttttatttattttttttataaaaatttaaacttacgacataaagctataatttatttggaattaattttataatttggagtattttatttttactaaaattttttttaagcaaaattctacaatgatcataaatttgacgaggagtactaattgattagaaatcaatccactcagtgcaataaagcataagaagaagcataacaagactaaaggaagatccaacaactgatgatcttccaacatcagaaacatcaagcacagaaaacacttccatggcgttgagaatagccggtggtggcagcgacgtagacgtcgttgccccaaccgaagcaatgctcaaagaagccacaccaccattcactttaattggaaatatggacacaacttcacctctcagaaatcctgggagctgagttgtgttcattattttaccatcgatagaaatggaaactcttctaggttcttccaacggcttgtaagccgctgttacatcgaaatacaatatgaaataggctaatacttgagatttttggcgaaaattgattggtaagacgattgattgagaggcattgtgtgcttcgattaaggaattaattacaacatctggtggattgttctcctctaccgaatatgttattggtatatttggtccaaattgagagcttaggtatcttggatcttcttgtggtttccatattctgttgtacttctcaaccaatgacacaaaacgatctctgtaaatttaagtacatattcctcaatgtgttagattgattaagtatatatgtaataaatgaaaatatgtatatatatatacttacgggacactttgatcgacaccatagttgatcctagattcaaggtacaatgccatgttcttattcatcaacctatatacctcttgctcatgaatgatggtagcttcaagtgttgaaatgaaaggaacctcatcttcttgtgtttcaactaaacacacatcaaactcactactttctgttgtgaaaataataaattcatggtaaattggatccaaatcaagagaggttgtaaccttaacatttacacttcctgaccttagctgaagattgaatgttggtggctttttaaggttgtcatagtttccatagtaaaatccagctcgaacaaggtacttggattgggattttagtggcaaattgtaacaatatttattactattgctgttgttgttggaattacctaattttgggaaacttctaagtgtagacatctcaaaaaggttagtgggtgttgagagaagcttattttcacctgtttttatgtatttgtcatcagttacccattgagtaaaagtgagagcatccacagaaggtgtccttgctccacaatctatgcttagccaagtttca

SEQ ID NO: 2736 - DNA, 2002 bp, Cannabis sativa
cgaaatgggatgatggtttaatcccaggagtaaaggttttaaaacagtctataacaaccgttttacaatcctttagctacaagttttgctttgctttgagtttaattactcttaaacataatgtacttacaagtatttgtagtggaaatattagatttagaaggaaaacatgactcattaaacgtgacactacttgttgtaccgacacttacactctactcagggccaactcaaaagcagggctgtctcaaatgttttggaggccatgttctaaatttaaaaagtaggcccttaacaaaaaaaaaaaattataatttgtagataacatttttaaatattatcatattacgaaaatatattttacataactaagcactcaaaaacttaaacaatttttttaaaattattgttatttctaatacaacttcaagctaatatcaaatattgtggaaaaaaaaaattgaaacacattaaataaggaaaagaaattaaggaaaaacttttttttttttatttgaaataaccaattagtggaaaattgagttaaaaaaatcttaaaatgtcatattgggcctttttaatatgtgggccctgtgcattagcactccttgcacgggttaatggccggccctgctcaaaagtggggcagcagggacatatattttaattttctaaaaaaaatatctaatttattttttaacatactatatttgatattttattaaaaaaatatttaattatattttaaaaatactatattttaaagttttatcactatttatacaaaacataaattttttcttataatggaacaaaatgaacattatacaaataatggaacaaaatgaacatattcatactatcatatctctaactaggaaaataataaatttaggcaaaattaactctgtttcatttaagtactaataatttttattacaatctaaattgcttcaaatgagttttaagattgtaatgagatttgacactaattatgactaacaatattcggtaacgacatgtcattaatgaaaaacgacatgtcttaagttcgtattttcgaaaagacgacatgtatctatcaataatagaaagaaacatttaattaattctaaacaagttttcgaacttggcagatatggtttcgaactcatcatccttctttaattctgttgatgaatttggtagtgattcttgccctacttcaacatcttcgaaagaattacaataaagatttaattctgactcgagagttggttcttcttgtactaatttttgtcgttttgtgttcgattctttatcctcatttgtaaatgtcttcatttctcttgatttcgttttacaaatcttgcataacatccaattgtattgctgcacaaaaaaaaaaaaacattatattagttattacatgaatttaagatactaaacattaaagtgaatatcgaaatttgataacacgttagatacctgtatattattagattcaagtaaatgatactcgatcatattccattgagttagtttttcatctggctccacaaattctaaactccttttaaaaccaatctcgatgttttgttgattcatgattggctttttcggatctccaagccaagttccatttttaccttctcgattcgatctcttattattttgtgacaagaaagatgaatctttttcgtagtaaaaataccactcattttcattcatcggtaagtatcgatctatatcgaattgataacataaaataaaactaatattactaatatacaattaaagaaaattaagttatattaaagaaagtaataattttgtataaaaattgttaccagtaagttgttgaggatgaaaatcatacaaattcatcacatctgaaatgagattgggttgaagatgatgactgttgaaatttttgtttgaaacataaaattcaataatttcttgatcattgggatgaaatttaatccctggaggaccaaaattattgaagtccattattatt

SEQ ID NO: 2737 - DNA, 785 bp, Cannabis sativa
cttgttagtaaatctagatcctgctaatatattccaacagtccatacacacaggataggagccacggatgtgacggaggatctgaaaagacaagactagagatgtgattacgagagatcttcaagcattgaaactcaaaaccagctttccaagccaaaataatgtcctcccataatgccctcccacagtccccaaagcaggaacaaaaatgtgaaaataaaaatgtaactagttaagaatacgtaccaatggagtagcatcaactttaagttttgttaaaaaaaataaataaggagagtgcgaccgaactagggacttaagtttcatgactgtagaagtctgccccaaccatctatagttccaagggtaccagagtgaacagacacacaagagctaatatcctccacaattctcaagccttgcatcaggttagccagatgagaaaaatatctggattgacctcaaccttttcacgaaccaaaggaaaaatgttacaatgacctccaacctaaccattgctaacattgtctcaagggaagtcacgcacaagacgagaatgtttacaaagaaattttgatggtcgagacaaatcagaagtggaaccatcagttgcttttcctttttttaattggagtagttcttgcattcactttaaaggtagtcttaactccaatatctcctcccatttccggaactgcatggaggtccatctcaccaaaaaaaattaattcttgcaaaatagtcacttgagccttaaaaaaattagaaatggctctattttcatt

SEQ ID NO: 2738 - DNA, 2370 bp, Cannabis sativa
cccttggacgaaactcgttaccttaacgatattctccaagttatctccaccgataaactctacgccgccgcttgtgctcaggccattgccaaaagagttggtaggaccaaaaactggatcgtcgctctcaaatctctcatgcttgttcttagaatcttccaacacggcgatccatatttccccaaggaagtttctcacgccatgaaaaatggcgccaagatcctcaacctttctaatttccgtgatgattcgaattccagcccctgggattacactgctttcgtacggacgttcgctctttaccttgacgagaggttggcttgctttctctccgggaagcttcatctccgccggaaactctccgatggaagcagccgtggaggtcggcatccgaaggttgagctcatccgggatatgtccccagcgactctgatcgaccgcatttcgaactggcagagattactggaccgggtgatcgccactaaaccgaccggcgatgccaagacgaaccgcttggttcagagctcgcttcatgcaattgttcaagagagctttgatatttacagaaatatgtctgatggattagctcttcttctcgatagtttcttccatttgcagtaccaatcctgcgtcaacgctttccaagcttctgtaagggcttcgaagcaattcgaggagctctctgaattttatggcctctgtaagagcatcggcgtcggaagaacctctgagtacccgagcgtacagaaaatctccggcgagttggttgagacattgcaagaatttctgaaagatcaagcttcatttaccggtagatcgcccccatctcaattgctcctagcgccaccgccaaccaacgagcatacttcaatctccacaactccagataggtcctcgcatggggaatcggaatctatatctattcgctcttcaattgatcgttatcaggaaccgatgagtgctacaaattcagatgaaacagaggaagattgtttcgacgctgaagataatcaggaatcaaacacagattcgaacgaattctccttcaatcacacaccttcactggagaatcaagatgaagaatcgggaatcgattcaagagaaaaagattgttgggagcttgtgctggtgaataccgcgaaagagtctgatcaaccgacaacgggttttgatattttattcgataaacgacaatacaatccgtttcttgttgaaacgacagacgtagtgcctgtcgttcctagtccccttagtaacgatattaaccgtaatcctgggaaaacgacattaacagctgcaacgtttggggaagaagagatttcgagttggattcctccaactttttgtgctgacaatccaaatgggggtctcagtttattttgcaacgatccatttgaatcaacaaatcctcagctcactactactgatttgagaaatgggtcagtgaatgagctaaatttcgtctttgaacaaaaattgtggttggagcagcagaagaagattatcgcaaagaatgagttgaataactcatgtgtgtaattatatgtacaggtttttgatgcgtttattttttatttacgctagtttgctctttttcataagaaattttgtgttattgtgatctgttcataattaaataaacgagattaatattattaatattttttaaacaaaaaaaaaaaaaaaaaaatacatgctgtgctaataacaaatttcttatttttattattattttttttcagtttggtttgtgtttattaatcatatttttgttataaatttcattaaataattgttctattgttagaacattttacaaaatgagagtgtcttttagtgtgtctaaaagaatgagtctcacatgagatatatatgaacctttatttataagggtatataaaatataattttagcattcaaattaagggtacctaattttgtgcgaatggctgaggacacacaattctatgatcaatgtttttcttcccgttactactttctatgcatttttgttattgtccgaccgtgtcgagcggtgtgacacactactataaaacaagcctttagaggcgtttatatttagcttagtaataaataaccaacgtcatagggttagaaatttattgacgaaaattgtacgcctcttatggcgtcgattacttggaaataaccaacggcattgggtgtgccctcgtcggttatttcaaaataaatgacgccaaaaggggtttattaccctacccaaccctttgtcttcctcattcgatcagccaacccaagaaacctcaaaccctctctgtcaaccaccacgaaaaatcacccctatttcaccatttttttttcactattttagctctttttttttttttt

SEQ ID NO: 2739 - DNA, 722 bp, Cannabis sativa
tgaaatcctaatctgaggagcatgtaacttattatttaagacaagctgttttgaatgcttaggccagaatcatcactcatatggatttgttgatcacctgcatagtcagtagagtaggaaaggttttgagcattatgggtgatatgatgagtagccctgagtctggacaccaactgttgtcttgaacaatatctaaagatgcatacagatgagacattcagcaagattggtactccctgtgaaaccttgaaaagtttctagaccagtatatgatttatcaaatctgtaaatgcacttgtggacgacagtgtgtataagtttgtgacatagctagcattaaggagagatttgaggattttatgggattgactcaatcaacatgaattgtttattttgtaattaaatgtataatattttctacatcttttttcctataaattatggatccaaatcattattcaggggacggaattctaaacttttgtaacagctactacactgccaatgaagtaaatgaagtaggggggcgtgggaaactccgtagctagaaaatgaagtaaattgggttaatcataataagagatgtatctatttaaaattagatatttgagcaagtaaaattagtcccacattgtaaaactagaaagaactaataacctttatttaagttaagcttggaaactataattgccgagcctagtagcgtgggcctgtgaccaagc

SEQ ID NO: 2740 - DNA, 558 bp, Cannabis sativa
cggcctcaactgctttgcctctttctcaagaattattctttgtgggagcaaaagaagcaacggggacaacttgcacaacctccccgactgaaggctcagtctcctttgttgtaatgatctttctcttcgaacaggtcgccatggcagcaaggaaattcgtgttgtctacagaaaggaaaagacaaatggttagtataacagaataaatatgaaaaacaagataacatgtcatggctacaacaaatggatcatcagcaacttgctgactctcccactttctccatcccactactagccgaataactttttcaagaaatacagatattctccctgaacagtctaggtcattccgaatggaattctccccctcaaaggaattcacatcttttgacttgctctagacagaataacaatttcactttatttgtcctcttcatcatcccagagaggcattgtccaagagtcatcagaaaagagagcatccaagtagactcactgacatgacattatcaagaaaaccttttggatattttcagtggtacgcaaagtcctctcata

SEQ ID NO: 2741 - DNA, 2178 bp, Cannabis sativa
taaatgggtctgcatcggggcggaagacattatcttcattcttgcttgtttaacattcggtgatagaaagttgtctctgtccgatcgtctccacttcattcgccatttaagtatgaaatctttgctccaacaggggtgggtacctacgggcccatatcaatatgggtgcgatttccctccctaacactcttcaaaatgataacaatactaatttttttataatttttgagagaatttgttttacaattttggctttggttaaacactgaaaatgcatgcatttagtagtaatggagtgattgcctatcttactacatagacaataaggacaaaaaagtaatttcaagtgtacaagttaattacggggttgtagaagaagaagaaagaagtagacaaatatcattagtacggcgccgttttagcgatttctactccaaaaggcatctctagattctctactactctgcctattttttgcttttgaatttaagtgaaaatgacaattcttcttatatatatatttattataatcacctaaatttcccatacgctataaaaacaatatcacatgcccaaaccagttttgtactcttgatttcataataataacattaattgcactatatttttttttaattatttttgggttaatttcttcattttcttttgtatttttcctgtctttctattttattttattttctcttctatatatattgaccttagtacttggtaacttctgatttaaatgtctcatatatatatatttatatacaaaagagttacacaccaatgataataatgatgagtagtagtagtagtaatgttattaattagtagccattattactatatggcacaataaaaatttaatttttaacagagaataagatccaaccaaacaaacagcataaattgctttaacacgtttatatattattatagacatatattatgtagagtaaaaataaaataaaaacataaaagaattaaaaaaataaataaataaaataaacatattttattattccaagtttggcttatgataaggacactactcttttatagtacattaattataccaacattaaggtttaaataattttgtccctaagtgtagtaattattattattaagaaacgtacaagctggagttaaaaagtaattaaataaaatcccaagttgataacagaggctaataattatcaacttgccgaaattcactgaccccccaaaaaaaaaacaactgtaaatggtaagattacaaaatgttgactaattatctattttttttaatctattttatttatgattgtatatattgtgtctatttaagattatttgtgaatttttaaaaatttctaattaatttgttgaaaataaaattcaaatatttatttaccataagaaaaataagtcacacatacaatacaatatataaattttatttaggatatttacggcgaaactcttttaatatttacaattgttacatatatgactcctaataaaaaaagtggttgtaagtaatttatgttatgattttgttacatttgtattatttcttggtcgttaagtgtcaattaagttcattaagtgccagctcaaaattacatgtgacaacttatttctttagcttatttaatgcatagtcaaataatatgtcgtaatgtgtttttaagttgacacttaatgaccaataaaagtacggctgtaaaaaaaatcgtaagataatgtacttttgccctcattttttttattagggtcatatgtgtaacaatggtaaattttaagggcgtttcgctgtaaatatctcaacttattttcggcattgtaaattacttattttttgaaaaattacagatagtcctaaataactaaaacgtatatgatcatgaaaaaaaaattaaattaaaaaactctcctgtaagttgaaacaggatagagatataccgaaacaaacttttaagagagcgcactatatacttacttgtgtacataaaattttgtaaaccgctaaattcgaataacccgtccaaactaaaccaagataatctgacaaaaaatataaatcgaaaaactcgaaaaaaatataactcgcctaatctttatattgagcgggttgaaaataatatcaattcgcttaattaactcgaactaatttgaccagcccgatta

SEQ ID NO: 2742 - DNA, 617 bp, Cannabis sativa
gcatccacataaaaattcaccactttgggcacgggttgggcagtccttgctgggtccagcaaaggttcatcaacagagaaccgatgtctctcaagcaacctattataatcattaatggcagccataaccttctcaataatagatgaaggagagggaacaataccttggtggaagagctggtttcttgcatgccaaatagagtagcaaagatgagccgcaaactgagggaagtcattgtcattcggagccaagaaggggcagcacaccgaggagaagatccagggaacaatctccgaatcggaaccgaagcaaagtaagtcactgcggagagcataggggctggcaaaccagcaagctctcgccaaggagcaatggaagaacaagtgcgagagagaatcattgttacctttgcaaaagacacatacggagctgttcccaaacacagaacgaaggcgatccccacatgggaggatgttctttttcatcttccaaaggaagagtttaattcgttcctgaaccggagaagcccaaatcttcttccactccatattcgaaaccccgagtcttggtttaatcaaggagagataggcttgtttaaccgaaaaggagccatccgg

SEQ ID NO: 2743 - DNA, 1081 bp, Cannabis sativa
caatggttccttacatggcttgaaactttctcgaagtggtcgatcagtttcacacttattctttgcagatgatagcctcatttttgccgtgccaacagtgattcagcaagagcaattcagcgctcaataactacttactgtcatgcttcgggagagcaattgaacacggacaaataagttttatctttctctcctaacacaatgcaagctactaagagtttctttcatcatttattgcatatgcctactcagccatgtcacaaaaagtatttaggcttaccttcatattcaggtcatgattaaagcatacttttttgtgagatcaaagataagttgtggaaacttctttcaacatggcaagaaaaattattttccattggtgggaaagaagtgcttctcaaagcagttgctcaggccatacccacatatgcaatgagttgttttaggctctccaaaaaattaattgatcaaattgagaaggtgatgaacaatttttggtggggtttaaatgcttctagatcaggaattcattggaaaacttggcatgctcattgttaatcgaaaggtgaaggtggaatggggttcaaaatctttgtgcattataatgaagcgctacttgcaaaacaagcgtggataatctttgacaatccttcttctcttctaggccaattattaaagcaccattatttcaagaacgactcttttttagatgttggaattggatcttattcatctctaacttggagggggttgtatggggcaaagaacttcttcaacaaggacttaggtggaaggtaggcaatggctagcaagtcaattgtgccattgatcagtggctacagaaccacacaattttcagcctttgcttttcaaagggaatgatctgaatatgaaagttagtaacttaattactaatgatagacaatagcatataccttctcttaaggaattatttttggatattgatgttgagaagatcattaatatttccctatctatttttccacatgatgatcaaatgatttggcaccatgagttgacttgaaaattctcagtcaaatcggggtatcaattggctgct

SEQ ID NO: 2744 - DNA, 1713 bp, Cannabis sativa
aaaaataacaaataagaatatatcaattgtgaaatcaaataataaaataataattaagttttcagataattctataatacaatcggttagaaataaatagaacagcgcttatttatataagaaaatattattaatctgacaaatgaaattaattatttctctagctagctatcatcactcaatatatacagctttgaccaaatgattcgtgagaggaagatcaaagagtactaggctcctataattgttttatatttttatatatataaatatgtataagatatggtataactatatccaaggaattcatgcacatgtttaaattggttttcttttaagtgatttatctctttgaagaaatatatatagcagaataaatatttgaattaatcctatattatatacatatatgcatgtatattatataccagagcaaaaccatatctaattcatgcatggaaaggaaaatagaatctaatgtttatatatatatatatatatatatattgatagcgcaactgcatcatgataatagggcatgttaattttatttaaaccacggaatgaatgactataatctatacacctctttaaccgccttatgtatatatattatatgtatggctattcactaatacatagacacacacacatatatattatattactgttctcatcttataacagcaacatgaccattgataatttaggctttgtttggtcattacgaataataacacatatatagagagacatacagacaaattaaacttgtaaaatgaaattgattgtgtgcaaatatgctaagtagtacgctaaatgaaactgagaatcattcataagaaaaagaaaaaggattagaggttccctagtatgcatttctacagtatacatatatttatatacatgctaacgaattaatagaaccctcaacacaaagaaaaaccaaataaaaacaccgatttagtttcttcttgaaaaataaaaagaaaaatgaaaaagaaagagagagagagaaaggaaaagaaataaaagacatttatcgttgcagctagcctagctagaatagatcaaagagttcctagatcaaattataggtaactattcattaaaaaaaagtatataataaaatctgtttctcctatgcatcaataaatattaatgctgaaagtgttatattttaccattttttttcataaattaataaacacatctttaaattaatatgttgtgtatatataagaatatatatatatactctctctcacatacatacatatacatacatacatactcattctcattttgatgataattgatcggcaatatccttcataaccttgacctgcgtagcaagacagttaataaaatgagcagtttcctcaaacaaactgcataaatccatggcttttccaccaggcacaagtcctcgaagcctatcagtttgactaaatacgtcgtcgttttggtaattgtaatcaacagcccttttcttcttcatcaacttctttttattatttatcttcttcagacttttggatctattcattttcatcaaaacgcgttgtcgtttggctctccttcgaagcttgaagataagagctcttgcccaagccctcctgggccccactgcatgcgccatcgaagaataggccgccacctttatcttctcgcttcgttcggccactgcagacgagatattattattattat

SEQ ID NO: 2745 - DNA, 1253 bp, Cannabis sativa
aatagcttggactgactagattaatgtttatggaaatagctcacacaacagaaacatttgactattctataatgctctttgttgttactttgtgggaattaacaattagtatatatttgaatggttcaagaaaacaaagctactaccctttagttattatttaatgaccattgagctatatatttagagttttagtactgtcttcctttcatgaaacatcaaccaaatgaggctgcagaagttgattattcatgagttactcttccctgtttggatcagtatcctcttcaacagcttagtagtaataaactcagctatatcagcgaacccgagtttcgaatcatgtaagcctagaaactgtggagatggtcccaacataagctaccctttttatgttgaaggtgccggagcagacttttgtggtctccaaggctttagaattacttgtcaagaaaataaaacaatctttatgacctctagaggcccttacctcgttaagagtatttcatatgaaaaccaatcagttcagttggttgatttggatgttgtcaatgcaagttgtgttgttcctaaacactacttcagttttgacaatgattctccattcgatttcagctcaagccatgccaatcttcacttcttctataggtgtaccaaatcattttctcctccttttgaaacaacctcggttccttgtgcatccaattcttctcatcactcatttgttgctttattccaagacaacaacttcgaaagaaatcgtgtgacttcaaactcggatcggtcttgtaagtctgaagttgctgtcccggttgatttggagggaaattggccattcaatcaaaccatacagactgtaaactacactgagttattgatgggtggatttagtcttgtgtggcatggttcttatggtgatacttgtgttaattgcaaaacaataggcggtcgatgtggatttcaaaataatcaaagtctgtgcttttgtgctcctgatggacctcaacactcatattgcagtgttggtgttattgttggtaagtcatattataaatcattaattacccttctttatcttcttaacttttttcttgtaatgaaaaattcatctttaacaaccattaaattccgttaccaaacatggtaacaactcagttagaagaaactctaaactgaaacgacgatcaggatacaaaatagtaattctagcaaaattgtgagctgaccgtttaacaaaaagtaataaaacattg

SEQ ID NO: 2746 - DNA, 1074 bp, Cannabis sativa
gtcttgaagaaaccacgtactaactcctggaaatctttcacattttcttccggtcttttgcctccattcttcttcttctttcgcttgtcgcatttcgtgaagattaatgtcatggggatctgaaaacaacatattttatagactcaaaaaatgaattgtccaaatagagtggaattatggtctcttaagctctttccctttaactctaagataataaatcgatatgacaaacatgtggaaatcaaactaagttccatggacattataattgaaatctgactattttgcatacaaaattatcccaactagtcaatagtaataaaacaactactagcatctaagtatgaaaacagctcctacattataaaaattaacatttggattagagaacgatatggatttctttttcctaatagttgaatcatcttacctgattctgtgccagccaactagcatactcaaggtcaatgcttttggcaggaatgctagcatcaatgagaaggaatactgaaactagtttcgacctatttaggaagtaatctttagtaaattttgcccaatctgttcgaagatccttcggtgcagaagcatatctgttccaaattacacaaattataatcctaagttaagtaaaagaccactggttttcgtatcaactacataaaagaaacagaattaatctctttctatacttcatttcaggagccaaaaccattaaatttctggtcattaaaaaccaaacaaattgcatataacccaaaacagaaaagcacccagaactttgtacccgaaaaaaattgtaacataacaaaccataggaaaaatctgttgtacaacacaccccgaaaggagtgttctggtacactctatttgtttcagcataaagtacattgtagttatataataaatttttagaaaactccacatagtttacatgtcggaaataaggtttaaatcttttgttgctacaacgaacatgaaagaaaaaatggcctaaaaaactctcatggatgccgaaccagaatagtgttataccgaaactttaggagggtgtactgagacaccccaaaccat

SEQ ID NO: 2747 - DNA, 1615 bp, Cannabis sativa
aacatctaggttcgccgcttccatagtagtgtcaaggttcaaatctagaaaactagaaattccccttgatgaattaccccgaacttttttagccaactcctttaactttgtctcggtcattccctcctttcctttgttcttgattctttttggggtcaccttccttctttttaaagggccttccaccttagtgtcattacccaatttatcttcataagttataggaacatctatcaaattaagattattcagagaagactctgtactttccttccccataagagaattcagtccaacctccatgtccattgctgtagcactttgatgagtagaactgtcctcacgccaaaagccccttctcttactattgacattcacagtctcactagtacattgcatctttgccttcatcccttccacatccttctcgaacagagaagtccgatctgtatcagtacaagccaatcccgaattgaaccctaacatattctttgaagtggaagagtgaattgaggaggctcccagaccttgaccttgaagcaagaccgcaggtagggggggatcttgaacaagagaaccagcaaaaaaggccttctttacagaggaatcaagagcagcattcggctgaagcttggcatcacgtttgtcatcaacctttaaccatggaccataactcggcttccagtttccaagaccatcatcaaacatcttgggcgactctgcacaaacccgagtatcatgccccaaaaaaccacaattaaagcacataaaagggagacgatcatacctgaaaggaagccatatctttctgccttccgaaggaaagaggaaacctggaaaatgtgatttcgttatatcgcaccaaactttgaatgtgaaataacccttggtcacgattctagggatgtcgacgggttggacttctattacttcaccagccatagttgctaatctaaccaagttgcctttcgtaatcgatcgagagggtaagtgaagaactcgcccagaaatcggaaaacgtagcaattctttttcccaatcacacggcaggttctccattctttcaagaatcagagttccatagttaaggagccaaggacatttgtttagaattcggttcaagtcttgagccgatttgaaagagaagaccaagaaactggatttgttattgttgaatttgatttccacaccccaattgttattagcaacgccccaaactcgacctagaattgtcttcagcagaggacggctcatcggtcgattagagcagaatctggccttcgcacattgttctccgactacagaacccccaacagtattgatttcccatccatcttcatccaagactgtaaggtttgaaactttggcaagaagatcgtccacggtatctataggttttttcagcatatcgaatagaaggctcttctcagaacgagagagagcatttggtgtaaatttattattaacttttttatggcattatttttgttatttcggtataatgcggcactaaaataattctttattttcattaacaaaagaaaaaacaagaaagaaataaagaaaagtccgctctcagtggatgaaaagttttttccagactcttcttcttctc

SEQ ID NO: 2748 - DNA, 1897 bp, Cannabis sativa
ggctccggccatctttctcatcccttcttcggtttcgcgttcaagtaagtctcgtgttgaagacttcaatctacagttttttggatatatgtttcaaagctctaaattatcatcaaaactttttctttttctaatacttcacaaacaatagttcatttagttcagatttagatatgatcacgacggagcttgtgttgtgatactggtttttctaatttgtgttacattacctcaactgggtatgttcttactgctcatgtatgcatatccaatttctttttttgttctgttctgttctttatgaaaggtcatgttatatcattggtttctttctgttttgaatccatttgaataatttggttaatgtagttagaaggaaaccaatagtacataaattgacttggaattcctggtttggggttgaaatgctaatattagctcttgacattgcattctcttttagttggttaaacatttaaaataattacctgtttgcttggtagctgatattgttacttgtttttctctaactggtgaggaggaaggattcaagctgtttttcttcaaataaaatgctttactgcactgattcgtggttatattttgatttatttgtatgttgatttatcattttgttttggttatgagatttgttgaccaatcggggttaatacataatattgatcaatttctccaacatttatctgacgctgaatgtattctttttaaatgcattcattttcctaactgttgatattctctgaagtatacttcgtgttcaatgatgtcttctgcgtgaatgttttcgcttataactacattgggtggttttataatacagtaaaggaaacgtttataaaggacaatgggttctattccgaaaagacctttattttgtctcaagctaccatgggatgtgaatcaaaattctaaaagtcctagtgactgcagttttgaggctccttggctatttagatctctgcaaaatgtgggttccatggcttttaagttcatcaactcaatttcaaaatcctcagatcccttgacaaataacttcaaaccctttcaatttaatgctggaactggaaccagccaaagtaggactttacagtcgaagctaaacttgaatcctgaagagcaaggagaggcagagcaaagagcatttgcatcagcactagcaagttgtaaagaagctacagtaatcgagttctactcccccaaatgcaggctgtgtaattcactggtgaattttgttatggaaattgaggctaggaattcagactggatgaacattgtgatggcagatgctgagaacgataaatggctccccgaggtaccccaataatatttttagtgatcttgttatcttaacattaaggaacaaaaagaggtttggtttttcttgtttttgcttctgtagctcattacttttctttttggcaatttagctcctccattatgacattagatatgtgccttgctttgtactgcttgacaagaaagggagggcactagcaaagaccggcattccgagcagtcggctacatgtaatagcaggtctctctcatctcctcaaaatgaaacctcctcaatgagctagtagcagtagtagttaggtttagtataatatctactgtacaactattctcatacatccatgtcatgttcaacatgtctgttagatcaccattcagttttctattcaattgatttgtataaaccagtgtgttcccatcagagcatggattatgttgatttgctattgcattttacgctttcagcatacaatttcttgagtgcatattattgctaacacaaaattcccaccaatcttttacacctatagatattcattccaccgttaatagccaagtggtttggtttattttcgtgtttt

SEQ ID NO: 2749 - DNA, 1229 bp, Cannabis sativa
tatatatatatatatatgaataccactaatttggtacttcatattttattaaactatactgcactaatttatatttttgataatgtttgttatggtttttgtgttttatgtaaatacacattcaattcaaatttaatcagtatatatgaacaaattaattgtacgcagctatgtacatttttaattcaaatttaattgcttaactaaatctaaacaaatttaaattggtcatatgataaatttgataaatttttgggaagttgacaataatatatattgtttgtatctaatttacaataataacgttaatactattattgacgtgccacatcaaccaaagttaaagtttctgatttttttgaaatttttcaatttttttaatttttttaatatttatgtatttttaaaagtaactttttggttactaatagtattgataagaaactaattggttacctttatataaaaaaaaattcatttttatatcatataatttgagaaatattttggttactcccttaaaaaacttatttgtatacatcttagtaactaattagttatatttctaagttatattatggtagattataatttaaaatagatttaggtaactttattaaaaattcaaaattagtgatcagttgtcatgtaatataacaaactactatttttatatatcaattattttatagaattttggtaggcacattggttttgtttctataccatagcactgatttaattttgtcaaaaaagcttggtgccacaaaaaaagatcttaaaagtcagaaccttaattcttttggattctgtgacaacaagttgcgaaagttaaaagaggagctgaccctcattcaaaattcccctgccactaatgacaatctggaactggaagcaagtgtgcagttagagatcttgaatttggagaataaaattgaaaatatttggaagcaaaatcctgggaaaattggctctggctcgaggatggcaatactaaatttttttatgcttctacagttatcagaagacgaagaaatttaattgttagtgttgcatatgatggaagatggctggataatcgatacaacattggaagctttttcaggaaaaagtttatgaatgtttttgaatctcaatgtcctactattagtgatctagagacgctttatgaggaggttatcacggacgctgagaatgatatgctttgtcagattccaagttgtgaagaa

SEQ ID NO: 2750 - DNA, 1148 bp, Cannabis sativa
atttgattttagaagagttggaataatgttgttttttcttttaataaattaatttttaggagccaaacacaactttcggtataggttgcaaagcatcaattagcactaatatttattcaattagcaagacaagaggaacaagtgaagatttgaactttatatcctaaaaaaaaaactctcatacatgatatgatatttattatattccaagttaaggaaaggccacacacacccccccttcaaattaatatttttaatactccaaataataataataaatactattaattagaaagtcagaggctatggagacagtagtataggaagagaatcacttcagttgtccaggtgttgacatttgctattctgaaaacttagaatgaaagacatgggttggccaatatggagttatagtagtaggaagagaatcacttcattattttttttcctttttattaatatgggaaaatctgactgttttgaaagaaacccaaaagaagtaaatagagtatattttgaagaaaagatatgatatatatttattttatttgctggggtggcattttgttgagctaggttctttgctcttggagttggatatggctgatgtggaggaagataagagtttatccaattaaattccaatcttttattttcagctttggtccttctaaataaattttatggaatatatataagacactagaagagaatagaagaaagcttcttgtatatacaatataacctatagccaaaaaagaattataacaattggatatagaggaaagcaaatggatcatactttcaactgttaacacttacaactatatacattatatgaatatgcaacttggactttgtttttccattttactaaataaataaataaggggaatttttactattttccccatacagaaaaatgtggcctttgaggtttagatttcattatagtgaatatattagggcatctcgtattgcattgttctatctccaataatgatagtattataattcaaagaatatgccacgtgacactctcaattgaattatagaggtatattatatatgattgataaacgtggcagatccttgttttctttctttttatcttcattttacatcattagtaaaaaaaaaaaaaaaaa

SEQ ID NO: 2751 - DNA, 2228 bp, Cannabis sativa
  modified_base (192)..(195): a, c, t, g, unknown or other
aataaagtcgttcattttaaggaattcaaccaccccgatttacgtggcagatttagattggtcggcaaatttgaatacaaatttattgaccaactcgcattcgtcacgtgaattgaagtggtggggatcctcgggatgaatagtaagattcattgtaatataatagtcttattataataataataataatannnntaataataataataatatgggtaaatagtgatataagtactcaaagttttaagtttgtaagtgacctaatcccaatgtttatttttaagtagcataagtaccctatatttgtaaaactgtaatttttctccaattttttcagtacaatttctattattttcttataagatttatattcttgatcattgggtttagacagaaacatgtagtattagtttcttctcaatattcctttaatatattcaaaatagagtatgtagtgacaaaattaaagtaaaattacaattttacaaatatttgatatttatgccgctaaaaataaatattaaatttattgtactgacaaacttaaaactatcactaactatcactaataacttgaaagcccaaaagcatagagaagaaaccatcctttcttgaaaaagctaagctaagctaagctcaacagattcacattcacctccgtcctcggaactgcctgggttccaacttccaacctctctctctatcctctccgccattactgaattctaacccccaaaaccctaactctaccctaaccaaaacttcttttccgctatgcaaacgctacttttaccggcgggtcgtaccggcttctacccagcagcggctgactccttcgctccaaatcttccccgacgctccgggagaccaatctacctcaacaatctcagactcccttcctccaattctctcttttctaccaagaccttccactcttcgtcttcgtcttcgtcgtttcttttagcaccgcagctgccggagaataggagaacacctctgtcgttcgctaatttgagggccacttcttcgtctactcctatcacttcctcaaacgatgagtctgagaaggccaaactcgctcaggttcagttctattctacgattatctgcattttttgttaaactgtttgatctcgattattgcattttagctaattttatgattcggaattgtattaatttctgtgttttggtcgttgtgggtaatcagtaatgcgatcaaatgttactatgttagtgtttttggctattaaaaggcttgaaaaagtatataaaaaagttttgggaattgtttgtgaatcaatgcgaaattcggtgtggggttctgatgattggtaatttacttccccattttgaattgctttaatcgaattgaagaaaatgaatggttattgtggtgtaggtggcgaaaagattagagaacacttctaggtatttcaagagattaggaggtttagggttttgggggcagctagtatgcaccattgtagctgctgtgattctttcgttttcagttgtggtgactggcaaggtcacatctccagctacgttttatgctactgctggtgggattgcagctgctttcatttcggtattttggtcattcggttacattcggctttctgataggcttcgaagaactgcaaatgatccatcaaaggtattgtcaagcttctattctctatgatgcttcctagtggatttgattatgctaaaatatgagattgcttgatcagtgctttatgtttaactatttgaatcctttcaagtttgattatactgcaatatctaattggcttttcccaaaaagtcttgtccttcccgcattgtgttggatttggaaattagttattttaaatagatactatctctatagcattaacatgataatgatgaggcggcagcagcaacatttggagaaatataaaaattcgacatgatggtataggaaacaaaacgattcattagactatgtgctgcaaaagctttagcattactttttataaaggccagccagtatatgattttttttgttgtctaatggggttgtttacttggaaggcgacttccatgtggttatcccacccagattttgtttcacaatcttcatcttcgtagcagcatccaaatgctggtatggtatgaatatctcatgtagtgtagacatgtacaaatgctcataccaaattataatattcagtcggcctatattgatcttgaaggtgatt

SEQ ID NO: 2752 - DNA, 727 bp, Cannabis sativa
actaacatctttctggactgaagaagagttggattctctttggattggtgtaaggagatatggaagggacaattgggatgctatgctaagggacccaagattgcaatttcaaccatgcaagatggcaagggaacttgcagagcagtgggaagatgaacaatttaaacttttgaatggcacttttgcaccacagtttcggccttcaaaagcagaaggcatttcttcgagcttcagttatcggggtaccacaggaatctttagagagaatatgacagatgaaactgaactctcactcggagatgtatatactcatagagaacgctgcatcccatggaggtctagatttaagtcatcttatgtgtggaacaatgattctgaatatctgcaggagcatgtaaaaaagccaactacagatctctatcatgattatcaaggggaaagttacgaagagggaccattgaagtgttttgggagctgcactatgctaaaagaccgtctttcattagctagttattcgacacctttcatggcagggaagggcaatctccctcactggctgagagaggcaattttcgcttcaccaatgcaaactggactgcctctgcctccacctgcctcaccaatagttcagtcacaaatgatgcatgttgcctgcccatattttgagttaaacttgggatggagaagtgatatgcaccaccatttacagacgtcaggaaatggtcat

SEQ ID NO: 2753 - DNA, 1711 bp, Cannabis sativa
caaaccacttttctgtttattgaccctctgcccagaacagccctcgtacttgcgaatacacttcatcaaactgtctacattagcagctgtggcatgaaaaaaaaaatggagtcgttcgcatagagtaaatgggatataggtgctgcattctttgcaacacgcacaccagagatctcaccattactttcagctctaacgataagctttgacaacacttcactgcaaaggatgaaaataaatggagagagcggatcgccttgtcgaatacccctattaggattgaagggagctatcggagctccattaagcaagacagagaaactaatcattgtgatacattgcataatcaaattacacactttagtattgaaactgtttccttgatgaacctgtcggatgaaatcccactctaggcgatcatatgccttactcatatcagttttgatagcaatggctcccaccttccctttcttggatttaatagaatggaggacttcttgagctaggattgaacattcagcaatccatcgccccggcatgaaggccaattgaagaggcgatatcaaacgatctagtacacctttcagtctgtccgttaagatgcgcgatatgactttatagctgtagttgcataaacttatagggcgatagtgatcgaaccttgaagcattcgggttcttcgggatgagacaaatgtaagaatgatttagcttcttgttcgagaccactgattcaaaaagcccttgaccatctcacaaagttggggaccaaccatgtcccaatattttcgataaaatattcttgggaagccatctagaccaagcaccttgacaggatgcatcttaaaaataatatctttaatctcctcagtatcgagaattctaccaatgcattcgttttcagcgtccgtgaccttatcctcaaacagagtagtaaactcattatcaatgttgcttcctgtcgactcaaagatgtcactgaaatgtttgtttaaatagtttcctatctcctcacgatcactcagccaaacaccatgtgagtcctccacacaaccaatggaatttcgcctacgacagattatggtggaggtgtggaagaactttgaattagcgtcaccaaatcgtatccagttttctcgggatttctgcctccatattctgtccattcttccctccatttctatgatttctagttgcacttctgcttccctttgtacactagcatgagagatcgactccttttgaatctcagccaattgtctccttagagccactagtcttctatcactgaagccaaacacctcctgattccacttctttaaatcatactttacccccttaggtttccccaggagctgaaaatcaggactaccataaagacctctcctccacgcattcatgatgacagtctcacagtcagccgagatgtccagacttccaaaaaaacgaaagggatatttgagtttgggcacctcacccgttgtctgaaggcaaatcagggcatggtcagatcccaaaattgggaacttaaccacccgagccttatgaaattcagtacaccaatttgcatccgcaacaactctatcaaggtgcttacaaattcgaccgtgggaatttcttgaatttttccaagtagcaaaacctccttcacaccccaaatccactcccccagtatcaaagagaaaatcccgaagaaactccccttctttact

SEQ ID NO: 2754 - DNA, 736 bp, Cannabis sativa
aggcaaactaaaaattgccgcgaaaccaacggcattctaaaaccctaataacgtcttcgtaaaaccctcaaaatctctattcggatatgctatcatgtaatcttctagttctttctaactttattcttaatcccaatacttctgtctcaatcctcaaattatcacaggaaacaaccacctcttttcccttttcatttccacatttttcttcaattttcacttttccctcaaaaattcactattttccatgcttaatcacatacaccgatggaacaccaaacacattatgtctgtggaaaaatctcgaattctctcatccctcattttcaccaagctcactgtctcagctgcaaagataggggacgaagaagaacccattgtccgaacccacacagacactgttactgaaatcctccttggcttgaagagctttggtttgagaagttttcttggcggggattacttcaaaaacgttttctctacattgaatcagcctgaggtggattcagttattgatactttgagagtcgagaacccagaatttgctttgggtttcttcttttcattgagaaatgtttatggctttggacattcgaggttttcccggttcgtcgtctcccatgttttggcgtcaaaaagctggtttgaggaattgcgtttggttataaagcaaatggtggaagaggaaggtattgcttttaacttcgatcattctttagtgacataaatttcaatt

SEQ ID NO: 2755 - DNA, 1621 bp, Cannabis sativa
atatatatgatatcaggatacattaatacaggttaaatgcacagggccgatagctaagcttgtacttcaggccctgaatacttagggtctgaaattgtgaaaaaaaaaatgagtatatagataaaatatgaaattatatgaatatatatatatatatatatgtataatagtattgagtatagtagtgtggttgaaagagttattttaagctaaaaaaaatgttaaatgtgtaactatagatattgaaccttgaatttttaataattctaaaattttttaatattatgccaaatgtagtaaaattatgattttgaaaataattaaactatttatatagggttcaaaatttaattttgaattagactaccccatataccaaaggaccaacgtatatattatacatacaaaaatatgttaatataattttacatatatatttatacgagagatgttaaaaactattatatataggtgtttaatatttttttccatgttatactattattgataaaattaagtatcgaatcttatataatttaaaaaaaaaattaagtattgttaatcaatcgtacaacaccacctatagaaagtgttgagtaccactagtgcccagacataaaaatatctttagggtaggaggttcgggccctcagcgcaagagacttctcagtttctttcaagatttcttttattattagtctatataaggccaaaaaaaattattagaaaaacaatttaaaaacttatttaaatttcatgttatttctcaaataatttttttaaaattttgccctagtcccatcaaaactaaagacaccctgctagggctccacctccatctcttctgtttgggatcataatgactggataccatattgatatttatttcaattatatatataataacttgcatcagaatgtatgaataatatttctccaattaaagctaatgcagacaaaaacttttgatttccatgttgtatagtataggggatcgtgttctatctattctcactgcttgtatagacggattaaaatcgtcgtcgcttaataaatatctcaatattattttaagatctttgcttttcattgagtacatataacaattaattaataattgtacatataaaactgcactaatatatactagaaacttttccatgatcctattattttgtcttgtatattgactaagtagttagtagtaaatttcccccaaagaaccgacagcaaagggccccccaaccttttaaaccttcgtacacaataatagctgtaatgtaacctgtcctaattatcactgtcgttcgtgaataattttaagttattagtaattttacaataattgaaagacttcttgggggtcatctctcatgcatacagacaaaaataacaataataataataataataagatgaaaaataacctcggacaaaaatagtttctttgctgcaatatatttcttttcttttcctttttttaatttatctgtatgtcgttttactttaatggttatttctttcttttttattcactttttctttttgcaaaaaagcgaaattgctccttcatgtaataatatctatttgaaaatcagataatatcatctattattttttt

SEQ ID NO: 2756 - DNA, 1588 bp, Cannabis sativa
atatatatatttttttttgaatggtgaatgaaagatatttattttacataagaaacataaatccatagaattgaacataaatcaaatattaatttattttattttcttttcaaaacaacttaatagttgaaataaaggaaattagaaattctacctgcagcagcaccaccaccaccacatcaattccaccaattatccatcaccatcacatgcaaaaacccacaatttgtaagagaccaaacaccaaactgtcttagttggattcattaatctttataagcaatatatggatcaatacagaatgatcaatatttcaagagcatttgacaaacaaaaatacttcaagggtgattgaggcttcactttctttgaactaatattctaatagtgattcaaatttctcaataaatgcaacttgtgaaatgaatatatatgatagtttaagattaaaattactctcaacaacaattctaaaagtactttacaagagcataaatattgcttatcaacaaatcatgccatacatttgcattttccactaaaaaactttcacttatacagattcaaaaattattgaagataaaataaatactcaccaagtgtggaacccatcatatgaacgtttaccgtagttccacttgtcaaaggttcaaaattatggaaaaatgaactaatggaggattactctcaaacacagcactgagcatgttttaagtgaaaaccattttccattttccactatatgtatataaacatgttagaatgatttgcaagaatgtacaatcgatggtttctcaaaatgactctacttaaaagtcatgatcataatggttttctataattataaaaaagagaatgactcaactaatttatcactttgcaaataacgaatgcaaaacaacatccattagacaaatctgaagaaaaaaactttggataagataaattaagagaaaattaccaaaaactactaacgattagttttttctttttattttggtttataccttgaagactatgctattcaatctaaccaaaactttaaaccacactttagagatcattctaaaatgtagaagtttgaaaattaacataaaccaatcaagctcaattcttactaatctaaagagtacttacttgatgacgaaatcaacctcaattctgcaaagtaatttaatcacttcaatgtaaatgatgtattagtagtaccagagcatagagattcaaccaaattacattcaggtgccattgtttaaggcacatatgcttcttctcctgtcaactcaatgaagatgctaaaaatagggtgatttttaacctgctgtatatcaaggttcataaatgcaagagttcacaactcacttgtagggtaggtccagcataccaacaaatctatctatagcataaggtatttgcatgattgttgaagctctatgaattgagccatttaaagggtttactgagaattgggtatctgaacaagaagatatatatgctattattattactatatagtcgtggcattatttgcttagaattataccgagatgggaatgcccatttcacaaaacagggagttaattattta

SEQ ID NO: 2757 - DNA, 1577 bp, Cannabis sativa
gagacatagaacagtggtgaaaaccccttagcaaatgacattactaagagaatgaataggacacttatggagatagttaggtacttactgttgggagttggtttggagataccattttggggagaagcccttatgaaaacatgttatctaattaacagatgtccttcaatggcaaataagtttaagacacctcaggaaatgtggacaaggaagctacccaagtttgatcatttaagaattattggttgcacaacctaaaaaaataaaataaaaattgatttattttcaatccattttattttgttacctccaaccaaaacgttccaaaaattataatagccaaactgccctgctatctcccacctaatatttgcagaagatgatactattctgtttgccgagctaatgtggggaatgcaaaagatattatatattgtttggctctatatgaatcttggttgggtcaagtgtatagtaaagcaaagtcaagtgttctcttctccaataacttgattttgactaagaagaaagagatgatgttggccttggaaatttctcaaatcagaggagacaaaaagcacttgggaaacccgtttgtgtttaagcaaaggaagaaggaggagtatctggctctgaaacaatgtatgcaacaacgacttgaaggttggaaattaaaatttctgtcttatgcaggtaggttaactcttattagttcggttgtgttatatatgtgtgtttataacatgtcaacaaacaaagtcccaatttccatttaccgtgaacttgatgcgattattagaaaatattggtggattggaaatgttgaaaaggataggtttatggcattcaaggcttgggacaaaaattttcaaccaaaattatcaggtgtccttggtttaagacgatttgaggatatgaataaggcattgctgtcaaaataataggtgggtaacttgtcttcttgtaaatattacaacattgatagtttttggtcagtgaatcctaaggttagtgactcctacctttggaagaacatactgggagttcgagatattatggcaaagctagggctctgtaacattgacagctgatgggaagtctatcgacttgtggaaacaaccataaattccatggttgaatcaagttgaattcgctctgttaatgggaaacatagatagaagcaggtttacagcgcaatctattgctgacatttctatagatggcactaggattagggaggcagtttctctaatgtttggagacgagtttggaaagaaaatcatggaaattccaaggatctctctcaaacattcagatcaaacaatttggaaggtatgtactaatggcaccttttctgttaagagcgcttactgtcttgactaggagttttattttggcccaaagaaagtcatttagaaatggctttggaatgcaagtattcatccaataattggagttctattgtggaggattcttgacgatgccattcctttaaggagtaagttgcctttttgtgtagaaaaaaattgtttgatgtgtggtgaagagctggaaacatgccttcatgtttttaggga

SEQ ID NO: 2758 - DNA, 1837 bp, Cannabis sativa
aaaataataaaaatcctaaaacctacatatttaacattctagtttggaaataaatcaattatcaaacattcaaaagacaacgattagtgaatggatttgctggctcattatctgaattaatatatagtggaataatttggcatatcctgcacatcgccatactaactctaaatccattaaaaatgacacaatatctagatttacccaaaaaagggagaaagaaaaaacatgctcactaaaaataggatgaaggagaaatcaacctcgaaagatgaggtaaataattataataatattaatgcgatgaggaatccatgatgaatttaaatctagctagtattttattttaagtgatcccgatcacacaagaaagtttctcatataatatcatatacaagaaccgttgacacaactcaagcacattctttcctatgtacatatagtttttatataaattcatgtaccaagtgcccatcaataatacatatttaatactattaattaacttcattgcctgccacatggtcactctatattttatagtggcaatgttatctaaatatagcaaaacatgttagggatttctttagcaaaaaaataaataaaatattaaagatttctttacgacactaaaccagtatgcttgcatgtggccaccaaacgcattctcaactaaagaactgataatttttggcactataggatttatatacattaacaactaatatatatagttgtcatgtaaaagtgtcaccaaatatgccaaaaaaatttccagccaatatgctgcggaagcttgattataaacacatgatcccatgaaaactacatatataattgaatatatatatatatatatatttctatattgcaacatgtttgatcttcacatttatttagcttctttcattgtcaacctctaattaaatatagacttcctcaaaggtaggctgatttattcacatgcttaatcttagaatattaggttatttttatttttatttaatctataaggtgtatacgtactattcgcggtaagcctttcaaaaaaaaaaaaataattagcttagattaagcggattccattcttttttttttcgttttactattgctatttatttttgtggcatgacatgttaatggcgtacatatatgttacgtaagcgatatatactgaatatatatcagtgtggaagtgttaatttctttcaattttttttttttttttttttgcaaataaaagtcaatattattgaaaagaaagaaaaacaaatggtgtatggagaactgaattccgtacaaataagatgcaaaataaagacgaataattaaggtggggtcatgacatgagaaacaagtagctagggtgatgataaatatagggaaatttcaatttttctatattttggagttttattaaaaaaatgaaattatataattgcagaatggtttacttcttcgagagaagttaatgatgtaacagtttaacggtaatgtttctgtatattctgtgaatgtcctcgaattgatatatatacatatatcgagagagatggagaaaaaacaattacatttcgatcactaattacttttcacaaatcatcaattgatgatacaccagatgaccagaatacaataatctttttttttttttatgcataagatcaatgtgtattgctcaatcaaacaccattatacacaaactgttccacaaaaacagaaatttataattatcttacaagaaaatggcttaaagtacgtagatcaaacctcagcctagtgtatccaggtctatataaattatttatatgtatattgtttatccaaacatgcatgc

SEQ ID NO: 2759 - DNA, 1379 bp, Cannabis sativa
tgtcatataatcatttgtcaggaactatccccacaagtactcaattacaaagcttcaatgcttcttcatatgttggaaatgatgattatggattatgtggacttcctctcttgactaaatgccctgaagatgatcatccaattttcaaggatgatgatgatgatgattcagattttgatgatcaaaaatggtttgacatgtcatggttttacattggacttgaagttggatttgctttgggttttattggagtttgtggagctttgtatcgaaactcattcttattggatgcttgcttattttcggggtgctttaatcaattttgagattggctttatgtgatgattaatattcggatttctaagttgaagatatacttatttcaaagttgaatggttagtacgtattttcttcttcttcttcttttaattacaaaatataaataattaattataactaatattccttaatttgactatatatttacttgaatggttagtcatttggatttgcaacatatatatgcatgttataagttgagaattaatctgatctaatttcttattgatttgtgtgagagatgaacaggtaattaatgggttgtcaaaagaagatcatgaagacaagtgtttgtgtagtcttaattaattagtagtgtcattaacaaaatgtaacctaaatgatcatattttgtcaattagtcaatccttaatttggggttgctaatttattacctaacacccactatatgacttggtgggggtaataataatatatgtacaattagtcaaagcttatacaaaagtgtttctatatccttaattttctgctatttacttagttatatatatgaatctaataatatatatgacatgacaagtcttccttactaaacgtattttttttttttttaaaaaaaagaaaaagttggtaactaaaataaataaataaaattgaatgttagaaaattgaaattgaaattctgttatttttatgaatattacaaagtaaaattaacagacagcttaattaattataatgccaaattattgaaaaattatttgaatagaatcgaaatctattttatcaaaaatcaaacctcatagatcaaaattattttgcaaacaataaaattgcagaaattaaaatagcacgcgatattttatacgagatattaccaattcttgcaatttgctactagtctacaatcatcacttgatttgtcaaacaagaagtttgtggacctcatctaacaaattcatgctcaaatggtacaaatataatggaagccttaatgctgttgaagatggtgacaaatggttagacatgaaacaatttcatatgggaattggagttggattcattgttggatttgttgg

SEQ ID NO: 2760 - DNA, 3033 bp, Cannabis sativa
ctggccacctcctaagcaggtgggccagccatctcctcatgatagtgccccaaggatgaccccctggctagatggcggtccggtcctctcctaactagctctcaaacaacgctctcccttaagctaatgttctctctaggaaggcctcattgcccatgtatgataggtcaccattggagttactcatcttgaactcatagatgcgttttgaagacaagtcaacatacttgtctcttattgcctactggccaataagggctgctctcaacttctcctcagacccagtgaggtcagcctccaacctggagatagtagcagtctgcgaggtgttttcttggttcctagtaccaagcatgttctccaaataaaaaatcatactttggttttgcagactgagagcctccatcttagagatagtccggtccttcacctcgagggcagcctctaaggtcttcacctgctctcgaagagcgctcgaggaccctcagaaaaatgctcagttcatcaaagcctggcagcaaaataaagtcaaagtcagtgtcaaaaacacaacactggtcggccagccttcccacaaggttactatggccggctagatccctcgaagacaaactcttggccagctagcacctacaacatcactatggctgataagcctataaaaatgccagaataatgagcaacgttaaatgtgcaactcactataaaatcttgaaggccaatagagtggagcctatctggatcactgtcaacgagcccatgaagctcatcattatccatagaaggaatagctctttctacgtgcctgtgagctgcctccaagcctcactaccccacaaccgagcttgctccccaatcgggctttgggacacccctgctagaatgcagttccctcttagctgaatgatcatcgatcgtgggctacccagctggtgcaggccctagaggaggaggaagagatgatccagtagcacctccaccacgggtggtttgatccaccttggcccttagacgacccgaaggctcatcaaaaggttccctagcgagacctctcaacctggaagacatatttgctaaaagaaagtagcaaagtcagaaagcaagtcaataacattcaatgcaagacaagaatgtaaaagatggtgctatcaactatcgaatatcatcatccttagaagagtaatcattagaatccttaacaaccgccttgcccttacctctaaatgtaggcaaggggtgagtaggtcctgcgaagctttggccttcaagcctgatccgaagagaagcctcaccaactgagcccccatagaccaagcgttggtagagggccctctctctcctttctagattttgggctatccgacacgttattatctaagttagggacttatctatcattaggataaggtccctctgcagctggggctccatctacagcaactgatggacccgcgactcccataactctagaagtaggagggtataggctgtacttctgaaagttggccacactggccaatctgattatgtttctcctctccacaggaagagacaggatgtgatttgtcctatccctcatctacagtgtgggggtggattgctaaaaaatggcacccactggaacttgtagtgtctaatcttttaaattccccaagtattgaagtagttccgagcgtacccacctactttggatatgggtgggctgttagtgtcacccaaccactggtggccaatctagcaaaagtaaaagtactcaatcctattctgcttcagagcaaacttgaaatcaaaatagtatccaatctcataaggagtgggttgaggccagactagctccatatacaaagcaaacatcgctaaaaggtacttaatacttttcagggtgatttgtgttggacacaacctggaataagcagcgatgtctttaaagtaagggtggagcgacaacttgcccctgctctatataacgctccgaccatgccatccaactaagggaaagccattgcgccctttgatctttagtgggtctctcccaaccctcactagcccactagcaagtatcctgctaaaagtgtcagtagggaggacagaggcagaagagacccacttgtctccctatgatatggcatccaaaatcacgggctcagactgaataaagatgtgatctaagcccaacattgaaggctgaccgagcttgttcaaaggctccccattgtcgtcataactacccaaggggcgattggaaaggacaatacaagttatgtatctccttcttttgactggtgcatcctccttaactttagacttagtatcgggactctcagccccctagtcaacctcaagaaactctgtctggtcaacctattgatctacattagcatggggctgagtagcctcctctacaattttaactcggccccttgttgccaccctggcaacatggggatcacatggtagtgctctacgacacgtctgttttgttttggccatgattacataggataactaggggacctatgctgctatcacctccccaatccaacactcaaaatcacttgcatagaagagataagaggaggtgagcaacctgacaaagctacaaacacattctagtcaacagtactcaagggtaccttctaggtaaatcacaatgtacaaggtcagttactgaccaagtaccgtcttaactacatttacttagacaaatagtgggtcctaagttatgcactcgactataatggactcactatcaagtctcatacagagttcccaaggagaaccacacataagactacagttgtatatgcctccaaggccttcataggaccctagccggggtcaacagaggacaaaaaactggctgcccgctttgaacctaggccctggctggccagggttcccaagcctaagaggccagccaggtcccatgacccagcctagggccggccaagaaccttattttctggcatagaccaggcagcctattgggtataccccttggctggccagaccccatggtggcaatcattggcc

SEQ ID NO: 2761 - DNA, 754 bp, Cannabis sativa
tatatgatgacccaacacatatttataaatacaattgtgaccctaaataaatttccaacaaagagtactcctcatcctcttcgattgagctgacaattccagtaccatccatgatgtatttgaacaacaatcccaatatataattgaagaaacttaacaaatggtctaatatgtgattccatctactttaccataatattctccacatctctatgtgatctcacaataatcttaattaatttgctttccacattaatttttttttttgacttttaactttaataattttgaaaacagatctaatgcatcactttttattaagaaatagtgatacatgtaatttgaataaccatgcatgcatgtttgtgtgcccacttgcaagatattggtccctccatgacagaaaagaatatcatataacctaaactgttatggaagtttgtcgaagattctgatagagacttttaattttaattaaattgatcatgcataatatctaatcagtaatcaccactactgtgggaacgacaattaaactacaaactctgcttaattataattaatcccacttgcctatattagtggtaatcccattccaaatccaacccccttcaataataatccttttcatcaataattcccccttaaagccagagaagattaacaaataatattgtatcaaaaaggcatttggatgacctttaggcaattaactctattaccttgctacttttaaatataaaagtattatatt

SEQ ID NO: 2762 - DNA, 2053 bp, Cannabis sativa
acattgctaatacctaataactacacatttcaacattcaccaatgtcaaccttatgggctaattatttcatcatgattaaaaaacacttacaccatttgaaattcttgttagatttatatgaaactaaagtatatatatgaacaattctataaattagaaataatgaatatagattgaacatatatgtaagaggattgaatatatgtacctacaacttaataaatacaaattctcactaacatatagatcttgagatagccatagattcatgcaaatcgattcctactaagatttttatactattttaaaaaaaataagatctattttattaattaacaaatagaaaattcaattggtaacttttacaaaacacatcattcaaaatagtatttattaccgaataaaaaataataaaaaagattcgatgaattaagatatgcatggtgaccctcacttttgattggttgattttattttttgtataataaaacctatattttatagtaattaattaataattttttttgcatggtatcgtaacacctcctatatgataacattgcttaattatatcacaagttttctacaatttattaaataaaaataaaatttacaatacttattattattattatatatttatgttaaatgcattattatatgtaaagaagcttttcttcttacagacattaatgatcacattctcatggtctcattcattcgttggtcggtgaagtaaatctaggactgccattactatagttttcaacttgtctgcaagtacttacaatattttcaaaaaataatttcacaaatttaaaaaaaaaatcaaaatatatttgattatgtgatatttaaacatatatactattcatatttttctaattttttttacaaaaaatacgattgatcgatagctggcctattctctcttcgagtcatttttactgaaaaatgaatggtagaaaggctattgttgtccacgcaataagattcatacttacaaaaattaaaattattgttttaatgttgcagataattaaataagttgttgattggagctctcaacataatttaaatttacgttttaggtatatccgctttctatatgaaatattaaaatggttaaatgtacaaaactatatacttattttgatgaataacatgttttaattgcatttaacatgcatattttgttgttttttatttgctaattcaactataaaaaaaacaaaataaaaattgttgatttcttagacgaataattatagcaaaagtaagataaatgtaaaatttgtgttgtttgttagttggttacttgtaatttgtatggaactttatgattttttttttaatttgcttgtctgcatgtttaaattatgctttgcaatgatgttatcttaaaaattgatttaatagtcatgtatactaatggttgttatcttgttaataaagttttatttatttgtaagctaatgtatgataatcaatttattgaaatttggtgattttgcatgcaacataatcattactaattctcatttagaactattaatagggtgagttggtgaatgaattgaagaaaaatataaccaactcgcaatgtacaatcaaagtaaaaattttaatcgcataaaaaattcaataagcatactcataaaaactctttgcctgctactaatagtatatagagaaagagcattattattaggcactagtggtgcttaatattttctagacatgttacctttcgattggctagcgatactctctaaaagttattacattagactatataagacttgatgcttagttacaccaataacgatattgacacgtggtgccttttagcatttctcatatagaaataagggtcaaaagataaggatcgttggaaattatatttttgcatatgccaataaatttctttgataatagtaaagaaaatcgtcactgtaaagatcttcaataacagattaaaaacttattactgcataatatagatttgtagtaatagaacaaaaataatagtgcaaaatatacaaactttac

SEQ ID NO: 2763 - DNA, 1953 bp, Cannabis sativa
tttttttttttttttgcttattggccaagaatcaaccacctccacttcaaagcttatcgtaaagttttgtatgtatattattttattaattcttaatatcttatcaagtattaaacgaaaggtatggatgtagttataaacagtgtcttttcagtgcttgtgaaaaagataacactatttactcataatatacgcaactccctacttttttccttttgcatgaaaaaatcgtctatctaaactctaaagcaacgattcgaatataatttagttatagaaaattaaaataaatgcatgagaatcgtgtggaggcgatctcatctcacaatcttataaatttccaaatttggaaattattgcagtcaataatattaatgattgtcacgttatataatccttttgttttaggatttagcggtaatatcttattaccttatttatatacatgcgtgtgtcatgtgtaccccacgctgttgctacttgctagtaatttaaatatagagtttaatttcaaattaagcatgtgaagaaaattgcattgccaaccatcgtatattttgacttttatatgtatattttatttttttatatataaaagaaacgagtttactataattaaggcaatgtttaattaattcggtaatcaatattgataatagtaactgtgttcaacacatgaagttataattggatgattgggatatgtgctaatatgtgaagaaattaaaatgtccatttcagaaagaaaaaaattaaaatgtaaaatagaaaagtttattttttttattagtgtagtgctatttatcatactttataaatgatctattaatattttttattgaattaaaatatatcgaatttagtattgaataatactatacaattttttgtgttaggtactataatcccctttgaaagagttagttaggattttatatatatataactgtgtgtataatatagttacaagttacagcaatcatctcaataattattatagtaaaattttgaataaagtattagaattaatattcaagatttatgttgcgcagacacataaaaagataaatacacgtgtaataaaaatatttaaagtatattttagcatctacacttatattgttgttaaaacttaatgagatgtttgttgtaacattaatatagttataattatctaaataaaaaatacgaataaatcttagtagtcctccaataatattgtacaatattgttatcagcaccatataatcttcaaggctatactgatatatcgtgttgttattaattaataatttatatattatttattaaattaaattatgtgatatgcattattaatttaataatttgtacaataaaataccacttatcatttatctacgattatttttaaaaaaatataaaccatgtgtgggaaaatatatttataggcatgtggtaagtgagtgagtggtgactggtgagggtaagtaatgggaggacaggtggcgtgatattgtagaaagtgaaaagcactacaccaaaattaacaaatgttcggaaacacaaacaaacaccatcactaaaccataacttgttgcgtttgttgcgctaaacactatgacaattatttcaatatataatatgatttgtttaagttttaggtgttttttgggtccataaaaaggacaattaagatccaaacttccattaataatgatcttttgtgtctttacttagtagtagctttgtagctagtataggtgaggtagctgggagaaggttggagtagattcaaaggtttttctgttccaaacccacccaactcactcacatcacattcacatacatatttctatacaaataaaatacagtgcctgccaatcaaactcggaccttttcttattattataattattagttagtaattaagtatttgagttcacgtcaatgccatacacgtgtaattgtcac

SEQ ID NO: 2764 - DNA, 1152 bp, Cannabis sativa
tgcattttgagcctagtttcacgataataaatctcacttgaactctgttacacattcagccccttcccctcactaatgaacattgctaaagcaacatacttgaggcaaatgttcttaaagtacctagaaaggattcaagctctttaatccttatggtaattcgggaacaagctagcaatccctctatgatacttatagattaactagttaagatttgtaagcaccatgaaggaaccttggaaatattgacatgtggaagaagaatttgcaattcatatacttaacctaaggttaagaagtctaaaggtttaaagctgccgttggaacaaaagctttaaatatcctaaggaaacctattaaatggcctaacaaacaaaataaggcaaaaattaagcaagtcaagcatggcataaatagacataagcatgataaattatctcaaaatattacaaccctcgcggttaaggcataaatgtgtctgcaaaatagaaagttaattaatgaataaaaaaagaagtaaaggataaagttatggctgagaaagatctttggattggcctggagggagatcttgaagttggtcttgtggaggatcttggagatcttgtgcaccattccctgaagagattataacttcttccgagtgctcatctctggattctttagctacgtcttctacgacatcaatgttgaaggtctatctgactcaatcgcctccacccttcgagtatattcctccccatctactctgagatgcctaagaactataagatcatttttccacagcatatggaaaagtatggagtgggccaacttcaaagatcgaaggcaaactttatctgcgtgagcttccacctcagtcttcaccctagcttccacttccgtaatgtgcttagcggtgtccattatgactttgccaatagtcatgttaatcttttgcatagcttccattggctagcgagaattcagattctttttgcaactgccttttagcactagtatgaagaacactctcctcctaggcgcatcgcaaggtgtcaacttgggaattgatctcgtcatgctttgtcttgagctcctcctttagcttctcgacatcagactggaaacctttaagcaccaattctttgaggttgatttggaactccaagc

SEQ ID NO: 2765 - DNA, 2626 bp, Cannabis sativa
aatgaaagtgtgtatgaagaaaataattaattaaatggagctagccatgtattatcttatgtaatatatagcttaattttaaatatgtatgtgtattttaaacttattatataaatatttatatatgctacttgttgtcattggttgattgttgaatttaattttcttatgtatagcatttactgaacattgatcattgctatatattttaataagaaagtaaaactaattttcatttttccacagattttaatttttttttaatatatatttttcaggttgaatttttatttgatttttttttatttgcttatatatatatatattatattgaatatccatattaaaaacatttgtgagttatgaactatggctaatgaaattatgttttttttttcgattgatcacaataaatataattttatccaagtaataaaatcctatcatgggtttaagactaataaaattatgttggtaaacttaattttgttagttgaaaaatgacattttttttcttttaataaaaagatgttatatatagcttaactctcatcattgtataattctcaaaagagcttaatttattgtcattgtataattctcaaaagagcttaatttatttgactattaaaaataatggttttattatgtcttaaatttttatgtaatatattcatttaaattattaattaaccaatcatgcataaacaattaaatatttttcatttctataattacatatagaactttttctaatataaaatatccatctctaattcaaggaagccaagagttgagtaagtggtctttattgtgttaatattaaaaaaatggtagtgaaatgtgctacacaaactttactaatttatgtttatattctcttgtttgttatgatatgtttttaagagaaaattaaggttgtactactaattatgatcatcattttttttttttaaaaaaaaagaaaaaagaaaaggaaggtgatagaatagatgagaaatggtagatattattaatgttatgatgatgtaagaggatttcattttcaattgggtatgagttgtgaggatgacaaaaaccatgggcttggaatactccaatgtttgacatgtgttggtattttagtgtcacattgtaatatctaaaaagttcaagaaaatgatataactaggaattatagggtagtcacttgtcaaattaatcaatcaaagttggggcaaaaaggaaatatttaaattattatgagaagaatcaataaaaatatgacatgtggcatcttaataaatataatcaaatattttagaaaaatagtaaaaacacttatggtggttagtacttttatcgggtgtaaatcaatattaggtcccacttattttaatttaagaaagattataaagaatcgctaactaattataagacgtcatgtcataaaggtgctaaacactttaatgccccatagcaatactcatatttttaacagattgggattaacaaaaatggataaaaactcattatttaaaaaaaaatggttggaaactagcacgtggtttttaatcagtcaaaaaaaaaaatgtatatatttgtatgaaataaaaaatataaggtatttatgccataaatttcttcttattttaatatatatcttttaatttttgttcttaaaagttgtaaaaaatatatgtgagagtatttttcatcatgacggtacttgttgtaattacgacattattttagtaaatttttaaaagattataaatagtctaccgggtcggaaacaaatttaaatgtttttaagtagatgttgtaacggaatatcaaaaatattgtcgttggtattataaattattatgagattttttttttcaaaatttaaaaaaaaaaatatcgtaactataacaaatattgttttaaaaaaagaaaaactttagtacatacttttagagacaacaacattgaaatagaaaattaaccggaagtgtatagtaagacgtataaaactcaatttcaaagctaattgataatgaataaaatagtctataatattacatgagtaatttgtgctctaaatatctaaatttaattttcaaatgcagataatatttaggtttaattttcagttatagataaatactgaagtttaattttcggttacagataaatacttaagtttgattttttatggtaattatacttatattatatttctaaaactgtcgtaggtacctgactgtttcttattggtatatttaaattaatttttaattaaaaaataaaaataaaatcttaatgtattgtaccaatcaggaactgttatgtggtcattgacttgatacttaacggtcatatacctacggaagttttagaaatataatttatgtattattctgttaaaaattaaacttaaatatttatctgtaaccgaaagttaaatttaaatatttatactgcaaattaatcttgtattttcataaattatggatgtgataatctctaacattcatggatcattgttttttaagagatatttatagaatcgttgggctaaatcgaagaaaggcccagtacatccaatccactggcccagcatatccaatccactagccactcacacaaaaaaaaaaaaaaa

SEQ ID NO: 2766 - DNA, 1812 bp, Cannabis sativa
aaaaaaaaaaaaaaaaaactcggtagtgtaccgccggaacactcaacaagcctctctctcctgcccccgcacaaaaacaaaaggcaaaatgcacaaacccacctaggtgaatgaccctgaaaacccaatagactggttaagatgtaagaacagagaccaacccccataatgcatcatcaccaactatatcctaatttctacagaacccaatatgcctgatattttttacaatgtctcccgtggaggtttcatcactccacaaggatttctctctgcttttctagcttgtgaaatctttcattatattttttcctcttttttcggccttcaaggttaaaaagaaattgcatacatcatcaaataatcaaaagcttgcacggtccaaagataaagatcttttcttatgctccgccctgcatcatttacccaagcaaatctccaaacaaatttggattctgactagttggggtaacccccatctgccttacaagggcatccttttctaaagcctccttcctatttggacctttgctaaattgagcgagatatgcacctgtagccccgccttgatcagtctcagtagaaatcaataattcagaagcaacattgacatcaaacccactactctggccacttccaggtgtatctgaatataatgccattaaatcaggtgctttagaagcaccatccccaccatgatttgcagttgaactaactaggcctggatcgagaagcccttctaattgcctgaatggatcaatagacggaggagcacttgtcacagttgattcgcttaagtcaagaagatcaggagcttgaatacttgtcctgtccacagagctttcactgggcacttttggtacctgaggcttctctgtcgcatgactactactggcttttacccccttatggttggcagaggatgtctttctctcacttcttgacgaacccccaaataatgaagcagcaagcttctgcttttctgggttaatttcaacttgggtcttctttgagtcatatgtttctcgaccttttgagcttatggtgctaacatttgtttgtgtaaccccatttgttgttttctgcgaagtagattcggaggatgatgatgccggagtagagtaatttggcctgccccattttttctgaacaccatcaaggcgtagcttaagttcagatgatcctgctcctgggtctaaaacagctggtggaactaatgctgcctttggagtctccctaggatatgatggctcaggtactggaacaagttcagaagaagacgaaagaggagtaactgttgatggaactagtggccttgggagctcgtatgcctcaaatctgagactatggctagtcacttcatgttgttcttggattccgaaagtgctaatacttagcactccagaacgctcactctcaggaatgtagggttgtgcgccttgttctattgactgttgaacatagctgttgagaaagttaagatctttgtcaatctgcaaaagcaatatataataatgagcacacagtatataaaaatacattaacaataatagttattcattcgtgtcagccattctacatatattgagggcatttataagcaaaataatctttgagaacaagtaaaaaatataaattgaagcctagttcattataaatacaatagcattggaaatatcattaactaaatttctagttactaacaaaattatggcatgtgcaaattatgcacacgctgaatttccacttgaccaccacaattttttttttttttttgggaaaaattcgccacaattttaaatgtcatgcatc

SEQ ID NO: 2767 - DNA, 856 bp, Cannabis sativa
ctgaaatatgcatattttgaatcggagtaatagttgttgggatacaatctattacctggttccagctagttaccgtgggggtgaataattgttgaaaatatcccaccataacatcttgaattccatcatcccaaccaaccataataccagcgtcatttcggagagaattaatctgattgtttcgttttcttgtcttagcagcagcatgaaaatatttagaattatggtcaccttccttgagccatagctgcttagatctctgtcgccaaaaaatttctttctgagaaaggatttcagcaagcttttcattttcctccttgtatcttttggccgaatcaatgtcccgtctccctttcagcaacttaattctttttttacattcagcaattcttgcttgaaaattaccagttatttctcttccccagtcggccaggacttcagagcatttttttattttttcagcaatagataagtcttgatgcagcaaccaaacatcttcaaccaacttcctgcacattggctcacggagccaagcattctcgaatttgaagttacggttgggaggtttgtgaatttggacagcaggggatagaagaattggacaatggtctgatgtagaaacttctagattggtgagtcttgcatttggaaacttatcaagccaacttgaagtgacaaacgctcgatcaagcttgacttcaatccagttatctgtaccctttcctctttcccatgtgaatttgtaaccttccatctccatatcaatgagtccacaactagttaacacactttgaaagccttcaatgagccaagtaggataaggtcttcctcctcttttatcactttgacaagtgac

SEQ ID NO: 2768 - DNA, 1711 bp, Cannabis sativa
agtacaaatcttgctgtaggttcgaataatctatctccatctcaccatcttaattatgcattgttgtttgtggtgtctaatataatcattttgaattttcagataatttaaatggagcacaaattttaggccgaattattagggttgatcatgttactaactacaaaaagaaagaaataaaagaagaaactaagcagaagaagaggtccaaaagggagaatgtacatgcacgaggaataaaagcttagtgatcagtaattcaatattttgaattggtggtgtgttcttacatagattagtatatatatatacaacattttcataattaagtttctttaatcaatggaatataaatagatatagattttgtaatttaaacatatgcaaatgactataataacagattgttcaatactatttctatatggagaatgtaaatagaattatactcgatatataagcacccaaaaaccacaggtgcaatcaacacaatgagattcaagatcttaattctattaggctaaaaaaccagacctctgattataagaacgacaaataagactaagaaaaaaaaaaatggaaatatttgtaaatgtgctaattaagcttttgtcttattacaaatatctattattatagtaaccaaatttcacttttccaattaataaaacaagttattattagtccaaacaaatatttgtaagacaaaaaaacttaattatctacttgtatgaaactgagagagagagaaaaagagagatgagaaggaatgaaaatgaaagaggctcactctcaacagagaggagcaatgccactatataaaggatccaaaaaaaaacttaattatctacttgatagtagtgattatttataatcacaatattctacaagtacttcctcttttctcccaacaatataatatgccaatacttttaactatcttttttattttttgtatgcccttacaaaaattttacttttattcagagcaaaaattgtaatcaaattacagtatttttgaaaaaaattccaccccacaatataaaaataaaatagttagaaatttcagtaaatagtgtaattatcctattttttacacataaattagattaacacatttcaaaaccctttgatttaaatcttacttaaattagtgctaaaatatttttcataggtaattaattagtttacttgatttgtttacttaaataaaaaaatgttgtaaaaagcaattaattagtatatagttgttacaactagcacccaaatagttactttaattttcgtgatatactacttcttacattttaaaatgaaaccatcgaatagcatatggcgatagcaacattcttgagttcagaataattagcggtgtggtcgaaaaaatttaaaaaaaaaaaaaaacattaagaaaaaacaaaaaacaaagaaaacaaaataaagcatgaaagaatccattattgtaaaaggtatttatgtaattaattgggtcaaattatttttatagttaagttgtaaaaaaatttgtgttagttataaaaatcaacaactcaaaattataccttgttgctaaaaatggtccaacacatacaccctacaattgggcctcaatttaaatagcagaaaataggctcttatttaggctcagcccaaattatatctgccatggcaacggccgttgagagaaaagaaaggccattgggccattggt

SEQ ID NO: 2769 - DNA, 764 bp, Cannabis sativa
atgactatctcgccgcggccagaattgcatttagtctaaatttggcatttttctcggctccacttgtcttttattgcacttttgcatcccagggcctccattactccgaggaacctgaaaacataaaaaacaagcataattccgtcctaaaacatcgaaaagcaaacataaaagtgatccaaagtataggctagaaatagcctgacattgggcacatcccaaagtaagttgcaacgtttagaaagtactagtggagcggcaacaccgccccatgctcaatgtggtgctccgaccatccgaaccagcccgaagggggcctatgcgccctacagtttcagtggagaatctcgtaatggacaccgactattaggcctctagtaaggatcttaccaaaggcctcatcggagagagcaaaagcaggcaaaacccacctttttttaggtagttttgcatccaatatctccgactcgggagactgctgaaggacataatccagtcctagttctgaaggcgtgcctagtccatttagttgattgtcttgggcattctaatgacccaaaggatggttagggaggataaaacaagtcctatacttcctcctccttactagagcaatctcctctagctcgaattctgcgtcagaactccctctctctaagtccatctctgtttcatccatgagaggggctgagcagtctcttcctccactctaactcgaccccttgtggccaccatgaccacatgaagtgttgggttttatgccc

SEQ ID NO: 2770 - DNA, 1291 bp, Cannabis sativa
ttttttttaaaaaaaaaaaactcagatttagaactaaagagtcgttagatttttcctatatatataatttataaatattttttgcttcttccatatattaagtatattggcatatataatatgatggtgtgtttcgtgatgagatcgtgataatgggcatcctcttccccgatctgaattgatcccaccattaaagcctaaaggcatacataaaaaaggtaagcgcatattccatgaatattattgttcatggcaaacacatgaaacgacgtcgtaatcctaagtcttcacaatctcaatgcaaatggttatactaattggggattgtggtgtgctcccacatgctgcactaatcttccatcttctacgactacacctctctattctatttgtaattgtaaactacaatgccccctaaatgagtatttccaaagaattcaaatctattttattttagcatatgtataaaaaaaatttagtttgatttttttaatagtatatattatagttatttaaaattattttaatttacaatatcaaaaacaaaatttatatattttgttatatatacttatacgcaatatgaaaagtaactattttgttaaataattacaatatacctgattatgaagaagaataaaattaaaacaaaaaatctaaatgctaaaataaataagaaatctaccataacgataatttaagggactactacaaaatttttcatgtatgtaaatagatgtaaacttatatgaaaatgcgtgtcatattagtccgacttacattttttaggctttttaaaatacgggtcatagcgtgtctggccataagaaaatatagacaattttataggttaggctcgggacagccataagtctaataatttcgtgcaatgctcggattcttgtcatgctttatttggaccggcccattttttaatagatcaacttattttttaatatgagtatgaattcgtgttctatatttttacatttttattataattgatgaactaaatattaaattataggtatattttataattttaattatttttatatttttttcaataacacaatcatataaaaaaataactatatattcttataggttgaatattactattattttaattgataaataaatatttgtcattgttacttttattaaattattgtactttttaatgtgtcatactttcaagcttacgtgtcggtgtcgtgctttcaacaagaccgaccctgagggtagacaagacagttgtacgccttaggcctctctctctctctctctc

SEQ ID NO: 2771 - DNA, 1872 bp, Cannabis sativa
tgaacttcagcagaaagacttgcagaaggatcaacagatgtaggagctgcagaagatggaaaaactatgggtaaatccccctgtacaccagcagtaactgactctccgtggacagcagaactactgtcaacaccttgatcagcagcaataggaaccttctcctgaataatttgccatcaaaaacatgacacatacaaactctaaaagtgaagtctttatgattgttaccctaatcttttagagaatgagcataatatgaatcttcaattttgtcttttaaaattcttataataagtttggaaacacgtgttggtgtagtgaacctagttattggcgttcatcagaatatcatatagatgttattataaatctaacatatttgatgaaatatgaattgtaatgttctaggaacataagtttgaagaagctttcattgttttttgttataatttagtcatcttaatcttgtttcaaaaaaaaaaaaaaaaaagaaatttactggaagttatctttttttttttcttatgataatgattgtttggttgtgattctcaaggtgggatgatgatctagctgaaaaactggagtatgattctgctggcaatattaagactcaagttgtcaggtctccatttgttcaggtatttttctttagtccttccatacaaggttcttgtcttagtttaaaggtaaacctgaaaaatggaatgattcactctaatacaacaaccaagagcacagtctatctcgaggtctcgcctggattttaatgtagttttgccaaggtgacctacatccatgggtttcaagagattgtctcactaaccaaactgaaagttgcattctctctgctctctttatgtctcagcgtttatcccactcaattttctcattgaacaatacaaaaatactgatgatctccctcctttttggtctttcagattccacttggagtaacagaagacagacttattgggtctgttgatgttgaggagtctgtaaaatcaggaacgaccattttccagcctggccttcttgctgaagctcatagaggcgttctatatgttgatgaaatcaatctcttggatgagggtattagtaatttgcttcttaatgtattgactgaaggagttaatattgtggaaagagagggtatcagctttcgacacccttgtaaaccactcttgattgctacatataatccggaagagggtgctgtgcgtgagcatttattagatcggattgcaatcaacttgaggtgcacacctttcagcctaaagaatagattctcatttttaacttcttacataaattctctttctactaaagacacacttcttctgcagtgcagatcttccaatgagttttgacgatcgtgttgcagctgttggaattgcaactcaattccaggaatttagtaataaagtttataagatggttgaggaggaaacagaggttgccaaaactcaggtattcataaaataaactagtggttttgcattttagattgtggactagctcaattcgacaatggttgtgacactatttttaagcaactggagtactaggcttacttcaaaccaataatgactttatcaattataattttaacttgtaattatatatgttgcaagcacttggtttcttcattcgtttctcttcctatttcaactttatcacaccgcaacaataattcatttcaaataaagaataactgattgtagatgttttcactctgcagatcattttggcaagggagtatttaaaagatgttaccatcagtaaggaccaattaaaatatcttgttatggaagcaattcgaggcggatgtcaggttcttacattaattcctcctccctcctccttcccgca

SEQ ID NO: 2772 - DNA, 1660 bp, Cannabis sativa
attaaattaaatattttttttatacgtatgaattttttaatttattattttatttattttaatttattgttagagatataaaataataataatttaatttattttgttgttcatttaaaaaataactaattaaaaaaaatgcactatatatgagcaaaatataatgagtagtaccccgtacttcccttcccttttgtttcacctttcattataagccgatcgaagttgaagaacaagaggattcagtagacaacgtcatatcatcattagtggcaaaacaactgagatggtatatatatcaaacttagtccttgccttaaaacctctatatacatggacattattgtattatgaaaaatgatcttttttttttaggaaaatgaaaaatgaactttatattaatatagctataatttcctcctccattattgattgtttatagagttttgctcctcaaattttattatttttttaaccagaatttctctccattttatttttgtttggctaaaaatttccctcaactcaactcacaccactagctacattatttctctctattaagaaatccaaatacgtaccttagctaactcaactctcatcactagctactataattttttcaatttatatatgctccatccaattatatataatattgcttgtgactattttatgtttgggcatttagaaagtattgaaatggcttttttcactattttagtgtaatttttatatactacttaaaattagtgaataaaattaaagatatttaattaatattcatctgcattttctatacatataattatataacttgttctatattttaaaggtaaccattaatattgatgtctataaaaaaaaattattaagtcattgatttaagattaacaactgatcaaaatacaaatgacagaaagcttttagaaaagggttggagtttttactttttaatttactgcctcgaatgaaggtaaggtaaatagatagatcgtagagagttgtaatgtatcaagttttctatcaagtttcaactcaataagtcaatcacccacatatatatataattaatattaattataattggatgggaaaaaatgatgtgtttgaattaattatttagtctattaattaattaatattatatattgatgcaatatctcacaatgtgacgtaattaattgtatatagtgtccacggttgtatatatatacgttagaattatattatatatatgatcaatagttccagatattcgtacaaaaattacatcattattatttttgtgtaattttttttttgatagattatttttgtgtagtttatccattttctctcatcatatatatcagaatgttttaatttataagtactagagttttatgatgattttcttttttctttcaagatcaagagtatatagtatagtactagatcgatatataggactagctagatattatgattgaaaccccatttcatataaaaaggctatacattttttagacataacgtaagtaattacatcttcatgaattgaaattttactgttatatgttaaagaagaattttatatattattccccagtaaaaaagactagtactagtatagtactgaatcatcgtttatactgtaggagaatttgaccaaaaaaaa

SEQ ID NO: 2773 - DNA, 1357 bp, Cannabis sativa
aaaccacaacagagggaatagagccaagagagagataaatcaaggggccataggtgtttgagattttttggaaagattggtgtggtattgggccaagtaggtgaaggtgtccaatgacaggaaaagcaaatgggctcggtggaagtcgaaccatggttcgactttttgtcaacatggctcgaacaagcatggtagagactaaccagacaaggaaaagaatggtgtaaccttggaggctttccatgactgtaactctgctcattttacttaagatgtaaaaatgaaaagtatgaaattagtaaaaaagtattcaaaccaatgcattttaaattgttgtttcaatgtcaaataattttggtgcattgtttttcttttttctttttttttttttattctgacaagataccaaaataaagacaaaaaaaaaaataccacatcttttgtacagacacatattttatatacatttgtgataagtacaaaattatgtgtgcaatttgtagtgctttgtactcaccgaagcatggacaacagcatcatgtttcattaccttacttgacatatatataatttaattttcattactattagatgcaaaatatgtttctcaaacacaataagaatagcacacaacactgaagcaaataatttgtgccaaataaatagtactggccatataattaatgaaactcaaagctatatatattatcaatatgaaatcaaacactttaactaataaaacttcattcaggagttttatcaaacaggtggtaggtacatttcttataaagaatattattttcaataattataagattttagtaactttaattacatgtgtctatattaactactcctattgtactaacttatctcgaaattatcacatcataaacaaagaaagcattacaataagaatagcacacaacataaatagtattgtattggacatataattaatgcaactcaaagctatatatatatattatgaataccaaatcaaacactttaacaaataaaacttcattcaaacaaacctgtgatacggtgaggatgctatttgggagaattgagacaagaaggttgtttttgaggagggcagagaagaagtcaaaacccaattctctaacattagattcaaataacaaagattggacacgaccctactttatacaaaattacaaactgtgtatgttgtacaagttgtatggaattaatataaaccattttgtaattatcgtgaatgttaagggcatttgggagttttgcattgaataaattctgaaactttccaacaataaagattgtacacctaagaaatcgaccccgattctccaactgtgtaatttcacaaaaa

SEQ ID NO: 2774 - DNA, 815 bp, Cannabis sativa
atgtgatcatagcaagtaatgacatggcagttgtacaaaacctaaaattcaggttaaacaacaaattcaaactgaaagaccttggtgaactcaagtattttcttagcctagaagctgttagaaatgacaaaggtatttttttttttgtctcaaatatactatgctcttcaacttttagaagaccttggagagttaggctgcaaatcttctagcaccctaatggaagtgaatctgaagcttagttaagacattgaagatgcccttgctgatccaaaattgtataggcaaaccattggtaagttacagtacattaccataactaggccaaacttagcctatatagtaaacaaattgagccaattttcggtcacatctagcctcagacacatgaatgcaacacaaagagaattacaatatgttagaggtacacctgtacaaggtctgttctatcctacaaactctgaaatcaagctctaagggtacaaatgctgattgggctacatgtgtggacacaaggagatcaacaataggattttatattttctgagacaaatcattggtttcctggaagagcaagaaataaaccactgtctcgagatcctcagctgaagctgaatatagagccatgtctactactacatgtgagctggtttggcttctgtctatactaaaggaactaataatcgagcatatacaggctctgcattattgcattgacaataaggaagctcaacaaatagctgcaaatcctatctttcacgaaaggaccaagcatattaaaattgattgtcgcctagtaagagacaaggttcaag

SEQ ID NO: 2775 - DNA, 1183 bp, Cannabis sativa
  modified_base (936)..(936): a, c, t, g, unknown or other
aaaaagaccccccccgccaaaaaaaaaaaaagaaaagaccaagtcttaccttggtaccaagtccaattgttttcttctctgattcaacaggtgcatcatagtcgattggtccaaattctttttccccatctgcctttttctgttcaagggctgctctgagaaggataattattgaaaagaacatcagccaatcaaccacaattgttagcattgtatgtttccagagaaggaacccaaaaattattgtcaaaatgacctaggtacacttttcaataaataacagttcaagataattttacttttaaggaatgttttcaatgcaaagtatctctggaacataagcaatgctacttcaacagtgcaataaggtcaatatggcaagttaatcgacatcaatgatgattgaagtgctctttaggaacgtgcaaagtgttccactggagaaagaaacaacaaatactaaaccttttaactgctttcagcttctcctcaaaatcaaggtctttcaaagtagtgttgttgttagatttcccaccaaatctagaactcacaccaggcgcttctgaaaaagaaaattacatgtaatgattaacagaacccatactccaaataaactaagaccatctccaatgggagatgtaaaaattgtgctatatttagcacaaaaaagtagttttgtggtaaatttacaccaaattttagctttgtactccaatgcacaattgcaaaatttaatatctaattaatgttttgttataaaaaaaacaaaatctaataactataatcaattttattattattttaatatgtaagacaataaaaaataatataaatgtttcataatttaatgtgatagttaaatatactaacaaaataatagaaatgacataaaatgtaattgaaaaagtagtacatttattgtggtgtaaattttanatcatagcaaatattgtgccaaatttaatacaaaatttgctatgtaccaaatttacatcattttttggcacaccaatagagcacactttttgttaaattttgttaaatgaactatattttaacttttcaccacttatttacaccttcggagatgctctaatacatagctaaaagcaccgtaccagatgtgatgtcaacagtttgtgaatgctctcttccttttactatattaatcaaattgttacat

SEQ ID NO: 2776 - DNA, 1701 bp, Cannabis sativa
aacttgccaaaaaggactttacactgtcaaaactctattactgtgaaaacaaacaaaggaattatatataagtcccagagttagatctgtaagatcgctagttgcatcgaaccagtgagaaaaccaaaagaaaaatataaagaaatataaatactaacaatactaagattacttgtataatgaccgcatattaaatataaaaaattaataattaattagaattaaaattaagtatgaaataatatctgcaattatagataaatacccatttatagaaaataggtaattatgatataaatatttaatttagaaaatgtacaatttatgtctatcatatgtatatgagttagattattaaatgtgataattatggataatagtggaaatttaacggattggaataaaagtcacatcggtattattttggcaatttagtggtgtcgtggattattagtttatgaaaacttaaaaaatatttgttagtgtgggttaatttagaaaagataattatgcccttaacatatttattatggagatgttagcttgagggggcagttagagttccacattactaaggtgtagaaatataacaccatatataagatgtataggctactcatattttcaattagttttgaggtataactccatgcattttataattctaacatggtatcagaactaaactaaaactctaacgagtaactgatctaaatccaaaaatcggtccaaaaaaaaagtcactgtgaactaaaagagtcatttgtgatcgagtcgtgcaagattggtgagcaaaaactagccaacatcttgaggggagatgttagagtcccacattgctaaggtgtagaaatataacaccatacataagatacatgagctgctcctcccattgccaattgattttgagatgaaccccatgcatcttataattctaacaaaagtattttagtgatctgttaaataaaatgaagataaacttcattaacctttgtaaaattgacaagaagcacttagaatagtatttctttttctcctttgttctcttcggccaacccaaaccaaaagtaccaaaacctccaaaaaatttatactagagtattttctatagtggttgaagagattgaagctagcatttggatttaattttggaggggaacagctcttgatggtttaaacttagtttttaaggcaagccatatcttgcactttgtttcatcaatttaattaggttttgacatgtttagtgaatttatagctttggttagattttattgagttgggtttgagtttcttggggtgaattatgaattataattgagtagggttgttattttaaagttagaaactaccttaaaattttctaattttaagctcaaagctctaatggaaacttaagattttatggattagattatgaattatgatattatattgataaccaataaaagattagttagtttgttggttaaaagttttcttttgtgtcaaaacgtaatgaattctataataatagaattcttgattgcattttgtttgttcagacactatataataaaacgttccttgctaagaatgattaagcaagtattcttagtctgaggcttttcttctctctctcttttcattttctaaatactctgttttgagttctgttgttacatggtattggagcaccttgatgttggaatttattttacc

SEQ ID NO: 2777 - DNA, 1087 bp, Cannabis sativa
tagatctaaaggagccaaagtagatgttgaccttcattgggtgtcacagatatcgactttttccatatgctaggtcaccaaatgatagttatagttttcttgacagaatcaaatctcataccctacattcgatcatggtagtgcgcacatcaccaccctttctttaccagatgaagaatacacacttctacccataaaggagcaaactttgagtgacacttgtcttttgcttttaaaggttaaacctttgcgtgacatggtctaaatagtacaaagtggttccattatacgactgctacaagcacgggcataatgctacccacaggttcaaccaatcagctctacattacgtgtagtttaccccaagatttaagtagaaatcttaggcgggtcatggatctatccatatctgccactcagcatatatatacccctttattgccatgcgaaggagtaggaccaagaaagttatagctaaaactctagaagaattgcccatagtcttcttctccttcaaagagaaagtaaaggttaagagttaacgtttcttacaaaatactataaattcatcaatactaccattttagactaatagactgactcgtgaaataaggttctttaacacctaaatcacataaaaatcttcctctcttcatcttagcaatcttttactccataactcttaaatattttagtttccaaaaatctttgtaaatattgtagtgctttcattgagagctgaagaaagataaaaaccattgttaccacaaggtattcacacaaaaacaactcacaaaaaggctcttgaaggtggccttgagacggttatggaggaagtgaacgccctatcatcggagcacgcctaaccaagcgacgtgagagacggaggcacatcaaacatgaacgatcaagaggaaggcctagacaaccaacatgaccatgttggccgtgacaagaatgctgagaactatgaagaggaagaatatggcaaagacatttatgtcaatgatagattttacaaagatgagtaccactatgagcacgactctgaagtaacaagagtttcttgggatttgtttgaaactca

SEQ ID NO: 2778 - DNA, 2893 bp, Cannabis sativa
tcaatggtttattctgctaattcatgtgagatattaagaaagtgaaaaatatttacattaatctatgcttatctttgttaaacagaggacctgtgcaatatgtctgggcaccatgaaacctggtcagggccatgccattttcactgcagaatgctcacattcatttcacttccactgcattacctcgaatgtaaaacacgggaaccaaatatgtccagtttgtcgggctaaatggaaagaagtgccctttcagaacccttctactctatccaatggaccctctagaattaaccctgctccgtggcctcaagatgatccatggatgactgttgtacggcgtcttccttctgtaaggatggatacaccccgacagattgcttcactgttccatgctcccgagccagtcgtttttgaagatgatgaagtattagatcaacaacccgagattaatgacagagtaacatctaatgtagatgctgttgttgctgttgctaataacaatcgaaatcatactgtagaagtcaagacatatcctgaggttttagctgttccaagattatctcctcacaataacttcactgtgttgattcaccttaaggctcctcttatttcaagcccgaatagtggtaatccaatggaaatgcctcctccgacatctcaagatcctcgtgctccagttgaccttgtcacggtgcttgatgttagtggcagcatggctggaaccaagcttgctttgttgaaacgagctatgggatttgttgtgcagaatctcggtccctctgaccgactttctgtcattgctttctcctcaacagctcgtcgtctctttcctcttcgtcgtatgactgaaagtggaaggcagcaggcattacaagctgttaattccttagtttcaaatggtgggacgaatatcgctgaagcccttagaaaaggcgcgaaagtgcttgtagatcgcaagtgtaagaacccggtttgcagtatcatactactctctgatggccaagatacatatactgtcagtggtcccattgggaacaatcagcggtcgaactatcagtctcttcttcctatctcgattcatcgaaacaatggtgctggcttgcaggttccagttcacgcgtttggatttggttctgatcacgatgcttcctcgatgcacacgatctctgagaattctggaggaacattttcgttcatagaagctgagagcgtgattcaagacgcatttgcacaatgcattggtgggctgctgagtgtggtagtacaagagcttcgggttgaagttgaatgtgttcatcctcattcccgattaagttctataaaaggcggtagttatcagacaacaatagtggctgatgcaagaactggttccatcaaagttggagacttgtatgctgaagaagaaagggattttctagtgtcactgaatgttccagtagacgaatcttcagagacttcattgctaacagtaagatgtatttacaaagatccaatcaccaaagaaatggtttcacaagaagctaataacttgaagatccaaagaccagaagtggccagacaacagctagtttcaattgaagtagacaggcagaggaatagggtgcgagctgcagaggcaatggccgaggctagagctgcagccgaaaatggtgatttaactgctgcagtctcggtccttgagagctgtcgtagagctttatccgaaactgtctctatgcaaacaggtgaccggttatgtgtagcactttgtgctgaactaaaagagatgcaagaaagaatggcgaatcgtcgtgtgtacgaggaatcaggacgagcatacgtgttatcaggattaagctcacactcatggcaaagggcaacagcaagaggcgattcaacagacagtacaagccttgttcaaagttaccaaaccccatctatgacagacatggtaaaccggtctcaaaccatggttttcggtaaccctcctcagagaagcctacaacctactcattcatttccaagccgaactcggccaaggtaaaatcaaagaagctgtctttttgaaaagagaaaaaaaaaaacaactactcaaaccttaattcaattacattcctatattaaatatagatggacaatttagtttcattaaaatgttaaatttttgttgtggtattttggaaagtttgggggggtataagaggagagatagagagagttttggtatatttgtccttgtttttggtaatgtatatgaataagaaattgttgggaaaacaaaggtgaagataattggggtgtggtgtagtaaacaattgtgcaaaaggaagagaaattgttattttggattttgtacagaaaccaactatttatttttcttatttatttttttcttaatattgttattattttttggggaattactttatatactatttttttaattttttttttcaaatttacagtttgagtttttaaagtggttgcaacgctagttgcaataggggtttttatgcgattttttattacaatttaggttgcagcgctagttgcaatagagatttcttatgtaaaattttgtaaaaatgcaagaaaataatagctctacgattgattagtgatattttctaaaagaaaaatgctacaccagtagtgctaatcaccttcttacgtgtcaatatcgctattagtgtaatttagtattgggtctcatcgtaagacgacacgttttaaaagtgctaggcactattggtgcccaatagcaatgaatgatctttctaaaactattacattaaattatatgagacttctccgatacttaattacattaaaaataatattatacttagtacaatactagacaccaataatacaatacgatgtaagtgtcttttttttagttttttttttattt

SEQ ID NO: 2779 - DNA, 1503 bp, Cannabis sativa
aatatttactcaatctctaacaaagtttttgtttgtttgtttgtatgctaagtttttaaattgctagatgtatagacttcatagaacataatatatttttttattttttgtgcaaggtatagattcataatatataataaagtaccaaattgtataatgaataataataaatatttaattaacagaatattagacattctaggtggcttagtggaagtcgtacctaagccataataaatataaatcttatattatatattaaacaataaacaatatattaatatcttaatatacattaatgggtaacacattgtctccactccacccattttttaattttaatttcttatcttaagatttaatgctaaatagatatttttggcaattaattgcagttcatttaattcatttttcttttctttcttaaatcttatttatttgactttttttttttctaattatttttgagtttaggaagttgcggcaaataataataaagtgaagagttgctaactattcctttttttcttttcggaaattattcctatttgtataataaattattataataacattgggatcgataataagaatttccaatacaaacacataaaataaaagcaattaataatagatacaattataaaagcttatgctttttaataaacaattatcatttaatcaatcaatcaatctaattggcactctatcttactataaagaactttatcaactcaacaatcttaacttttaattaacaaaataaaaaaataaaaaatgcacatgagaatcagattttactatcaccccttctaatcttttggaaataaagtgaaatcaattaaaaataataatgtctaaattttgtgcatgtgattgtgagagatgagatcccaagaataataacaaaggtgccactttttcactataatggaataatctttacatcaatataaatagggaatatattttcatctttaaacattattttactagattttagacaaaaaaaataaataaataaaaatatatcaattacatttttttattacaaaatgatcagcatcacaacaataagttaatatcaagaagatatagcaatttgcatgtacacaaattatttcaaatcctaagaacattcttagcaaaaccataattcacaatatatttattaacattttacataaaaatagaattaaaattaattaaacattattgtaggtaatggggaatatagtaagatcactaatttatgtagaaaaaaaaaaactaaacggcaccacttgtagtcaaattatactattatttttttatgtgttctattgtctcaaccaatacaattaagacaaataatttaaaatgttcttggtacatcaattagaataaaaaactataatattttacatgggttgttttttattaaggtgaaaatccacaataattttttattaatcagatacaataatgttttgagtcatcatactagtagtaatatattcattt

SEQ ID NO: 2780 - DNA, 1290 bp, Cannabis sativa
taaatcatccatatgtgatataccaaaataactatagatacactatacctcatagtgacacaatattcaaaattttaatatatgctcttggtatacaaataaaacttgggaataataaattgagtgttagtttgtttaggggattataaaatgtaaggaccattttcttggcaagtgaagtgaaattgcatatcatactttgaaaattaaaatggtcccaccataaaaaacttagagattctggacggtttgttttattggctttatcaacctttgaatctctcaccaatttgttactaaagttttttcttattaaaggattcattcataaacagaaagattacgaaggattataagtcaagttgtaaaacttgaccccaatttacataatactaactttgttcattaaaatttgattggttaaacaatgaactacttgattagcttttcgatacacaaatgatattctaacaacattaacatataataataatcttcaaatagtctcaagcacactattaaggtggcatttaattaggaggaatgaagacataggaatgagaataggaatataaatggaatggaataaaatttaaaatacataaaaaaattgatatgcattagaatgatctttccttccattttaaaatggaattgtaattccaccaaaatagtagaaaggtcaatcaattggaatgacattccaatactttaatatgcagccaaacaaatgaatggaatagagattgtttcctttcctttctatttcatttcattacttccaaccaaacggtacctaacttccttacaactttcctcctttgtttggattaattggatagcttcaagacaatttaatctttgtggggcttaagattggtcaagattctcgaacttttgttccaaacaaacttgatatatggatccaattacatggaatgactatcagatttacactacaaaaaatgttatttttaccatgacaaaaatacacttaacgcaccagcatacttttacgggcacataattgtgccagtaaaaggtgtcaacaattcttggtcagtaaaagacctttcgccggcgtaattcatatatgtgccagcaaaaatattttttaccagcgataataagtattgataaaataaaaattaaaaattaattatgtataacaacatacataaaaattattgaagtaactattagaaaacctaaatcataaatattttccaaaaaattaaaaaaaaaatattatgtaaaataatttttcttaaattaattaggtacaattag

SEQ ID NO: 2781 - DNA, 2155 bp, Cannabis sativa
cacaagaaattctgttaaataggcatgtattatataggtaagatatataattatttccttatccttgtcgacaactaagggttggttattccctgccttttaggtttttggagcacaaatgacttgagtttggggttttatggagacagagctgaagtcagaatcactgggaataaattcatccaatgacatgttgggaaagttgacgatggagaagcgtgattgctccttcgtttctagttcaacgaagtataagaggcgtaaagtttttgcaattcgtgattttccagaagggtgtggaaccttagcccaacaacaacatgttagcttgagccaaactgaagaaacagaggaaacttgttctgatacccttcaaaaatcaatatgtaaggaaggaagcagtgatgactcaaaaaatgtaacttctgatttggggaaggatttgagtcaggtaagcgtttctactctaaaggaagagaatggtcctgttcttttggataataaaagtccattaatcgccgaaaacaacgacttagtttatcctgattcgactgttaatgagaattgtaaggaaggaagcaatgatggcttaaatgatggaacttctgatttagcaaaagaattacatcatgtgggtgttgatgctccaatggaagataccggtctagttcttttggaggataactttatgcctccaaatgaaaacacagacaccacttgcacagatacacttctgaaatccaatagtaaggaaacaagcagtgatggcctaaagaatgaagcttctgatttggtgaaagatttgcatctggtgggtaatactactccaaagaaatattcaagtcctgtttgttcggatggtaactctcttttagctactgaagacatagacacaccttgtatggatgctttgttggattcaaattgtaaggaaggaagcagtgatggcctaaaaaatgaaacatctcttttagctacagaagacatagacacaccttgtatggatactttgttggattcaaattgtaagcaaggaagcagtgatggcctaaaaaatggaacatctcttttagttactgaagacatagacactccttgtatggatactttgttggaatcaaattgtaaggaaggaagcagtgatggcctaaaaaatggaacatctgattcggcaaaaggtgtacaaatgaatggcctcagatctgtccctaatggaaatggttttgtgaaaacaatgtctaggaattatcctcctcggaggagagtttcagccatccgagacttccctaaattttgtggaataaatgcttctcctcgtagtaaggagaagcctttggaagagcttgcttccttggaaaacataagttctcaagagaagtttgaatctgaagcaaatgaaaaagttatgtcagagacagtgaagaaaattgcaggtacagtaggggatgctgaagatggagatttgtttagaaataaatcggttttgaatgatatgaaagtaaccagggacacaattaaaccaaaagattctgtggatgtactctcttctgtgaagaaccgaagttcttgtcaagaggcatctgaactagaaatggatgataaattcttgacagaaatagttaatgctgctgtgactactgctttgaaagttggaagcaaggacttggtacatggagattctgacaatatagaattggaagggaatggttctaaagtagccagaaatgaggttagatctgaaccagaggagaatgctgtagaagaaaagaggaataagaataaatgtgtagtttcatctgagagaatagaggaaaaggggaaaaaggaaaatagtaatgagcctccttttgaagaagcgttatactggtgggaccatgagtttgagacagtgcttgagaaagacgatggcgacgctgaaggttcagaagaaaacttgtgtcaggagatggttgtttactctgaaggccaagctccaaatgaaatgccttcagttacttctgagaatcagttgcaagcagtaaatcttacatcagacagggtagtagtgcaaggtttgatggctgcatcacattgtccttggaggcggggaaagagttctggcatgactaagcctgctggtaggagtggaatcaaaagtaagaaaattgataacata

SEQ ID NO: 2782 - DNA, 2785 bp, Cannabis sativa
accgccttgatcagcccttggcaatccgagtatatgcgccccctggtcagaccgagacgtatcatcacctccattcccacactaaccgcttccaactcccccgcaagcacagaattagccacaattttttgcgcaaagagagcctgcagttggttatcgctgttcttgatcacaataccaatagccgccccctgagcagagaaagctgcgtccaccattacccgaacccctccatccacagaattagatagagtgtcgacaaccagagaaggggaattagaaggggctagaatacctcctttcgaatccctctccaaaaacagagtggccttatcccgaatcctcttagccatgatctcaaacgggggcaaaacattcgaatgaaagacttcattcctgaaaaaccagaccatataaaacatgcatgccgcaaaacatttgaattcttggacttcaaagtcattaagaaaagacagagccggggccccaaaaatccattcaacaatttttctgccagagctaaaatctcaagtctcaattctaatattccacttagacatgaaccaaagttttttagttacctcacacctaccaaatagatggagcatagtattacccgaagcacacttgcagagagaacattcgcctggtaagctatcaaaaatgacagctaaccgagagccaattgggattgcttcatgacaaagcttccatatgaacaattgaagcctagggtgtgggagatcattccagatgtgtttaacaactgcatcaccactttgaaatcggttagcattcaaggcccaataggccgatttaagtgaaaaaaaacctttggggttcgctgtccatacaagagtatcctcctgctcaagctccgtaggccttatagtttgcaacttagctctggccgaaagagtgaaagcacgaaaaacaccacgccaatcccaatctgtgccattatcagcaatgaaatccttcagatggattggctccgagatcaaaggattaaaatcccctgcattcaacataaagtcatcaaataaaatccagttgcagtgccataaatttttctctgaatttatgctaaccctccagccagagttcgcgcccactaggtctcttgccccccaaattcctttggccacaaccgaagcattccccgccagcttagattcaaaaaacgtggagttagggaagtatctatctttcaacacgttcacccataattctccaccttccctagccaggatccaggccaatttagcttgaaagcaagaattaatgtctttggcccgtctaaatcccaaccccccacaactttttggcttacaaagcttttcccaagccactagagagaggtatctgcccccttccgaatcacctttccaccagaagcgcctcgccattttatccaactccgcctgtatccccgcaggcaatttgaaaaccgccatggaataagaaggtatggtctgaataacactttggaccagaacagtgcgagccgattgggatagaagtctggccttccacccttctaatttcttagccaccttatcaaccacataggagaaatccttattgcaattttgtcttaggaatagaggattccccaagaacttttcattaggtcccatgatctcaaagctgaggaagtcacatatctccattctcaaagcctcagggcaattgtccgagaaagtaactctggatttcctttcattcagacattgtcctgaccaactacaatacttgttgatacaatccaagaggaccgacacagaatagacatccgccttagaaaagagcagagtgtcatcctcatacattaggtgggaaattgacggcccatttcgagaaaccttgactcccgctatgtgctcttccatctcttgtttaaacaggaaacgagaaagcacctcgaacaaagaatgaatatatacggtgatagagggtctccttggcagatgcctctccctggagtaaacgttttagtcagccccccattgagtaagatctggaatctgttcgattttaaacaaaacataatcaacttcacgaactccctatcaaagccattagcaagaaacacggcctcaacaaagctccactcaaggcgatcataagcctttgacatatcacacttcatcccaatatagccctgtcttcccttggttctcttgaaataattgattacttcatttgctatgatagagttctcagctatccatcggccttggacgaaggcagattgattaggggagataagtttactcaaaacttttcgtaatctattagccaggagcttagagatcaccttgtaggtcgtattacacaagcttatcgggcgataatcttcaaaagcagaagccgaatttttcttaggaatgagcaccaagaaagttcagtttaattcagtcacaaatcgcccaatgcgaaagaactcttgcaccgtgtgaaccacatcatttcccacagttccccaataatctttgaaaaatttccctgggaagccatccagccccggggccttgagaggagaaagctcccagaccaccttcttgacttcatccgcagagggtatgcacataagactatgattctcctcctgggtaatcacactaggaatgaggtcaaaaagctcctcgtggatctcggggttggtcgattggaagacttggctaaagctagcccttaacgaggcttcaatagcaggccgagtatccaaccaagatcctgaagcatcttgtagagcccatatgaaattacgtttccttcgaac

SEQ ID NO: 2783 - DNA, 2389 bp, Cannabis sativa
acaactgatttgaagaagaaactgaaatatccagacaaggtacattacactgtcaaactaacatccattttacagtcagttcgcatgtaccgaccaaaataaacgaagttggaacatcttcaaaaatattccttaaatgttcaaacaatataagtatcgatcaagtccctcattttgtgagattaattcacactgacagaagaacctaatcatcatcaatgtgcatcatttatctagtcatctaaccaaattagagttccccatatatataatctaaatataaatgatacataatcatgaacttcaaaaaaaaaaatatgtctcttttaggtaaaagacataccaaacgaaacaattgaacaatgctaaagtaagtcttgattaagaaacatcatgggaattaaagaagatgctaatgcagtactacacttaaaagtcttatatatttaggtaattaaatcacttacaaagttacaatctatataacagcagcattattaattggtctagaaatggtaacatttaacaaagtattattatctgtatctgtttctttggtaaccaattcaaagacacaagaatgtccaggctggaaatggttctccctagcaaatctacgccatccaccacataaaaccagtccacatccattactagccaaattaacatcccacaagttctttccaacctgcaatgttacaactcgaggcttcccttgtaaataagtactcgcaaaatgctttggaatacactgcagtaaagtaatttcatatagaccaaaataaactaacaataatgagagtgagaagataggccataccaatatttgtataattaattcacacacatatatatgtaccaaaacattacatgtgagatcatacccttggttgaaaaacagactcccccaatacagctttgaaactgcgattagattgttcatgggttgctacttcagaaaatttgtcaccccttgaagatgaaggcgcgccttgactatcatggctgcttgtgtgatctttagattcggatacaaacttcacatttccttcaatataagatacaaacaaggtacgatattagcatactaaaatgaaattctttcgttcaacattcaatcccatgtatatgttgctactaaccttcggattgttggttgttttgataacattgtgtcactcggttgatgaaaattttgaatatcatttcatttttattagtcagttcaaatatacaaacatcgttcactttcaacctattctcctcagcgaattccagccaatctcttttcgagaatgcagctcttggtgagccatttaaagttgttgtctgacgttttacgacccaagtcctcttctcatgaggaacataaagagtaacatcaagatcagatttttcatggacattctctctccaaaactctgctggtaaggcctaaaaccattaaacaaagtagtgaaaaggaaatacatactacatattcatgtaaagaaaagtggttaagaaccatttcaaaggaaaaatgattaattaccatgtcatattgatggtgcacatgtgtcctttgtaagacaatctgaaaatatgggttttgggatgtgaagtttttagtcctagataaagcttcatctttttcttctacagtcattggtataaaacgttctcctactctactaccaccccttttggcactagccttaatccttcctgtatttatgataataatgaacaagaaaacataatgttaattaagcactaacatgtaattatacataaacaaaaaacaaacctgttttgttgacagactcaaaacactctgaatctcctatgttcacttgatccttatgtggtgcaagtttcttctttcttttcatgttgaagttttcatgagagtcaagatcttgagcttctttttccctcttgggcagctcatcaatatgggtgggattcaagttattagaatgtttggaagtggtaactggataacatatctcagaatcatttacatcaataatgatcacactaaatttagattgaccttcacatctgaaaaacaaggaatatccacattgtatggagtaatgccttgcaaagtttggccaaacttcacccaaccaaatatgaccatcacatttggtcaatttgattttccatgctccaccaccagggacttttaggactattgggtttgatgtatcaatattactaccatatttcaccatgaactctctcggaattttctatagtgcaagaaagaaatgaaagacaaatgttagctttaatactacattattaaagtgttaattagttcaactcatttacaaaccactttaaatctagaatatatatatacattcttccaagttataagtagagagagagagagaga

SEQ ID NO: 2784 - DNA, 1427 bp, Cannabis sativa
gagagaagttctttattattgaatcaatgaatgaatacaaaggagagaagccaatatataagcctcgatacagaacaaaaaagataacaaccaagccaagaaattaactgaaaaacaacaaccttaactaactaatggtctaatcataactgtcactaacttcctcaacatgccccctcaagctgcacgggaagaattccagtgaaagcttgctatagagaaagttgaacttgggaaatgttaaggctttggtaaacatgtcagctggttgttcttcggttggaatgtaagagacatcaatcttgttctgtagaactaactctcgaacaaaatgaacatcaacctcgatgtgtttcgttctggagtgaaaaacagggttagaagctagcatttgaccaccctgattatcacactagattactggtttgctgaacaatttgatcccagttcatgtagaacagaagtgatccaaacggcctctgtggctgtggtagaaagggctctatactcgctcttagtgctggagcaggatactgctttttgttcttagagccccaggagatgagattaccaccaagctgaacacagaaaccagtcatagattttctgtcttggatatcacatgcccagtcagcatcagagaagccctcaagcacaaatcgaggtgctggtttaaacacaagacctttgttgagtgtgccctttatgtacctaaggatccttttacatgcacaccagtgagcaatggtgggggactgcatgtactgacttaatttgtttactgcaaaagacagatccggtcttgtgagtgttagatattgcaaggagccaatggtgcttctgtagagggtgtgatcatcgaacataattggtaccaattttgtgtgcttcaaaaccaagaaaataattgacatggcctagtgttttcagagcaaacttgctattgagattgaaaatcacttgctgtatatcctttgatttgggaccaataatgaggatatcgtctacatagacaaggacaagtaggagatgaccattgttattcttaaagaagagggaactatcagaaacagaattatgaaaatcccaagacagcagagcctgtttcaacttatcataccaggcccgtggggcttgtttaagcccatatagagctttatgcagtttacacacatgattgggaaagttggggtcttcaaacccttgaggttgatgtatgtaaacagtttcctttaactcaccatttaagaatgcattgtcaacatctatttgctgaatttctatccaaaagtaacaacaaaggtaaacataagtcgaattgtagtagcctttaccacagggctgaatgtatcaaaataatcaatgccaggagtttgttgaaacccttgggcccccagccgagccttgaaccgattgactgagccatc

SEQ ID NO: 2785 - DNA, 881 bp, Cannabis sativa
cctgaactgataccgattttgagttgttgccaaagggggcaatttcgccaatacccgggaggtaaactaggggaagttgggtaatgaccagctccgaattagagtctccggtgttctcatcctcgtctgtaacgatccgtttcttcccagggtattgccttctgcattctctgatttctgcctcttcgccatttctaatggccttatggaccttcatctgattcctaaggatgggatcatggcataatcgtttttgaaggcaccaatcttggaaccattttgcaaggggggatgtgaatgtagatttctccactgcatcatttttaagccaaactccaaacatagggtagtaattcccattagcatccttgatgactgttggagatttaaagcacacactctgttcatgggttagaatcccacacttaaagcacagtttcggtaatcgttcatatttatactggagccacaagtccttcagacgctgccttcttaggaagaaccccgagaaaattggtttattaatgtcaattgttgctcggaatcgaagggtgctcattccaattgcatcttcgatactgggaggaagttcatacacgggggatgccttggaagctaattctttaaggttcgaaagattccagtaaaacgggggaatactttcaatctgcacccagattggggttttgtcaaacctgacttcactcggggacagtcatgttggccatggcataatcacgattaatgcaccacagatgaaccatggtcttctggccaacacatttaaagcatcctctcttcgtgcaaaagtgaactgaagaatgccatttccaatgtctttccacttccaccctttaatggcattccaagaaagtttcaag

SEQ ID NO: 2786 - DNA, 962 bp, Cannabis sativa
gtcgacgatatcattgttacaggtaatcactcgaaggagttggagaaattcacaactaaattgaatcagcactttgctctcaaagacttgggaccactacactacttcttgggaatagaagtgtttcgagatgaaagcggcatgtatctgactcagtccaaatatattgacgaattacttgagaaaacagggaggctacaccttaagtcctgcccaacacccatggcagtgggaaaaatgatttctatttctgatggtgaagcattaccgaatccaactgattatcgaagcatcataggaggcttgcagtacctaacacacaccagaccagacattagctatgccgttaacaagctgtcacaattcctaaaggcacctaccacaactcatctaagtgcagcaaagcgaattttgaggtacattaaaggcactccttaccatggactgcacatcaaacactgcgatagactaaccttgacatgtttttcggatgccgattgggcatgttgcccaaacgatagaagatcgatagcaggccactgtgtgtaccttggagatacactcgtatcatggtcatcgaagaagcagtccgttgtctctcggtctagcacggagtcggaatatagggcccttgcccaagttgccactgaaatcagttggatacaatcgctgctgcaagaaatacagttccctttaaagtcaacaccaatcacttggtgtgacaatatgggagcaagcactcttgcctcgaacccagtttatcacgcgcgaaccaaacacatcgaattagatgtacattttgtaagagataaagtgttggagaagtccctggaaatcagatacataccatcaagtgaccaaatagctgactacttaaccaaaagcctatctcacactcagttccattttctcatcaacaaactcggtgtagttcgaaccccacttcgtttgagaggggatgt

SEQ ID NO: 2787 - DNA, 4795 bp, Cannabis sativa
aatttaaaatatatattttttttttattctttcatgaagttgcaactcagaaaacttgttacatttactcaatttttttctacctttatttcccacatatcgcattttaattccccaattacatttttttccaaacttattctaagcttataacatatataggaacaagaaaagataataataggattatttctagctcaaaatatgtgtagaaaaaaattaaacaaggcacaaaagggttaactacgataaatgataaaagggtggcttgaaaggcacaaacatttcaaaaattgcctaaattatttttcaaagcacacattatgaaggattttacctcaaaggtcaaataatgcaagttatatccaattaaaatcatcaaacctctaaccctagtcaagcatgtataaaaaagtccaatcattcacatttataaattatactcaattttctaacaaccacaaagttaagcaaagaaacaattagactaagcatacggttattagcagtttaattccaacaagcgacaacaaatgtcatgtatttttttcaaaggcataacttgcaatacaacaacacaaaacaaatcagaaactaaacacagaaattaaataaataaacataagttttctcccccaaacttatttgacactttttccccaatgtgacacaataactaaagagaagaaaaacttacctaaggtccatgccacttcaataaacaattggcgcccataataagcatcatacaagacaacttaaaagttttcattgtaaatgccctcaaacttggcatgacatgagtttgttctaaaagtatcacaaacaacacaaaactttaaaggatgagcttggggagaaacttttggtagctcgtagaagatgtaatatgaggaaggtgatattattggaaaatatgaatccattggtggttcataatatagtagtgttgtcaagcacaaatcaacaactataagagcctccaataatacctctttctcactttcatcatgaccatccacaatcttgaatatgatttgatattaaataacttcatgaacgaggatggacgtttcttcattcactacatcgcaatcattatctgttgagcaagcatccaatttacccaaattttagtcaaaaccacctcaatagtgtcttgctcttcatttgtaggcttggtctcttctatgtattcaactgatggggcttctacattattcaaacaactttcataaccttcattatttgagttattttcatttaaacactctaaattatgcaccattaaattatcacataaagaccttaccatgtcttccaagtgattaatttattctgcaagtgatggtttgtattcctcttcctcaagtggttggggtgagttcgggcaatattgagggtattggtgactccaaccctaatgtgagggatcctagtgctagtggtaatcaaaacctttcatgttattcaacaaatatattctatcatcattacttcttcttaacaaaggctctctagttacctttgccccataatccaccaaacttcttgttacatccttcaacccattaaaaagtaagagattaagtgactcccttgagaacttatggtaacatctttctaccaattcattaaatctcccccaagcagtgtagaatgactcattgtattgttgggcgaaactcacaaggtaattttgatgtagcattttttatataccccgcaacataaactcataaaacaaaaacgttattaaaattaaattaaaaaaattccaaactagaataaaattcaattattttaatattaattaaccagtccccgacaacagcactaaaaacttgttgtgagaattaaccgacaagtgcacatatcatttacaagtaataactcacaagagtgaggtcgatcccataacatttgtagctaaatactaattaattgaattcctagttctatcaggtaagcaaatagattggtgattataattgaatattaaaatgaaaacaaataaacaatgaagaaattaacaatgattagaaatttaggacatttaattttaattgtattaacttcttatggcaaaatacaatctaattatcttcaattttatgtgatagcagaatattaattcaatttatattcttattaggacatatagaatctaaatcatatggcaaagtcctacactactgtggtaaattacacatataatttgtattaaacaaagaaatcctaattgttgcacaaatcattcaggtatttttgtccaacatcgaaatatatgtctattttactatagcataataaatacttactttttaaattttgcattaaaatcatcaaataaataattagtgatcaagaaattataagcattaaacaaaaacgaaatagattcacatataaaattgaggaaaaaaactagaatgacattaaaccatagaaaagtgtcaaacactatccattgaaaacccttattagagtttagctcctcattgtattgccaaacatttgcataaaactaatttaaaatgtaaaataaaagatagaagaaagaaactctttgaagattaatggttgtagcctctaaggtcatttcgtctctctacttttgtcctctcaaaagtcccaatccaaaagcctccttttgaatttttgaagtaaggtttaaaaaccctattgggcctaaaattgggtggcgggtcacgacatacactttctagtgtcacggcccgtgtctcaaaaccttcacctttgacactgatttaacaagggcgggatgtgacatgcactctccagtgccacaacctaggtataaaattcctcaaaaactttcttctatgtcgtggaatggtctttcacaatgccatgacccgcatattgcctcaaattctaatgctcaatccgtccattttttttccaaaggagcaccctagcattgaaattttatgccaaggtgcaaatccaatgtcttcaattctccaacttcaaaggctctaatttcaccgaaatttctcaattagttaagggactcttcttttggcatgctagcaacaaaattgcaattaaatctttatttttgtacattttttcttcaagtcattcttttttctctctattcactaaatctaaaaatattaacaaactaaatcgtaaaatataactaaatgaaattctactcattaaaacactaaaaaacaagacttgaaaataacataaacttacacctaacttagtcactcccagaattaacactaaagtgaataatattcgatccttttagaaagcttagattctacttattgtataacatgttcacaaccattcatgttattcccaaaaacaaaagttgtaagaatcatctttcctgaaaagctttaacgagttaatcaaagaatctaatgaacacaaatagaagctcatgaatactcatgatttagacttatctactaatgattatcattgtgatatgaataacttttttatgatatatggcacattgacaatgttagggtttatgccctgaaaagcatgtaaggatatttatgattataaatattagttgaacattttgatatatgcttgaatgttaaattattataattttatattgaataatgtatatataaatatatgataatgctttattcatataagaggttgtgagttgtattgtacaaagaattaagatcattgtccatgaataaaatagttagtaacatattaaagttatagaatctttaatcaacggttgttagtatggttcactagtgctcgttattgatgtatggtgatatctaagtgaagatgtagtatataatagatattatatatgacatggaattatatgtgattaagttatctttatcaaacaagacgtttaccataaagacctaattcatatcacaacaatgatcaattagtagatcagcctaaatcttgagtaatcatgaactcatgttcatgttattagtttctttgatgcactcgttaaaatttctaagaaaagatgcttcttaaaatttctattttaggatgctaataatgtggatggttgggaaattgatttacaattatggaatcctaactctcctaacatatcgaatgtttgttccctttaagtgttaattcttagaactgaaaagttatgaaaaaagttatattggatctaaattacacttttactagtgagttagtggtactaaatgataaataaataatttgaagggtgaaaatcaaaactaattatgaaccgacacaaggagggttaatcactggtattgattatatcaatgaacactgcaattaaactcagtagatataattttataatttctaagggtttaattctatagctatagtggagtaatcatgtaattaataaatatgatatttggttgatgagattcaaataatctaattaattagagttttctattataggtctatggtccctaatcactgccttacaccactctcaagggtatgaataacactaaatgatgatgtttagaaaatctattttgaatttgtaaaataacaattgtttaatttaattttaaatttaatatttaaataaattagggagacaaagatgttgtcagtacaaagacatcacaattgtctagttaagaaaatggtggcacctaggactgtgttgttacacattgataggcgcctatggataatgatgggcccaattggatttttttagattaattaatttattttaaatttgaatttgaaagtatttatatatatttaatatggttgggatattttctcaaag

SEQ ID NO: 2788 - DNA, 1769 bp, Cannabis sativa
cccgttgactagtcaaaatggccagtcctggggcagctcacccctttggacaagtagtcctgtagggctgtggacatctatcacttcacagtgtaggccccttgtaaccttgtcctgcagggtctggccctagtgtagctgtggtggctttctaaaacaaaacgtctactttttttattaacacccaattcattatgattaatagaatttcttttaacgttattacctcacctcagtcttgactccatcattgatcagctccgtctgtgtacaatgcatggtctggggcacctgatatctctatgtgccgtatttacagatgtatgctatattgaaagaagatgaggttttgttctatgtgatactgtggttttcattcttcatgtccttaatagtttgacgagtgcataacataatggtgatcttcagcagggtttaacgcttaagccatgctgactaacgtttttgtgcacagtcaaatctctaacaaggatattgtcaaggaatgtgaagtgttgcgtaatgatgctttagtatcgtaagcaggtttgaggcggatgagtcaatgatggaattcgttggtgggctgagtaattgtatgtttcaacttacaatgtagacatgtaatgtatatttttattctgacaatacttgtaaataaattccaggaggattgcacaaatgaaggagaaggagtgccagcttgcagttgaagatatcatgtatctactggtgttttacaaattttccgagatcaaagttcctttggttccaaagctttcccattctatatataatggacggctggagataaggccttcaaaagactgggagctagaatcaatctatagctttgatgttttgcagatcataagggatcatgttgctgcagtcattggattgagagcaaactcaagtgtcactgacaactgggcaatcacaacaattggcagatctgcacttcgtcgaaagtatgtgtcctccatcttatatggatactttttgaagtctgctctgttgagactccaattagagcaatgcgtggctttggacagccaagatcttcccccaaggcagagggcatctattcagcaccatggaattaaaagtcttctgtttgaccgcattagcagcatgagatccgagtcacagaacctaggactaaacagtcaggaaaagcagcctgttgaagatttgaaatgttatgtgatgggttttgatcccgagacattacagagatgtgcaacattgaaatctaaggaagccacgaatttgattgaaaatcacagtcgtgctctttttggggacgaggaaacttgttcactcgaggctgaagaggttatcttgacctcattttcgagcctgaaaaggttaatattagaggctgttgcttttggatcgtttctttgggacacagaggaatgcgtcaacactgtctataagctaaacgagaactgactggctgaaagaagagttttttctattgtacaaaacacgagcagtgaccgtgagatgatgctttgaggagcttacttctgtaaatagaacgatccttgccgcgcttggactctgcgatgaaagagagctctctcagatttaccattgtacatagtattttagtatatagttttggaagagtaagaagcaccacctcagtgtgtgttgttctaaactcaaatatcctgccagtgtaagattttatgccactattcttacttagtggtagttggttatgtttaattaagatccttgagtgaggattggtttaa

SEQ ID NO: 2789 - DNA, 2264 bp, Cannabis sativa
acaatataatatgatatcaaatttatggaagccaaatccagccatattatgagttcataacaaacaaaattcatataaatatataatagtcccacgaaagacattcatcaagagaaccactgtacgtacacttatattcatggcaccagctgatgctgaagtatggtttcaaatatgatcgaaacatgtcgacctttcagcattatgagtatttaataatctaacacatatatataatttcgttattcggtggaaatgatgatttattaaaagaaatttttatatgaaaaatataaattgatattttatttataaaaatatttttataaggtacggacaataattttattttcgtacaagacttacatctttcttactcttcttcttgaagcttcttgcaggctcggctctggtacagtttgcaagtgttcttgttgcctccctctttcttcttctccaagtcctaatcttcatcttcttttctttggatttttgtacctatttgcatttattaaccagacgtcacccttaatcattatgaaaatctccctaatctctcgagcccatacgctatttaatgctctctctctctctctcacaactacatttaagcatcaaattaatctccgtcgtttttccctcctccagcttaagcatcagattaatcattacttcccttcttcatcttcagacaccccttgtaggaatcgaagagatgttgtagagaccgattcaatcctcgaggcgacctttacgttccaggtactttctaaacttttccctttccctgcttgttcatttaaaccaccatccacattccctaccaccacatccacttcttttctctttgttcttacctgttgtactcccttttcctctcatgacgtcgtcttcacataccccaaactctcttagcgctcttgctgatgaggaaagcgtggttcatgaatttgaccatatatccttaaatcacccaaatgattcaaactctttctgcttaatctttaaactgcttacttccaaaaccgtcaatcctgcttggattgagaaggccatgactaatgcttggactctctgtttcccttatcagatttctgagtaccactctggtttatttttggcaactttccaatgtgatggtgatcgtcgtcgtgttcttgaagaacaaccatggcattttgacaagtttcttatagttttcactcatcctgatgtctctcctacacccactcctgctactgtccgttatgttccgttctgggttcaagcccacaacattccttttgggcgcaaaagtccccaacttgctcagtttattgctgatgagattggtgagctgatagaaatttatcctttgcctttgcttgagagctttggtccctatctccgtattcgggtatttcttgatatctccaagcccctgcgaaggggcatgactatccagtttcgtgtgatcaatgatccttaatggatcagttttaaatttgaaggtctcccaagcttttgctacttctgtggtcttatggatcacacctataacaaatgtgctaaataccttctgcgttgtgacaactttcccggtcctccttccctagaatacaaagaaacccttcgtgccaccacccctgcccatctcaagaagaacccatttgaaatttccaattccactccttttgaggagtatttcccccgtagtactgccaatgatcaaggtttgcaacaagcggtcgatcagtttctccgcatccagtttctcgtcttgatatttcaaccacatgttttactcactcaccggtctcattccctccgctgtttactcacactactattcccccacctatcatgaccacctctgttatcacccatactgacaaaggtaaaggaattgctgtgactatttccagcccacctcgttctcattgcaacagaagcacaagcctcgtcataaacgaaccacgttcagttccttcccctgtcctctcctctggaaccaggcaccctttcactcgccaaactgctcaagttggtgattcagttcgtagcatgctcaaaagagcaagagctgtttcaagtgatgacgccgtggttccttcattgtctgatgatgtcccaacggcgggtgttgcgtcgcgaccccgccaagaaaaatgagtatctgcagttggaatgctcgaggtttagggagtcctcgagcattccgaaatctctccctgctggtcaaacagcatcaacctttgttgttttttgttatggagactaaactg

SEQ ID NO: 2790 - DNA, 690 bp, Cannabis sativa
ataaaaattattaaaataaaatttcttcgaaaatatttagggtgtaaataaaatttgttacaacacatgcattttattaggtaacatttaacggactcatagctagcaattaataacgaaaagagcaccgctgcaacaaaacaatagcaaaagaaattgttacactatcgtcattttttttttttttgtaattagagcatatgtttaacaattataaataattaaagaacactacaaatatctttagaaaaactctacaatgcaccttgtctattgatgatgaactccctatttgtttcggcataagagaattgaactaaaaagttttctcaaatatcgaaatagataggtatgcatcaataaacttcttttaagtgtgtgcattgtgagaacacccataactttattatgcgtacaaaatacgtattattacattattggtttacttttataaaataaatatattactttattgttatggggggttgggatgggaaagaatagatatcattttaaatatatttttgtgaaacaaatatatgtctgtataagtactctttacaaattctaacattatatattctcaaactaataagactattttataaagaattatacaacaaaaaacttaaatcattttgcaaattgagattagttaaaagtactaattaaaatggtttattaattttg

SEQ ID NO: 2791 - DNA, 2195 bp, Cannabis sativa
tatatttaaagataactcattatgcgtttaccgagtactacattttaggactctaattcaaatgcaaataatatcgtattgtgctctactttgctcttcatcttctattttcctgatatagatatattgactgtaaaacagatcataccagaaaagtgcagataccaggtgttgtcaactaaagtcgaagttcgtctttctaaagccgacaacattcactgggcatcgcttgaatatagcaaagaggctatggttccacaaaaaattaatgtatcatctggtaagcttagcattcattcttttcattgttttttattattattatttgttgttctggagtgtatacgtatgagttatgaccatctcataatattagtgaaaatttatagcattttggtctcaatttcaagttcattgttcttgtattgctaatctgcttttaaagaaatggataggcattaaatatgtgtttagtctctaacttaagtaatatccatgtatttgtaggatctcacaagcccgtgtatccatcttcgaaaccaagatcaagagactgggataagttagaagctcaagtgaagaaagaggtataagccaatgaataagttgttctttctgttctacttgtcgttcatgacaaattggaaggaatttcagttttgcatcatttcccaataagattttcagagatttgcagtgacaacaagtggtcactttctcttgttcagtaagattttaaatgactgattgttaggcctcaaatatatgctttcatatccaggtgtatgaataagttgttcagtttagttcctttagggttggtcgttttgttaattaattagttagattactggtattgcttttttagttagtagccgagtctatataaaggctagtcctatcttactagagatatcagttagaatttgtgttaaagaaggtgaaatactttctggggagataccaaactgtcttgaaaagttttgaactttgtaattatttgataataataagattcttatattttaattctttcgagaactgaattgtatcaatagtgtattactgatccactaaacttctaaatgtcaggaaaaagaagagaagctagatggtgatgcagctctgaacaagctattccgtgacatatacaaagacgctgatgaggatacgaggagagctatggccaaatcctttgtaagatatactttgtatctgtttcaagagacctctagtgttatctcaattgtctcagttttcaccattttcttcatttttaatttcttcttaactgctaaaaaaaatggtgatgataattgttaatctggatttgttttatcgaataggtcgagtcaaatggaacagttctgtcaacagattggaaagacgtgggtcaaaagaaagtcgagagtagccccccaagtggtatggatttgaagaaatggggttcatagattgttgtggacaaaagcagtaaaccacatttggttagcatcttagacacattagaatttgacccttgttgtgttaaaagttcaattctaatgaaatgtgaattatcggtcaaatttgtttctttctcatgtcttttttagttgtctttgactgaaccacagaacattcaaatacaaacatttaatttactgttattagatagccaagccaaaccaatttgcttgtgttgtttattatgattgaattgtagttcaaatggcactcttcttaatccgagtttgagatggaataagacccggacataatgtcccgtcggtaggaaagtgtaattttctttcaaaatgagggaaagctcttttagatttgtgttagtaattacccaaatccctcttgggattaattatctataggtgtgattagtataaatcaaaatctttgaggctttattgatgatggacttgtccaattttatttgtagttttttaaattcgtaattttatcttatagggaagttacccaataatttttgtttttgagtttcttctgttacagaaaatctttgctgataaactattcttgccttctttacaccatctcatcatgtctgaacataatttcagagacttgcaaaatgttaagccaagttgttaattatcagttgaaataacaaaattaactaaagtggtctcaattagtaaactttagtggaaaaatggaatggagctgattatattgataaa

SEQ ID NO: 2792 - DNA, 2261 bp, Cannabis sativa
tatttttgttaggatttacaaagttggagatcaaagttggatagccaagtcaaggtttaccgcgatgtaagtgttctttagttgagttgtttcatttctctttttaaaatgctgttttacatcgttttgttccaaaactacaaattgggtttgtgtttggcattctgaacttaaatagtgtacactacaaggattgcaaatgctgatgcttgatctgtatttagctaaatcattacttaggatatgaatttaataatgtttgcagtctagtttgttgaactgggaggcactgaattttcatggtattgtgtttttcaatgtgttattagataggatatgtatatttgaagaattcgaacttttgattgatagatgataaaatgggattgataaatgctttaacttttacatgttgtggatgttttctatgtatgtgtcaatgcaatattcttttcattcatgcaggagctttcagaactgaagaaatcactcaacactgaagtggatcaacttcggactgtaagtggtgctttacattgtccacatttttttgacctgcaaaacattatgataaaaataattgttttaatttatatttttaaaatgttttaataggaatttctagatttgaggactacccttcaacagcaacaagatgatgtttccactagtcttagaaacttgggggtatgttctcatcaaaatgattctgaagtttactctgataaattgacaatacatgacagatgctagacctagattaattcatcttgagcttgtgtagctgcaggaagtctcaggaaatgttgtaaaggccgaagataccaagactggaaaagaagtaaatgaattgcccaaggaggaggtggagaacaaagaagttgaaaacttgaaggtccccccaatagtggaacatgcatgaatgaatgaccatagtggtttatagcttcgctgagttacttttcaattagagtttagaataggccacgaccttgctgtcttcaatttttatgacatgaactgttatctgaagcaaattatgtataacttttcctgttatcttcaattgaagcatcttttttatgcagtttttgtcttcatttgtttgggggttaacattctgttttaggttaattcaatgacctttccatatatagggactaagagaaactgtgttatctgcaatacactgtaatgtgcgaatatcaatagtgaagctattacactattagattgaatgagtgagctgttggaaactatcatagcctttgactacaaggaaggatcagatcaactagttgggttcaattaagaatttggtgtttagattaatgctatgaggtctatggcatgcaatgtctttcatcattaatgccattgtttgtgatgatgtaagccccatcttttgcattaatgtgtacattttccaagatgactatctttccaaaacaaataaattagagagagaagggcagcagttggtaattttgatccacaaaacaaaagagtataattttttttttcaagaagagaatcctaaaaagttctgctatcccatgagtgagtagtatacttagtactgtgctttctctgttttcatttcagtaatgagatgtgtactcactgtatgtgtaccatattattactcataatggaaatatttgtttggtttgagcaagagaaatggtattaattagtgataggtattgtcaatcaatgcagagggaattgtaagattttcattttattttatccttttattttacaaatttaaaagcatattagtacaacacaaacacaatacacaaaacaaggaaaagaaagaaaaaaacaatggaaaagtgtaaaagagaaaaaaaaaaaaaaaaaaggaatttaagggtacagatcgttttgtttgttgtcgttttcttctcagccttgacacaagtgtggtccacaataagaggatcttagaggccaaaatggataataatagatagattcttcttgtaagagtcttttgatagtgatcctacattatgagaaagattaatctaaatactcaagctagtatagtataaagcatatttttctcaaataataaaatacatgaataaagaaaatctaagtcggaagagagtaaagagggagcaaaagtttcttttgtcattttcacgtaatgttttgaggccctttgctccctaatagagtacatgtattgcagactatagagtagacgttttggctgttttcttcaatcattttcttcatgttctctt

SEQ ID NO: 2793 - DNA, 1752 bp, Cannabis sativa
ttacttgatccatacttttgtaattcaaattaaaagcaagaaagaattcattcatttatttctgtcttaagatctttaagcgtgttcaaagacattgtagtttgttttgtgcttcgaggattgttcttatttatgtcactacaaatttttttacttttagtcacaactaaacttgatagtgattaaaacaaaaattacaatttgctgtggctaaatgtgcttttagtagtcacaatacttgttataaataaaagtaaattacttacaacttgtatttaaaaactatatatgtttttgtcacaagtaattttttgttgtgattaaaagtcacatttagttataaaaaatttatgttgtgactaaaagtattgtcactaaaagtagttattttttgtagtgttgtaaactctcctggtatgtgagattgagccttgaactctaagactaataacagtatgacaccgtactaactagaagtggtgtattttaacaattctctagtaaaataaataacaattaatgaggtgacacgtaccaggcaagacactgctgcttatatactagtatcttactctttgaaaataaataaatttcttctatttttcatttgaagatagagcgcaattgcttacaaattgacaaactaacgatccagagtctttcaagaagttacatgattatatatgaggttgttcaaagaattacactttgtcctaaatgttcattgaaaatttgaactcgagcaaccaaaaaggaaaaaagaaaagctattactttctgctaagtgccaaaacaaaaaagagctgtataacaataatatattctacaatatgagttatgaaaagtagtttcttctagatactctattaattatacattaatagtaattattaattaattgactttaatttatatataaatttggcataatccgtgtacaagttgttagaagtttagttgtgcaacatatagtcacgggctacgaatatagtatacgtatcaaactactactaaaaaaatatctagtgaaagaaatgtgaataagtgtggctaaaagtattaactagttctaaaaattataattgtttatatgtttttaatcataatatttattgtaattaaaattaaattaattatattttgcatataattaaatatcattttttagtaataagtactttttattgcaactaaaagtcatatttagtcacaaaatttttttattgtgattaaaaaactataattaaaggtaatatttttggtagtatatatataatattattgattttcaattataggatctctaaaacagactctctcgatagggaaatagagtcaactctattcttatcttccctcatcaaaaaagtaaattagagaatcttaagtcttaatttgtattcttcgaagataattattcaaaatcaccacaaaaatcatctctatgaatggattaaggtatacgttttccctattcatgtactttttctctttgaattaataaagatattatttaaatttacatttatactcataataatatgtacaatacatttatttatggatctatggaattgaaccttgttattgcatattttataataagtaataaagaattctaataatatatacacatatataaatagatttaaaataacaatgataaacattaaagtttaatttatatttatatacatatttatataaatatatgcacaaaattatacctacattaaaaaaaaaataaaaaat

SEQ ID NO: 2794 - DNA, 1269 bp, Cannabis sativa
ttcagctgctaagaagaaggccccacaaaaggcatgaatggattatttttaccatattttgctttagcttagttttttgaaaaatagtaatcacaatacagcacaatcttgttgtataataaatgaactcaaatgaaacaaaaagttcactaaatgaatgaagtaatgatccaaaaacacatgttattgttagtattactgtatttaatctttctgattgtttactcattgttggtccaggcaagtacatcagtggatggctttctctttctttatctaatactcttttgtcaattcttgtgtgccaatgcgaccctccgatccgccatcggagaagaagaattctccgaggagttgctgctgagacctttaccagatcgaaagattcttgcccacttccatttcggcaccagtgctccgccaatcagctccaatggccaccaccaccatctgttccccaaagctatatctcagctggtatgaacttgcttgccctcttcttttgaaaattatttttgagggaaaaataaaaaggtaaaggactaaaatttagagagtagaaattcaattataggaactttaactctcagatcttgtgaattttctatttttggtttctgggtctaactaatgttgattaattttagattcttcaagaccctgatttcagttcaataagaatgaatctttgaaagtcctgactgatccaatcgctttcttaaatactatatatttcacttcaagaacaaacccatgtgtatattaggagccatggtgcccaacacaattatgagttagcttcatataaatagttagcggttgtctataatagttgttaaagtaaaataagggagaagtgatattgaattgtacaagatgttaggcactatgggtgcattttagcatttctcttaggttagtatattcatgagaagtagtaggtgtttgtaaatacttaataatttacaggatattgttccatggacaggttaagaaatttcaacttaaggaaatggaattgtctttcacacaaggtcgctggaactatgaaagctggggtggttttgaccccataccaagcaataatgccaaacctcctggagttgagttatgggctgtctttgatgttcctcaacatcaagttgatgcttcatggaagaatctaactcatgctctttctggtctgttttgtgcttccatcaactttttagaatcttcaacctcttattctgctcctcaatggggatttcggtcggcttcagggagtct

SEQ ID NO: 2795 - DNA, 2333 bp, Cannabis sativa
tgtttgcttcaatatcattgtttcataatattaaactgaagcttaaacattatgggtgtatggttgatattctttgtagaaatggaggtacgaaagaggctcatgacatgaccaaaagcatgctaataaagccaatgctgctttgtggggctcgttgcttagctcttgtcgtacttaattattgtgatctaaatctcgttgaaacaatactttgtgagcttatcaatcttgaaccatggagttttggtaattatgtacaaattgtaaggttataactttttaggatgcgcacttatcagatttaagcttatctaacagtggacagaatgacctacaaaataggttggtgacatcaagtacattttacaaggcaaggtcatgatgagtttgacactttactactgtatgcatccaacgatgaaaaagaacatgtgaatgtttttttttcattactcttcttgtgcatgagcaaagcaaaacaaacaagaaagtatttcttgcgcagaataaaatctatgaggatgtgagtacttagatagtaatagcacttcatgacctgcaattttggttgttctcaggctataaatatttatagctacttcatttattcttatttgttattttatatatatatatgtgaaggtctctgcggtagcattagtggtagcattagtgaatataatattggatttcacaaactgaatgtattctttttttttttaataagtttgaaagctttgtattaattttgaacaaaatgacatcatgaatctaggacagttagtcccctttacaaatttctctaaccaaattgaatgtattcatttgtttgtttttctttgttgggtttggaagagttaacgacccacataaattaatttataaaaagtaaatgtacattgttatattatttatgaataatataatatataaattaaatatacaataaataatgtgtaacgtataacaatatacattaagttatcgatattttatatagtggaaatttaactacaccatgcgatgtagtgcggataattcagattttgtagttaagtagatacttagccctatcgtttaccttatttagggcaaataatttatctaataagacgtgttgtttacctaataaggcttatcgtttaccttatttaggacacaaagtttatcaaataagacgtgttatttaccttattttatgtacagagtttactaacgtttaagggtagtcgtttacctttttagtaataaattatgtaagtttacctaataaggcatgttatttatctcatttaaggcacaaattttacttaataaggcatagcttttaccttattttaggcacgaaatttacttgataattaaggtgttttatttgtcaaatttgctaaatggttcatctaagtacgagtgtttttaactaattaataatacataagcttgaaatgtgatattcaagggattttcctaaaaaattatattttttttaccttatttacggcaccgagtttacttaaaaagacattatagttttgtttatcttatttaaagcatcgagtttacttaataagacatgttgtttacttggtttacgacacgaataagtttacataataagacattttatttatctaatataaggcagattgtttacctagtaaggcatatcatttactgtagtttatttaataaagtgtatcgtttaccttattttagggtagtaattttcgtttaccttatttaaggcataaagtttacctaataaaatatctcgtttaccgtatttttagcatattgtttacctaataaggtgtatcgtttatcttattttagacacgtttttactttattttaagacacattgtttaccttgttcatactattattcataaaaaaaagttagtaatgcatttattctagcattttatttttggaatttgtaaagggtgagataagcaagcttatttaaggtactaagtttacctaaaagaacatgttgtttaccttattttagggtagttgtttatcattttaatgataaattatattttagtttatcttattaagacactcaatttatctaaaagactatgttatttttcttattttaaggtagtagtttaccattttaataataaattatgctttgcttactttatttaaggcactcggtttatataaaaagacatgtttaccttattcgaggaatgaagtttatataataaggcgtgttgtttactttattcaagaatagtagtttattttttaaataatttttttttttcagtttatcttatttaaggcacggagtttatctaataaggcatgtcgtt

SEQ ID NO: 2796 - DNA, 1475 bp, Cannabis sativa
ggggcataaggcaatgagtggtacgttcgtgtttagaaaaggggtcggcttgtacccgtgaaagtattgtagagactgtaattgaaccacattaaaggaaaacagtctggatatctggactagcaaggcagattcatttgatttaatttgacacaaattggtctagatagattggagtttcgaaccacgatttccgaatttcatttaacacccctagtctaatgcctaataacccataagaagaaagaagcagcctaagtttcccttaaatatgttccaaagtgaaaagaaagatagtatttttttcaaaaagaaaaaaagtaaaaataaataaaataaaaatctttgatatttcattaggaaaagaatattatataactgatctagaacagtaaaataccgtactagtttgagaataataaagtaatatcaaaagtactaaattgattagttcaatcgaaaaatcaaacccactttatagtaatagcaaaaaaacagatacaaacccacttagaaccaattttatagattatatttatgttatgcgggtcaaagcaaaagacgtataaaacaatgcaactttcttgttgagcatctttctaccaaacattatttccaaggcaaaccatcttcggactcaaacaatacaccatcccaagtcctaacacaagaataaaaagaaaaacccacatttgaatcccttcaagcaatggaaacagaagtttcaaatcaagtatacacacatggatctttacaaatctcagaagtcaaagacactactactactatctcaacttcaatccacaccatgagccccatgtgcggtctaagtcccaactacaaaggcagcaccttgtacgactcctatgaactccatgcagtagttcaccaactgaacaaagccattcaaggttccaaagctttctctcctccttacatttacaatccgaactcacccttctaccggaaacgacagaatcagatttataaagagaacaaggaatcttcaaagaaacttactctttctaatctttcttctgcttcaatacttgatggcagtaaatctaggtatagtagaggggcctgggtggtcacaagggaagttgtgacaagattgtggaagaaggttaaacaaggactactactgaggaataagcaaagcaattaaagttaaattgatgtcaccacagtccctcaaacaccttcagctttttccagtgttctttttctcaatgtgttcatctagaagaattgagtgttgtctagcatcaaaatcctcttcttcctattccttttggcatgtggctacaaggcatttttaagactaatctccaaagggactaatagagcagcttccttagaaaaagaatatacatatatatacatatatatataaatatatgtatatatatgaaatgtgaaacaattattgttcgtctttatgttatttaaatgggtgagcgtgcttgtgtaaa

SEQ ID NO: 2797 - DNA, 1057 bp, Cannabis sativa
tttttttctttctagggtttcgtttcatttaatttaatttttgatttccatttccctcttaatattgccaacggaaacactataatcagttggataccagtagattacctatataatttatggacctaggtttctattgcgtttttgccccagttcttggatctgaattgttattaatataatttcaagttgtttgcgtgattggaaatgaaatggtgattaggtcaagcactagaaagatgatctgttttgcttcgtgaaaattgcgattatgttgtattgcattttaaaccttttcaatttatctctatggttacgaggtttttcccgttggtctgtggtatctagttgctgcgcttcactgtaattttatgtaatttctaagattttgtcgggctatcttaacttggttcctgttgctgattaaggtttccctttgctacttttaattgctattagtagttgatttagtgttttggaatacgagatgaactttgatagattctacaaatcatcgttctttattttccatgaactgtgtacatggaatgaataaaatttatgctatcactttcctccaatttgagcttcatcttgtgcacatggcatggataaaaatttatgctatcactttcgatgttcaccatcaagaggggttgcagcattccctgcattgatttgtgatccgattagatatcagtgcactttttcttcctgttatatattatatgccttttcttttcgcctgacaacaattatcatgacccttatcttcttcttagctcgctatctaatttcattgactgtgcagggtttaggaccttactcgacacttatcaagaaagcagaaaaggagataaaagatatggctaagaaggtcaatgatttatgtggtgagtactatattcttgtaacttgtatctgcagtttatgaagtgatttctaatatttttctatgcatatgcttccttattactactacatctgaatgaccactgtttggccatgaaagctactttctgttgtttcatttagcatcaatgctcatgctatactt

SEQ ID NO: 2798 - DNA, 1150 bp, Cannabis sativa
gaatgttgaagtgcagggtagaattttggatagatataaaaatctgtgtaagtttgcaaatattttatttatttcttataccttcgttctcttgagtgtggacaggaaagaaagaaacttaaaaatagcgtccctgccttggggctggaattcttctcttcctctcctctccgattccatttgcgcccaaaattatcgtttctttctcgaaattcgcactaaactcctaattctctctcttccgccgattctcttgttcgccggctctctacccttcgtccctatcaggtatcgtatcttacttgtcttttttcctcctacatgtttttcggttagaattttagacatttaatactgatattagattcttgtaagtgaaattgaaatcctagttagcaggctcaataggaaaaccaagtcaattttcggtagagttgattgcccaaaggataggataggaatgataagaacacattttgcttctcaatttttgtccttggctattgaaatgtatgtgattgcttacaagattaaaacgattccttggatattaaaacaatttggagcaaattcagtaggggcacatgcgcccacaggaattagcaaaataacatcattgtttatacactaagaagcggccatgaagttgttttggaaatttatattttaacaatgattttcatttttctattttcattaaattaatattaaccaaatattcttcgtaaaatatgtattttctttttacaaggaatgcaattcaatgaggaagagaaaaatagaaaagtgatattggagacatgggtgattttattttttgcattctatatcatttagtttctttatccctgttgtttgatgtggtcatgttggtttcataatcaaacgatccttacttttatgattgacattaaaatatgagcattggagtattggctctcattgttggtgttgagtcttaaatggtgtattgtgtatttacaatgttttgggatactgtttctttgctatggaaaatgggtacttattctaatttattaatggttcttttctctagaggtttgtttttaatgatcagtcttatcaaatggaacatcattaaagatttgtccatactagttcttcctctttttttttgaatgtgttggta

SEQ ID NO: 2799 - DNA, 1143 bp, Cannabis sativa
atggttaaatgaactgtatcagcattaccattagactattggataaatattgggttgcatgggtattgggaccagtacatagaatttttttccttcttccttgaacgtaagaggaataaatataaatatatcatatactattttcaagcatcttacctgtccatgcagggtagtgcagaagttaacatacctgttatgtttacatctaaatatgtttgtaagtgaaaatatacataaagatgaaattttccttgataataattcctttatttaagaaactcaaacaacggatcctccacaaagaatgttctttcttcttcttcttttttgtttttttagaaaaatcatataagaatccgaaagaagcacagcttacaaaatttaatcaaacattaacaaactccattgaatgtaccgttttcctttccacaactgctggcttcttctaatcactaaacttgtgccaaaatacaccttttcctgcaacctgaatttcctatttaaaaaatgacaagtctatagaagaaagaaaaacaaatatcttgaaaattcaacatccacccgatacagcaatttagggtttatgttgagcaataatcgaggtatgcacagcttgttggggagacagagcctttccattcacaacaatttgttccaagaaatccacacgaattgatttgaactggtaagactggtatcacatgcatgggaacaaagtacttgttaacaaagagaataatttaacaaagctcagtcaaatttttttatcaagatattgtataaaagtctagtgacaaaggcagtaccttccctctccaagaaaaatcggtgtgacggtaaaagggttgtaatagcacaacctgatctccttctttgatctgaaaagaacaattttcgggtagttccaagattactaaacaggatattttgcaaggtatatatgcatatatgaagtcaaagactgccaaagaccatctcaattattatggaggcctaagtgcagaacttattatgcataaatattaataagaaaaagcttctgatttttatacttgtattaattaataagctgctgcacccaagtacgtaacagaaaactgaaaagttgcagtcacgttcaaaaagagcgaaatctcatagatc

SEQ ID NO: 2800 - DNA, 1571 bp, Cannabis sativa
gttaagaagattatgtcatcctgggcaatgaagctaacatattctcgaaagtcacagaaagacatagtcacaaaaggatccactctaatagtatccagagatgactctgggttactaagactcctaacaattttattttccctgtcaatgtaatccttcataaggtacttaagatgatctaagtttaaaaaataggcattgaaccccccttggtctatccaagacatacgatggctgagggtatagaatacatgaaagcaacctattacctctttcggaagtgttggctccaaaggcacctttgtctgggtatgctgtagcaaactgttcaaaaatatcctcctcctccatcaaagggttagaatggcggagcgcccagtttgcttccatgagcttatcatccttggtagcctcgattatgaatttggccaaattgagagctattatctccataacctctttggaagcctgactttggcccatgccactttggaaacagacgattaataggtatttgtgaagcaacttcgtggtggccaagccttccactctcaactctgcttcagtatagagcttgtattgggctgcctttttcttcttttatcttgaattaaggattccgaagcacaagctctaccagaaatgagaagtataaaggcccaattagtgcttagattggcagagactttgaaagaaggaaaaataataataaaaatatttactagggatttgaaagcttaaatggagagtaggcactctccgcgttgggaaaccagtggaaaagaactaatactcccagaggtcatgggagcataaggtgaagctggtagggcaatgtgcatctgagtacctctccaacttgtaaaacccaatattcttgcaattggtgcgcataggttggggattcacaccatagaagtacttgatctcctctggagtaggcacttctaacttgttgatcttgcaaaacatgtaccatctgactaagagcttataagccagatgtatcaattggaagggcactatcccaattcacgtgatgaattctacaaaataagtcctcaagggaaaatgggctgcgctcacgatgtggaactagctctaatcactgaatctatatgtgctcacggaagctgactctcccgcaattgaaagcttgtgtcacattagtttcagaatgttatgcactctgactttagtggcttaaagctccatcatgccatacgaatggaatctattgattttttgatccatctcccagatggaggcattaaatacaagcacaggaggcagggttttggctttcccctttcctttggattttatgactatcccaaaaagagcagcctctggagtagtctccaaggtaatatcatgttaatgttctcgggcaggagcctccacctaaacttcttcaatagccaccgcctctgcaagagtaactgctaaattttcttcaatatccaccaccttgtggtgaaattcctcattcaaatccatcattagaaaaattaagagaaagggaaaatttctatcccaattttcaccccacctaaggttgcattgcttac

SEQ ID NO: 2801 - DNA, 679 bp, Cannabis sativa
tgagctacgagtttgactttgatttgaatttgcacagcaaccatggccacattgtaaaggggtcataggctcactgcatttttctcgaaaatatttacaggacccaaaatctgatctggaagcttgagacaaagtctcatgagccgccactgtccttggtacagaagaatgtttcagtccattcaatggatcataaacactaaatgcactaattcgtgccactggacgggaaatgatagtatgacgtggtgcttcagaagcaaggttatgataatttgcttcatcaatgcaaccctgatttacttgagcactgtttccatactggaaaggtctattctcgactgaaatatctcctccttcaagattcctaagtggattcataatttccacagacatggtctcttctgaagatgaccttctcttgtcaaggctgccatcaatcaccatctcctcagggccagtgttgaacctcccacactcagggtatttgcgttttagagtagagttccagtggttcttaattgcattatcggttctacctggcagaagtcttgctattgctgcccatttgttcccatggattgcatgagctgtaacaataagacgatcttcttcttctgtagaaatttaagttccagacagagaccaagaaatatcagtgaaaatcaggtatgaaatc

SEQ ID NO: 2802 - DNA, 1146 bp, Cannabis sativa
agggtcctcccccctcctttgtgttaacattctgctgtagaaggtcgtgtgctttgagaataagccttgtttcttccttttcatttccatccaaagcctggaaggaattctcagtttgtgttacctgtactctctctgcatgtacaactttcttccctttcattacttgttgaaacccctcatgatcaaccttaggtgcctgctgccgtttatcctccttgactacccattgtttctttgtatcccctttctttctacattcatctgcaacatgtcccaacccaaagcaatgtccacatttaattggtttccattcaaaatgaatcccaatatgagtattgtgggcattttcatcttcaaactcaaccatatcaggtaactccttgtccatgggaacttcaatcaacaccctaggatagcttagtctttccctattctttgtcacttcatccgcaatgattggccttccaacttggccaacaatcttgaaaagagacctctgccctaatatttcagatccaactcctgcaattgtgcccatattggcaccatccgtatgtcctctttcttgaagttggtattggggtcccatggtttcataactacagggcgtttattaaagaagatataccctccattgaggatttcatctctaatggcagtactgtgaaaacgtattatgaaaataccatgggataagacttttaccttgtcgattttatcctttagatcatgtgtgcaaagccctcaagaatgtgcagtggtgggttcgagcctagcacgtaacggacgatcgaaggagtccagaagtctatctcatcttcaatgtcttgcattgtgattttcaccctgtttgtttgctctttattagcttgattaaacgaattatccaagcttctaattacagaactagatttcagtataggcagagtcgagtgaaaaccctacctaatagtcttgttacattggatgttagcatccaaaaacatctcaaaatcccttcgaacctcttcctgattcagaatgcttctcagcaatgcatcaggggagagaggaggttgaaatacatcagccagcaaaggatcagaatctacccttcgctcctcaagttcctcctcttcctctgaaaaaacaataggttcgata

SEQ ID NO: 2803 - DNA, 1686 bp, Cannabis sativa
agttacctatctcacccttgggggtatttactcaccctacggggtgttcgcttaaacatacccctgggagtaattactcaatctcatccctatacataaaatataccatttgggggtaataactttacgtattccttattaatttatctcggtaatctcgtgtcacgtgttatcatactcgccacgtcactcttgtcaatatctagataaatatttttccccaagtttctagcaatatgaccatacaataggaatttacctgtgtaaaccatgtttcgatcctgtttttgatgacttgttgatagaatgccatgtttatattaatacttacattttaaatccaagaaaactaaatccccattttcaaaattttataagttcaccccgataataatattttcccatacaagaaaccgaaaaataaattttaaggaagaaataattatttataagaaaatcatatatatataaagagaaaataaagtaagttgtttgtaggaaaataaattaattaaggagagtaagcaaggaatttttcattttgggacttacataatccatataggctcaaagtgaagagccaaactctcaaaaactcaaaaatcacactttttcctcattttttatctcattttgggtcaagcataggaggaggttactaatggaggtatttttgaagcttggatcgattattgaaagctttagtgactacttcttcatagtgggtgttatactcatattttgagcaaataatatggttacgacatgtgtaagaaagtcgaaaaatgaatcagcttgaattgtaaaaaaataaatgttcatgatcactcaccttagaaaatacaattggtagatatatttaaatctctccttttagagataagggtgagctgtaaataacaactactattttgtaagactagagagatgaacaatcaatgcgaaaggtctatctcaggatacacagagtatacaacagaacgacagtttattggaaatagtagataatgagttctttcagagcttgcaacttattgacccacgtactcgtgattatgttgaaagattgagggatatacacagaatgtaattcatctcggaataatcacacatgacacaagatgacagcgactcgcgtagatatactcggtcaaccttaacattacaaaagagtgcgagaagcattcttaaggatcatacttagacacaaaaattatcttcaaagtaagcattagaagatgattatcaatactgcgaagcgtaaaagattggtcagaataaccgtgtttagataaagatgagagtagttatagcggttatttatttttatcacatgtgctgtaaatatgaaacgtaggtgttgacctcaaaaattgatcaatcgacggcgagattgcatgaatctagtattttccacaagttacacaattagaattggaaagtaaagaacacacaaaattgttatagaggttcgacccccttagatagcaggtaatgacttactccccttttagttgtattgataccgagggataatactattgagattgttgtaggtgagatctgatatagctcccttaaggatgcaaagtagaaataaaggttggaaaatctcaagtgttgagaatgcttgtatgggcgtatgagaaagagtgaggaacggaattatcagacttagaactttgt

SEQ ID NO: 2804 - DNA, 2901 bp, Cannabis sativa
cttaccacgttgtagaagctcacctaatgactgtaaactcacatcaacatcttcatcatattcaagtccaagttcttcctgcaaaattaaccacctcactatttattatcaaattcttcattgcaaaacacttctcaaaagtcaaaacaatgacccttaaatggcatgaagataaccttgaattccttgagattctttggtgagttctcagtaatagcatcccacaaatctttaaacatccttttacgctttctccattgacttattttttcagagtacaatttttcaatagcctcacgatcttctggcttcaccaatgtaattccaccacgtaatttttccagtttgtcctccatttccttaacctaacacatcgttacaaaagctccccaagttaaaatcaaagaaattttctatctctttagtgaaacgaattccaattcaaggactggtctatctcaaccaacctccattcttagttttacttcctttgcaagtatttgttccagtgtcaaatttgactgcaaacttttgatttctgcaaaacaaatagtccacataatcaccatctcctacaaaatttgagtatagggttatagagaatgaaaggggtcacctccttcaacctcgccaatggctttcttttcttcctcaagttgcttctgcaatctagcattttcttccttcatctgagtaagctcttcggtatttgggatgtcgaattggtcttggcgagcaagataaatcttctgcttaccatactccttgaaggaaatccgcccaccatcagccagattatccagggctttttgtattgaagccttcttgagattaaacttttgtaaagcatcagccacattttgtgaattaagcggcctattttgctgcagatccagaaataaacaagaaaattaaggaacatttaaaaggatgattgaagtaatatgtgcttgtttccctggaattaatcatctgaaaataaaaccggtaagtgaagccccaaaaccatatggcttgccaaagaagcttcgttgagcttaaccacgagaaaaaaatagactaatatgaaaagagaaatttgtgttctgtttgtttggatagaaagtaaaagaaaaatgaaataatgaatgattattttctccctattgacgagattttattgtagcttcattatcaatcagagaaaaacatatactaaataagaacaaagatgaataaaagttacctcgttcacgaagttgaggacgatcgctgccaaaattggattaaatcaaaatacgtcaaaaaaaaataaataaaattaaaccccaaacacaagaaattaccactcaaacatggcgacaacatttgaaaaattagaaagtaaattttaatggtgatagagatttgaagctaactgaccttcggcgctatcagatttgggagctggcgccatttgattgaacactaaagggtacacttcacaatatcgaactatgtatgccttccgaattcttctagcaatgaagagctctgagttttggtcagagatttcgacttctggtttggcagagattctctctttggagaccaggagaagatgagatgtgtgtgattatttcagccctaattacaagcttctccagtaaaaaggcgggaaatacatcactaactaactaggacgatgactgatatatctaaacttgccctgaaagcttgtattgtatccaaacgacttagttgaaactgtcgtttttcgtaattatgtatttgaaacgatgtcgttttctatgtagagtgttgaaatgagtaatgtattctcgcttcctaattcctaactgtaattgcgaaaattgtctccctactaaatccacatctcggtgctcagagacctgacacgtcatgcttagagctcagccatggctggaaaataccagttgacttatgaccatataattcccaaattattttaaatttgcaccaatgatattttttttttatatagtttcatgaataattactaacatgcatttaaaaatataaatgtttcttgaaaaaaatataattaactattctgtgttttttcaatgatattaacctttaaaaaccagttgaggctagcttaagacttgattatccatatctatcttattcattctcttatcttcttcatccctttatgggaattactaatccacaatttcaagcattccacaaaacataatagagaaagtttgaagaaagaaacatttcattccattcagaatgtgtggtaaatagacaattgaaattagcatttgactgcaacagtcaagttttatgaaaatgctgtccatgagaaacgaattagaatatttctggaactgataagccacacctaaatcaggttggcttgtagtattttgtaggtacaaatggcatttttgtgatagccccatcatagttctttcctcgaactgcaatcttaactttggtccctgacttgtgtgatccagatttcacatatcccatagctatgttcttcttcaggcaaggactaaatcctccactggtgacttccccaatgttttcacccttctcattcttaatctcactgtggcctcttgctgggggacctgaagagatcaaaccaacacgcctgatcgatggaccagtttccagttgtttgaggatcacctcagcacccagaaagccaccttctgcccttcttctcttccctatggcccatgttagtccagcctcaacaggtgtgatgtgttgttccatatcattgccatacaaacacagtcctgcttccagtctaagactatcccgagcacccaaacccgtcagtctcacctttccttctgacttttccaagattgctttggcaagatccactgcattctcagaaggaacagaaatttcaaatccatcttcacc

SEQ ID NO: 2805 - DNA, 1935 bp, Cannabis sativa
acctccccttgttcattatatttaactttatatactcatttgcagccaatggctttatggccagggggagtttggtgacaatccaagtgttatttttttctaaagcttgagtttcatcatccattgcttgaagccaatgtttgaattgagaagcttcactgtaggattgtggctcaatatgagagtaagcggctaacacagcagcccgaaattgggggctgagtttggcatatgaaatgaattcctctatgggaaatttagtagaggatgtgtggcagacatagtctttgagatgggagggtttgtgaatttgtcgaccagctttggattttagaggagaaatatttgggggtactggtgcatgatctggtatggaatctggtgtagttatgatactagttgctgaattgtgaggtgttacagatggaacattgttgataacaccagaaatggattttggtgttgatgagatggtggtgttggtgagattggcacctatatttttgtcttgaatgacaggtttatgggcaggtatgcaagattgctggaaaagcatattaatatcattgcttgaaccttggccaaaaaaaggaaatatgtgttcatggaagacaacatcacgagagtgataaatttgtttggtttggatatcaagaagggtgtaagccttcatgccatgtggatatccaatgaatatagaggcacaacttcttggagtgaatttgtgccttatggaagttaaggtggatgcatgggcaaggcagccaaaacttcttagatgatcatatttgggagttttattatgaagcttctcataggaggtgctgccattaaaaagagcagaagggattcggttcattaagtaagtagcagtggtgatgagataaggccaatacacaaggggtaaatgtgattggaaacacaaagcacgtgttatattcaacaagtgttggtgctttctttcaacaacggaattttgttgtggacgttcaatgcaagagtgataatgaaggatgcctttggaagcataaaaggcagaaagtgcaagttcttttgcattgtctgtcctgacagctttaatggttgcagaatattgtgtgctaaccatgttgaaaaaagttggtatgacagattgagcttcagctttagttttaagcatgaaggtccaagtaaaccgagaagtgtcatctactatagaaagaaaatacctatatccttctatgctaatgatgtgaaagggtccccaaatgtctatatggacaagatcaaagggtttttcagcaaagttattattggatataaatggtaatttcttttgtttagcaagatgacaaacatgacaaaattgttgcgatttaatagagaaactagaatcaagttttttattgaaagtatttgaaatatacattgaagggtgaccaaggcgttgatgccattggtctacattattgtgtaaagaaaggaaacatctaggattttttataggagtagactcttgaggaagaacatagagcctcccaatccttttagttgtcccagtcacaatgctcagagaaggagcctgtattgaacatttatttttatcaaagaacacaacattagagctgttatcaagaaaagttgtgatggaaaaaagatttagttggaaagttgagacaaacaacacattatgcaaagtaatataggaattaattttaacagtaccaataccttctactggtatgttagtgccattgggcagaacaacaaacttggggaaagtattattagaaaagaattgaaaacaagatttgtggggtggcacacatgtgatgtgtggcaccactgtccaatacccaagaatgagagtgagaagaaagaaaattaccagctatatttgatgctgcaggagtgttgtttgtgtcaccacgagcgggggcttgactgagttgctgg

SEQ ID NO: 2806 - DNA, 819 bp, Cannabis sativa
agggcagagtagtatcaagtccattctcggcgagctcaaggattaccaggtgagcaaggaccgcactatttctggtctggaccgaactacttccgatcttaatcgaacagttgcgggactatcggagcaagtaagaacgcgtttgaatggccaagcaagaatggctgacgatatgctcaccttcaaggaaactcaaggggcatctcatagcacacgccgacggtcaattaatgaggaccacgcatcgaacggccgacaaggggaattggcaagaaggtaagaattcagagctcgggaaaaattgaattgcctgttaatcatggtgattatcaagacgagtggacttaccgagtcgactgatactttggctttgggttgcaatgcctatccccagcagagcaactaaaggagactattttgtgtttggaaggaacagctttgagttggtttagatggggaaactctcgccaaataattgggtcttgggaagagttaaaatcattactcagacgtcggtttacgtcggttcatgaaggcaccatctacgaccaatttttccatctctggcaaactagttttgtccgggaatatcgaagaaacttcgaaaccgtggcgactgggatgggaacactgagtaccctattttgcaggctgctttctgcaacgggctcaaaagaaagatccaaggcccacttcgtttattagagcccaatggcctcatcaaagcaatggagttagcagaatcaattaaatttgaagacaatcaggtcttagcaaaaaatcacaggtatgggcctcacaaacctagcccaactaagc

SEQ ID NO: 2807 - DNA, 2589 bp, Cannabis sativa
ggtgtaggtaaggtagaccatgtagagctgtgaactataactggtgtttcaggtttgtaattatttagaaatccttgatgaaaaggaaattcaagctcattaaacacaacattgcgcgatatgtaaactctgccagtaggactaagacatttataacctttgtgagcatcactaaaaccaagattaacacatttaacagaatgaaattgaaacttgtgagtgtgatatggtctaagacatggaaaacatgcagcaccaaaagttttaatgaatgcataatctggttttcttttgaataaaacctcatatggtgactttagtgacaatacgggtgtaggaagtctgtttattaaataaacagcagtatgaaaagcatcactccaaaattttaggggcatgctagcttgtgcaagaagtgtcaagcccatttctactatatgtcgatgctttctttcggctctgccattttgggcagaggtgtgtgggcaaggatgagtgaattcaatgccatgagcatgaacaagatcagtaaaggaacgaaattctcctccccaatccgttcttaagcattttatttttctttcaaatttattctcagccaaggctttgaattgcaagaaagcatcgagagcatcatttttaaactttaagggataaatccatgtaaaccgactgaaatcatctacaaaatggatgtaatatcgataattaatgttggaagcaatcggtgcaggtccccacagatctgtatgcaccagatctaggacatgttgggcacggttttgtgaaagtttaaaaggaagagaatgtgacttcccatattgacacgcatcacaaaaggttttcatttcattaagggaaaatcttacattagcagagtttaacacatgactcaatatcctaggagatggatggcctagtctcctatgccaaacatcactaatgacaatagaaccatgcttagtttgggactgttgtggactgttattctgagtagcagcaacaccagctaacaatgctggtttgtgaactcttgattgaaaagaaaaaacagactcggacttgggtgtttttggtgtggatagttgataaaggccatccttaagaaccccttgaagcagcaccttctttgtttccttgtccttaatcaaacaaacattgggataaaactcaattaatacagaattatcagcagtgagtttggagacactaatgaggtttttagcaatgtcaggcacatgtaatacttcttttaaacacaaggtttttccacagttagttttaagaaaaccactaccaacatgagatatcaagagtttgtttccattacctacagtgacagattccttacccccgtactcttgtttgttgttcatggtggatgcatccgaagtgatgtggttactagcaccgctgtcggcaaaccaggcatcactatccaccacttcgggagtagcaatgaaggcatttggtggttgtttcacctggttttgtccctgctcaggcccagtgtaactctcgtcatacctgctgtaacaaattgcagcagaatgcccatatttgccacagatttggcagctgggtttggtgccattgttggtattccttcctcttcctcgagatcgaccgccattgttgcctctgccaccagaaaaacgaccaccattattctggtttggataagatccacggcccctgctgtaagtatgtggttttgttgccatgttggcttgaggatttgacaccgagccaaggatcttattgttgttggtaagagtttggagtctctcgatcttactgtcgaaactgaaaagagtgtcttgaagttcctgccatgttgttttgcttctagcttcgatttgaaccacgatagatatgtattcagcatccaagcccgacaacacatttgccacaaggtgtgcttcggggtagggatctcctgcaagagccaaaatgtcagaccaattcttcttttgtctgaggtattctgccatagatgtggaacccttcctggttgtttgaatgagtgttctgatctcatccattctagctctcgaataagctccataaaggctttccaaggcatgccaaaggccagcagctgtagttgctcccattacttcagtagctatagactccgtcatggagctatacaaccatcccattagcagttggtcgttgataatccactgctcaaagtcagggttcacacgaatccctgtttctggtccagtttcaccatcagcaggaccagatgtaatgaactcacttggacactcacgagtcccatttagaaagccttcaagtctatggcctcttacaatggtggagaccattgtcttccacagggtgtagttatttcggtctagtttcagggaaaaaggttgattgagtgtgctaaagtgttgtgggtatggatttgggagttgagaggaaaagttgtcatttctgttagctgcatttcccacaacagcagagctattagcagagcttgctgttgggtttgcagcagggttttgatctccattaccagaggttggtgtagccataggcgcaagcctttagaatggctctgataccaagataaaa

SEQ ID NO: 2808 - DNA, 1126 bp, Cannabis sativa
acagtagttttgaacgatggcttatagcagcatataatttgatagtaactcaatctcaaacaacttaaagtcataaaatgtaagacaaacaaagttaaagtaactttatagcaagccaaaaggaactaagaatctgagtattacacgtctgtctactcaccagtaagtcggccaactactgttccccatggatcaataatcaaagtttcgccatagctttgtcgtttatcattatgctttccagtttgtgctgcagcaatgacctggtacaatcccagaaacagaaaagatggtaactcgtgaatatatgcaattttttgctgctttagagtacttgctacaaaacatggatgtcatacatagcactgagtctcaattgcacgggcacgaagaagaatctcccagtgtgcctgacctgttgcaactgtgaaagccgcaggtaccaataggacctaagaatatgatgtaggaaacaaacaagcataaggtggtaattcatccactacaatattagaaaatgtacttgtttgttttgtacctgtgcttcatgttggaaccttagctgctggtatagctcaggaaatcttagatcataacaaaccgtgagacccaatcgtccaacaggactatctaccgaaacaatgttattccctgaaaacatgagaaacaatttgttaactacagaaagtgaattaatgattacttaattaagaaaagtacaaaccaatactccttaattttaaaagtcacatgggcaagtaaacctgcttctgtaatgttgctttccttgtatgacctttcaccagcaatatctacatcaaacctagaaattaaaagaatttatcagcttaattaaagtaagtactttgtcaacccaaaactatatgcatcatcaccaaaggataccaaaaccaactgtagggcctgtgaatttcatgaccgattataaagtttgaaacccgaaactgaaacagatttacaaattcatatggacatggagaaaattcagagtaacattaaccacaaatgtattaaagttagaatgtttattaaacatgagctgggcatttctggtcctcactaagttaataataattaacaaaaaaaccttacaatatgtgatcat

SEQ ID NO: 2809 - DNA, 695 bp, Cannabis sativa
ttttgtcactgaatccatttgcagaaagtactttgttcagaaaactccattccattttgtcataggccttgtgcatatctagttttaaggccataagccccccaagacctttcttgcaacgaatcttgtgaataatttcttgagttaaaatcgaggattccgcaatccaccttcccggtataaatgctgattggaaaggcgatatcaaatcattcatgagaggtctcaacctattagataaaatctttgcaattactttgtaggagaaattacagagacttatcggccgaaattgctccatagtcaaaggaaattccacctttgggataaggcaaataaaagtattgttaagccttggatcaagattcccgttggcaaaaaaatccttcactgtagcgcacaaactctttcccactacatcccaatactttcggtaaaaacatcccgagaagccatcaggccccggggccttcaaaggatgtaggccaaagactacatctttaatctcatcctctgctgggattttagtaagactctcattggcaatactgtcaattttatttggaaataactcattaaaatcagcttccagacacggttgggaagaggtgtataccttcaagaagtactcgttaatgatgtttccaattgccttcttttccttccaaatcctaccctcattatccttgatagcc

SEQ ID NO: 2810 - DNA, 3165 bp, Cannabis sativa
cgcatccatgaattgtatatatataatatatgtgaattgtaatttacatatgtatttatttatttattatgattctcgttttctaagccggcgagtttagttatgaacaagctaaatgtgtcaatctttaatggcgccctgaacctgaaacctccatcatcagtaacagtgcctcatcaacatgcaaaagccacaaacacaatacatttcaatgctatcatcaaccgccttgcatcccaaggatctcatcatcatgttcttttaacgttctcatctatgcttcaaaataacacccctccagacactcacacattccctagtttgcttaaagcttgtacgtatctggacttgtttcctcttggtctttcgtttcatcaatctgttgttgttaatgggttttcgtcagattcttacattgcatcctctttgattaacttttatgctaagtttggttacgtacgccatgctcgcaaagtgtttgacaatatgtctgagaggaatgttgttccttggacttctatcattggatgttattcacatacaagtgactttgatcaagcgttattattgttcaatgaaatgcgtaggcaacaaatcaagcccaatcctgttacattgctaagcttgctccctatagcttcggagcttaaccacgtgaagtgttttcatggttgttcaatttcatatggttttgaatgtgatgttactttgatgaattccatattaagtgtttacggtaaatgtggaggcattgaagaaggtaggaaaatgtttgagcttaatatgacccgaagagacttagtttcatggaattctttgttgtcgagctattcccagaatgggaatgtcagagaagtatttcaccttttgtataaaatgagagtcgaaggtatagagcccgataagcagacatttggtcctgtagtttctgcagcggcgacagagggtaatcttagattgggaaaattggttcatgggaaaattttaagaaatggatttgaatcaggtagccatgttgaaacgttacttgtagttatgtacatgaagtgcagtagtattgatactgcatttcagatatttaagcggatacaaaataaggatgtggttttatggacggcaatgatctcacgacttgtacagaatgattgtgtcgatagggcattaactgttttctcgcagatgttaaaatcaagaatagagccatctactgctaccgtggctagcgctgttgcagcttgtgcaaaattgggttgtcttcatatgggaacatcaattcattgctatgtgttaaggcaaggaataactctagatatccctgcccagaattctcttgtaaccatgtatgcgaagtgtgggcgtctgcaactaagtcgtgtagttttcgaaaggatgagcaaaagagatttggtatcttggaatgcaatagttgctggatatgctcaaaatggtcatttatgtgagggtctgtttctcttctctgagatgagaaaaacacttcaaaaaccagattcattaacagttgtctctctcctccaagcttgtgcgtcgattggggcgctccatcaggggaagtggatccacaattttgttatcagaagctgtattagaccgtgtatactggtagacacagctctggttgatatgtattcaaagtgtggtgacttgaagaatgctaaaaagtgtttcaatgaaatgtcagaacaggatttggtctcatggggcacaattatatccggatatggcttccatggaaaagggaagactgctttgaagatgtattcagaatttttgcacactgggattcaaccgaataatgtgatttttctgtcagttctctcagcttgcagtcataatgggcttgttgaccaaggtttgagcatattccagtccatgactgaagaatttggtattgcaccaaatcttgaacaccgtgcttgcattgttgatcttctcagtcgagctggaagagtagaggaggcatataaattctacaagaaagagtttgcagaaccttgtatagatgttttaggcatactcctcgatgcttgtcggaacaagggtaatgtagaacttggtgaaattattgcaagacatcttctcctgttgaaacctatggattctggtaactatgtgcaattagcacacagctttgcatcaatgaacagatgggaaggtgttggtgagacatgggcccaaatgagatctcttggtttgaaaaaactgcctggttggagctttattgagttacatgggactatagagacattttacactagtcacaattcacatcctcgacttgaagatattgtattgactttgaaagcattaaagatggaaatgagaaaactaggacattaaccagccaaaaaggagtgtttggaaagtatgtttctatagactgtagttcacaagccatggaagataaattccagtttatcttcctctcgcagccggttgtcctagttgttgcttttagctcatatatcaacacactgcagcagggttacatatgtctcaaggcaaatatatcagagatttgctaatcaaagctcagatgcagtgccaaacctgcctcaactcccatgacaagtggtttaaaactatttgcttataatggaaatcctgttgacaatccacaaatgtacagatcaatagcaagagcccttcaatatctcacaattacaaggccttatggcaaaccccttgactacacagtggaatgctgctgtcaaaagaagcttaaggtatctaagtgggactgtttcttatggcattttattcaaacctattgcaaacatagaagttactgcaatttgtgatgcaggttgggcgagtgatcttgatgacagacgttccactttaggctattccatattttttggttcaaatttaattgcttggcaatgcaaaaacccaatcaagtactgaagctcagtatcgcagcgtagctcaagctgtttctgaaatcacatggcttcattctttgttttcagaactttatgttcgattgacaagacctccaattatttggtgtgacaatcttagcactgtcttgttaactcctaatcccatactacatgcttgaactaaacattcgacttggatttatattttgttcgtaaaaagatctcacaacagctggtttgtgttagtcatgtacctgct

SEQ ID NO: 2811 - DNA, 574 bp, Cannabis sativa
aggcaatgcttcaattctgcctctattgatcacaggggtagcatgattcaacccctttgtaggacttcattatcttataatgcacctcttacaaattgtcttatagtggtgttggtgttggtgatcccaggtgctctgcaggttccaagtccttcggcacccccagatgtggtaggttccatagtttctgataacgatattaattcagtagtacatgttaaaatgctttataaaacttctggttctgtatcttatttgttttgagagtctcatatggaaagtgtgccatttataaaaatatatgagatattccacttatcattaattggttttaggatagaatccgttaattacattttcatactttcttttagagtctgagacttacattattgcatgatttattagtccctttttctttttgttttctttggagacaggcccagagaacatacatatgtcagttttgttaatttacttcaattttatgttcacttgatttatttttggccgttactaatattcttttggcgtatttgttttccttattggctatggaataagttcaccgtat

SEQ ID NO: 2812 - DNA, 1307 bp, Cannabis sativa
taatataatgagggggaagagcgagatggatggatggagcgtagtgatgactagaaacacctaagcccatgattttgcatcttaagacaaaatgtgagctcaactacgaaacaaatatagtatataagcccaccccagcccagcctagcccaaacgccaactggaacactttctttctccttcctttccttctttcttttctaacaccgtttttgtctcagacagatactcatatactatcacaccacccaacctgtcctaaatctttttttggggtcaaatctctcaaaccatattcatttctattccttttactatataattccctcaaatttgtgttttatccggagatcttccttttttctcatcatcacaatcacaatctgaatctgtagaattttgatttcattcgattcactttccattcttttttttgttctctgatgtttcaattaggtttagctagaacttgatcgatcgagtttcaaagttgggcgtaatcgtaaataaccgtaagaactgggggcgaatcagtctcggtctcgccataccccggcggcggccccatcggctcaagccggcgtgggactctggttctttctccgacctagcaatgcgcctcgtgctcacaccctccattatcttcctcacgtagaatccgtgactcgtcacgcacctgatcaacaccgcggagcacctccatcaacctccatggacaattctggtccttctcccaattctgcttctgttcctcctatggaagagccggagtacttggctagatacttggttgttaagcactcgtggagaggccgatacaagcgaattctctgcatatcgaatgctaccattatcaccttggacccttctaccctggccgtcaccaattcctacgacgtcggtaaagattacgaggccgccactccgataattgggcgcgacgacagctctaatgagttcaatttgagtgttcgaacagatggacgtgggaaattcaaaagtatcaagttctcgtcgaggtaccgggcgagcatattgacggagttgcatagaattaggtggaataggttggccgccgtcgctgagttcccggtgcttcatctgcggcgacggaactcagagtgggtcccttttgtaagtgatttcgaccaatgccctgttactgtttgtgcgttcagttaggtcgttgtagcgattaattgattgagaaaaatagtctttgtaactggtcacactattttaactagtgtcttgaaacttattagtgttgatttttagtttttggtattttctggaaactagaggtt

SEQ ID NO: 2813 - DNA, 1699 bp, Cannabis sativa
acctgatgatcaagctagattaatctatttcttgccttttgtaaaatgacaggtgcattgtatttttctttgttcttaatatcaccttctacattgaggtcattccttggttactcactcttttgggcgagtaatcatgaggaataactggctttggtttatggatctcgatggagggtcgccgtatatttttccagttgagcctcttgcaatgaatagttttggagggcacatgttttctcagattacttcatttatggacaatccattttaccaacatagtcatttatcatccatacccggaagtttagctattgaaggttttaaccacattgccaagctcgccggtgctatactttttgtactgtctagtggatcaagtgttaacataagggaaatttcgggcaacccacatagttccaaaaccagaagctgtacatctttttctcaagttaaacacattaattctagtaaacaaaactttaaaaagttctgctttagttttagatcacaaggtgactctaggatgcctgtaatatttggcaagatatcgagttttgtctcaaagcttgtgttcagagaagctgaaaggttacaatcgttttctgtactttcactcgctgctgcgcttgttccaccattggacaacatgtaagtcattaaatcttttgctagattgttagcttcacattaaatttttatctagtagtaatatatccttactatgggaaacttgtttatgttgcttgtctccagatcttcaaaggtgttaactgctccattggagaattctgatgtcatggttcaaaggccgtgtgatgtggaccatcaaggacgtgcaggtctttctttttccgatttgaattggagaagacatgtaattgagcccagaactggcattgagtttcctatgattttgcacaacattttatctggagaaagtaattccaatttatgttcagaggtaagcattttgaacataaatttttcttctgacccgaaattaatgcctttggcacctttttttttttctcctttttataagagtctttatgacattttctcaccctgaaaagctgacatatgtgcaattttcgtctaactctcttctacatttatgtcaggtccttgttggaactggatccagaactatgacaataattaaagtgaagtctttgaagatctatgcctacggattttgtaagtttccttctctggttggtgaaaatattctatccaaatagcttcccgaatcctgaccctttaagttttatcttttcttttagatattcaactgtcatctgtttgtgagaagttgggtcaaaaatatgcttcattttcggctgatgaactaaataagtgccaagaattttacgacgatcttcttaggtacttgatattgatgttaaacactggtttcccttttgctgtttagtctcttatgattaattctaatcctctgtttgacgaaagaggagtttgttggcattgatggattttgcgttttgtttctcttaattatgccgtatttgaaatagaatgaattttagtctctaattttgtttttctcatgcaagttcttttttgaacctttcagggaggatattggtatgactgttaggcttgtggttagttgcaatggaatgaaaatcaattctgtgaaagagtaagtttttgttagaataaaaattaactctcc

SEQ ID NO: 2814 - DNA, 1466 bp, Cannabis sativa
gattttttttattattattatcaatgtagaaccaaacccataaaacaccgaaaattgagcaggtttagtctataaataccatttgtctttagtttactacgcttaaacttgtaattagacatttttaaacttgtacttgtgttccggtacattaaatttacctgtgctttaaggtatgttgtcggttgttctttgagcatccttagtgtgtgagattggagctagcattcacaacattctagatgactgttgctggctttgtcttagtcccatggagtgaaatttctgtcatgccaagtataccacatgaggctaacagctccatttgttggtcatcatataagcataaaaattggaataattcactgccatggaaatggaatgctgccataaaatccaattggaactgagacatgggctatataagccttgccttttcatagaggaaaaaaacatgagtcatagtttcacattgatgatgacaatgggagcattttggattcaaaacaagtttctgagcatttttcaaggaagaaaatatcgactttatcagctgcgttggtatttttaaatttcggtggttctgttttcttctttaaacaatttatctctttttgtccaagactagaaaacaacaaaatgaagtgaaatgatgggtccagagaatcaatgaattgatttaaagaaaaactagtgataaagactatgcaattctattattatttttttctttgaaaataataataatatggctgaagtatatctttctctctaaatatatatatggtataaccgaaagaataaaatatttcttgaaatgtcaattctataattgtgtactcaaagttgaattccaacttgtaagaatatgtactctttacttgtgtgtcatattcttaatagaatacctatgaagaagaatgagatatcttcatatgagttagagaggaaggaagcctaataaaagttactctaaagtgtgtgagagtatcttacttattgtaagaagaccaaattaaatagaatcaagttggattcaagagccataaaatgtgcatttaatgttttttttttttgctaatagtaaagcttttattcaacacagaaacatagaagttgttagcaacaaaatgtgctaactccctcttaaaagaaaaaatcgaggtacccgaaagtctagcccaaattgctaaatcattggcatcaacattgagatgtctagggatccaattgaaaaaacagtttgtgaaaaagaataatttaaatagaacctcacaccagtaagccgcctcccaacttggccaaattctgctaactgtggcatcacataacactttacaatccaaaaaaatacaaggtttgaaagctaattctcaccggtagattgaatggcaatgatccccgcatagatctctattttgagagcaaaattggcctcaaaagcatctgatatgaaacccaacacc

SEQ ID NO: 2815 - DNA, 2416 bp, Cannabis sativa
catgcagagatactttttacaatttttttctagtgtcccattatgcaacaatagaaatacttgcctctcacctttttctcattggacttgagctggctttgtttttctgcgccatgggtgacttctccctttgggcttgccaccacttttgtccttacttttctatttccttttcttatcaaaaaaagaaggagaactagattttctttcaacaatgtttattcaccttctttggacttatccttgttatagttctcaaacaaagccaactcgttcaacaatggagtcatgttgcactctagcttgttcatcacaaagtttctggtgaaagctttgaagcatggagatagcaactcatggatcatgttcacttgagtcctttcatcaatgatagccccatgtatctttgtctgatgcgttagctcaatcatgttcaatacaagagttctatcagggacaccattcttccttttacaattcatgtagctacgagtagcatcatgtcttgcttgattagactggtgccaaaacacggtctgtagagaactcattatttgagatgcattcttcatatcttcatgtgtcttaagcaaaacatcatccatgctaataagaatgaaaattttggccttgttgttgaattgaatcttagcataatatttgtcgcaaacatttttcagggcattggcagtgggctcctcaagatgtgccttagttaggaaacaattggggttctcgctgttgactcagaattttatcaactgacagcggagtcttatttattgctgataatcaccatgtgtaaataataaaagtgacaaagatatttttataggtccatcccccttgattaaacggtaatgatctactcctctttttgttatattgattgttgagataataccatgcagattataggcttgaaccttgtaatttctagctatgggtctcttcagtattatcgtagtgagaattgagtgttacagattcaaaatatgtgagactttataaagaaaatatactaagtatctaatgagtaaaggggcatgtgacacttagagttcaagtctcttttcatgtggtctaattccttttttacgtagggcttacaaaatagtcgaattcaaataggtaaataccccatttaaaataggaaaataactctttttatcttatatttaaattacaaaaaagataactaatacccctaaagaataacctgatattagtttaagcaagaatccttatcttcatgggcagttaaggttattccgtagctaaaaaatttagcttatggacccctccctttgtcaatcctctatttgcagctatctggacgtgctggccagcaagccctatatttagggcctgatcgacacataggacttcatcgcccacccaggtatagtccaaccagggttccctggctggccattttctctttgattaatagccttagaacccttgataattgacataccatgcaaggtgactttgtcaaactattgattggtcgtactccataaggtttaagttttgtctatgtggacatgccacgtgaggtgggccaatattgggataacatttatccccccaagtccctgtgcgaacatctgtatggatagggacttttcaactctagccttgactataaaatctttaaccagacagctttgcctagtcagatataggactcttcagatgacttgtctttgtgacaaaaatgactttattgccaatcattatggggatttgggtaatggttgtacactttcccatttttgaacctttggtcttcttcgcctctacatggctaaatatgtggaagaaataacaacccattaagttttgtagagaaaactcttcaaaacctatataaggttcaattttcattatttttgtccacttcctttatcccctctctctctctccttcatactttctgtaagaaaaagaaaagaaagaacttttcatttcctcctcaagcttgacgcctcaagcagccccattcctcgaggtttctaactttttttatgattcgatcattccccaagcatctatagctgtcttcatctgtgcgtaagtctactttctcattattttcttcaatctgccattgatgactttaagctttttgaaattcttgattctcacattgtagtgtggtctttcttacattataatctccttaatatctttaggacgtataatttatgactttctaagaaaagagattggattttgaacaccatttggattcttaactctttcagtcatgaagaacacgaagaacattgtttgaattttagaaaaataaaatttttattcttttaagcttttgcctggacatagggtatgttcatgaaaccctggccggtttgtgactttggacctgagaacttggtcagttcattgc

SEQ ID NO: 2816 - DNA, 588 bp, Cannabis sativa
tgggagataatcttttccactaatctctcgcagacttaggcagagttaaggagaaatagaggcattttacatcgtcactcgccttagctacttgcatcatttaggtgtatttagatagatggaccttggagtctgtcataccttcatacatatccatttgtggcattctgaagtattctggtagctgtacctcgattattcttttcacacatggttcggtatcatcctcttttgaattggatacagttccattttgcttctagcagttgcgttttgtgaggtttgtcaaatgttcatttttttgttccagacgcttgatggttgcatcttgagactcacacccataaatttgatcattgatatggtttctcaaatcatctttgcgaggtcttgctttcttgtttctagctttttctcttttagcattcagtcatgcccaaagatcattcgttgaaagacttccacttctgtcacctaataatggatgaatctcatctacatcatcacttcgactaacaaaattcttaggatgtttttcgtcttttccagtggcaggttcctgtgtttgaacattggacatgtctttct

SEQ ID NO: 2817 - DNA, 4359 bp, Cannabis sativa
tttaattaatttcaaacaagtaaaacagggaaaaggcgataaaacttagcagacaataacgaaaaagaataagaaaacacgcagaagggaagaatctcactttctcattcactcttttgacgtaacaaaatttttagaatacattttacctaataaatcaaaaatgagaggtaaacaaaaaaaatactttgaactagtgaacatgaggaaaaaccattaataggaaaggactggtttgcaatcaagttgatgcgttctttcgagcaaaccgctgtaaagaaaccggtagtacagcttcttcacttggtctctgcttctttctagctatctgttcttcctctttcatttgttcatccaagaaaggcctcttggctttggagattacctcgagtttcttcttcactcttttacttggcttattctttccttttgttttgtacttgaactcggtgtctttggcagcttcaatagcagcctccatctcagcctctttctcctgtttcgttagattttttttctttggaggcctcactgaaccaatgtttgtgggatccaacatgattgtttcaggagggagcttgtcaagaagagagcgaacttccttctctcttcgctgtttggatgtttcgaatggattagcaacccaagaatcaaagttgggttccccggaacctggaacgagaatgctagaccagcccatcgagtgccctacgcccaaaacatcttcatacggtctaaacaacacttttcctatttggtatccttttactatagaatggttcatgtatctgctgtagtcttgagttccagacaaatctctaagaacttgtacatgagatccggttccacgagcaagcaaacctttctgactgaaatccaaggtctttgcatggccctgtatatcttggagctctttatcaagtttcctcaagtcccaaattttaattttcttctcttttcctgctgtggccatgatttgcccattggggtggaacgccagagctgagacaggcccacggtgacacaaaatcttaagaagaggagcagaacttgtaggcttccacatgctaacagtaccacccgaatgacccaaagcaacaacggcattgaaaggattcacctgcatcacatcagttcggcctaacccagtcctgtaattacctaccatctcacccatggttacatcctgataatgaagttgtccgaatttgtttattgatgccaagaggaagtggttcttcaaaaattgaagccttaaaactgagccatgatcctacagcatataaaatataatgattattaggttgaaaaataatagttaaagagaatgaacaccagattgagcacccttgagttgttgaacaaaacttaccttcaagcaatgaagctctgtgccatcccggttataaatgtaggtatacctgtcaataatttaacatcaataactaaattatccaaatgatcccacacaatgcttaaagtatactttcatcgttctaatgaaacctagtaaccaaaaccaaattactcagtaaagataaatgacggcccaagagcactcaagtgaaatcactcgatatgcagcttttagcaaaatgtggcactgtttccagttcataaatataaaattgggaataacagttcagttcaaagaaaactggatccaattttaatattcttcaaaatagtatctataacattaatgactagatcatgtaacagacggtatttgtcaatcaacaagtggtgagtacaaagataacaaacactaatatgaagctcttactttttctgggctgctgcaaagaacaattcattgtgcaggaagaccacatcgcgtactgtttccctaacctgaaaaaacaattggcaattaagtgctatcaaacctaaatttacaaaacacaagcaccctagtgaatgaaaggagatacaagggcagggtttttcaaatagtggaaggcactttaatactaagtaaacagccagacataaaaaggacaaagggtccctaatcctttcaccgttgagggacaaaaatataacgaatatattagttatcccacattcataagacgaaaaacataaaaaactactcaacgacatcttgacttttgaaggatatacctgcaattccttagttagattcatattcttcatgtcaacaatggccaggtggcccttccttccaccaacagccatatgacgaccacttgaggtaaaatccagtgtgtatggaccaagatctgaagataagatcgcaaatccaattcttgagtaactcgtgtttttcaattttcttcaagcataaaaaaattttactaaggcggaatgaagaaggacaacagtaaaatatcaacagaatagcaaattcttagtaactaatgcccaaagatttggccaaaacaaaatactagccccacagaaaaacttttatgttctttaaaaaaaaactaaaagctaacgaacattatgtcagagatccaacttaatgctcacagacttggatgaaacaatatacaaggcccttaggaaaaaccttcttaaaaaacactagtggggtgtttggtttaagagttttactcagtgggttttagttgggaggagttaaaactaaggcatctcaaactcaagtgtttaaagcgcttgagattaccccaaaaataaacttaagataaggacccacacaaacataagccctctactaaaactataccaaacataggtttgtttttacattcccacacgcccgagaacccaaccccccataaagctaacgaacattaagttgaagatccaattgcaattaccaacctatctttattttaattatcaagcaagagaaaatttctgattaaatttatgttcccctttccatcaaaatgtatctgccaagtcttaaaaaactccttcttcgataattaaataaacaataaatttggactatttactgtttgttggttttataagttcttccaagaattatttcaaaacagaaagagatcttcataaattattttcaaagaacacaaacattgatgtctcaagaaatgttcattgatcaagaaaaaacctgtggattaaactgttggaaagcaataataacagaacagttgttcttgttgttacctggcaaaataatatcaaactgtttacgtgaacttaaaatatcaacttctttagcaatatcttcctgtttgatcctccatgtcttctctatcccttcaacctctaggaagcctcccacacttggcataagccactgttaatagaaatagaaaacaaatgaggtaaacataaaggagatgatcatagacactagttttaaaatatttttcccttttcgatgtccaagtattgtaccaaactgactaattacaaaagtaaaagcttcaccttctcagtcttggcagcaacatctgcagacttgccatacaactcttctctgtttgcaagttgccccttcaactttttatcgttcaatgcctgcaacaacggaaattgattaagcaaataaacaaccaagcactaacatcatacagaatgacaaataagtagccataccttcaagttagcaccttctcctctaagatacttcttcttttttatgtctagctcatcaaatatctgttgcaattcaaagagtatttcagatattagtatttcatttaggtaaaaagatatataaataaagagtcttgagatggatttaataataaaaaataataacttaagtacagaagctttaaaaaaacacagctaaacaccaatgtggatgaggaaaaggacaatttattcaaggttcgaatgaaaattgtggcttaactaccaaattcaacaattttatgtataagtttgagtatgacaaacaatttctgggcatctgtgaataaaatttttggtaaaacacaaaagctacaatcactagatcgacgtcccacaaaaaaaaatcagcatagttatttaatatgacaaaaagtgatatgctaaaaaattaaataattgacttgcagtctacaaacaatttcatttacttacaaaaacacaacacaattaattttctaactttgcacataatattcaattagccgacattttgtataaattaacagttgaacgcacctgatcagtaagaggtacaatcttctcaagtgttccattttcttcttccacacccatcttgcttgccagaaaacttctctactctaatactgcagaagacccagaaccttaatagttaacaaatctcagatactgcagaatacccagaaccttaatagttacaaagtaacaaaacgaaggctgtaatggtggcaatgcttataacaatagaaagctacgaactttactataaattat

SEQ ID NO: 2818 - DNA, 2760 bp, Cannabis sativa
tctctctctctctctcttcttccccaaaaaaatatatgcctattcaaatagaaacaaagctgttttgttttactttttattttttttttattttactttcatcaaaataaaaagaaaaaaatattattagttgtacttttcatatcagagtgaaatatgcacagaactatttgctttattttcttttacagtgctccagaaataaatttaaactgtacacacacaattttttttatgcaaatattaatttgggtgttaatctgaatccaaccacaacaaacccggcatacccgatcgcccataaattgggttcggttgcacatttttaatacccgaaatctaaaaacccgaacccaaccatccaaaaacccaaaaatccgactcgtgtgcaaccctaattgtcaaaaggaacgcatgcccacacacataagcaacaaggccgagtttaaagaaagcatagacatgttgttgatgtaggcctaactcttcttgctcaagcagaaatgcctctccacttttggtgggaagctttcacatttgctacctatctcataagtaggctctctatacccaatctcaactatgaaataatatacaccaaattgttcaaaaaagaaccagattataacctcatcaaagtctttggttgctcatgttttccacttcttagaccctatgaaaatcataaagtgtcattcagatcctctaattgtctatttttggggtactgtctatcctcaaagggatatgagtgtctccaccctagtggtcgaatatatgttgccaggagtgttacctttaatgaaaatgagtttcctaacaactctctttttcactccaagcaatctcacacctcatctccagctgtcatatttgacagcaatgattttttgtgttcctctttcagcaacaacaccacagccaccaccattacttccccattctttgaacaatgatttctatcatcattccaccacacagtccactccctctcacattcactcaaacaactcatcacctaatacacataatcattctccaacccctacttcatccccatcctctaatcaaaatcctactggcccaggaggcactaattctcaaagtatgcatcccatggtcactagatccaaagtagaaatttttaaacccaaagtgtaccttgccacttcatctagtgatcttgagccaaccactatcaaagttgccttggtcattcctgtttggaaccttgctatgacagttgaaatggttgccttaagaagaaataaaacttgggtgcttgtacccaaaccaccaaacactcccattgtcagctataaatgggtttatagaataaaatataatgcagatgacagtgtggaaaggcacaaagccagattggttgtaaatgattttcaacaaacacctgggatagacttctttgagacatatagccctgtcatcaaaccatgcacaattcgggtcatgttcacccttccagccacttacaattgggatattcaacaagttgatatcaacaatgcattcttacatggacagctttaagaaatagtttatatggaacaactacctggtttcactgaccctcaatatccaactcatgtttgcaaactcaacaaggcaatttatggtctcaaacaggccccttaggcctggtttgacactcgcaaaacatctctgcttcaatgggggttcagtaattcaaaatcagatgccaacttattctatatgaacaaaaacaagtcgttattactcctacttgtttatgtggatgacatacttataacaagagttgattcatatcgaattcagcaagttatcactcctcttgaaactcaattttcacttaagcaacttggtcttattagctacttccttggtttttaagtaattcaagacaactctacaatatttctcactcaacacaagtacaccaaggatctactaattcgaaccaagatgactgatgctaaacctcaatcaactccaaggtgctcaagctcaaaattgtctctgctttcaggcactcctctaccaaatccaactgagtacatgagcattatcggggctctccaatacttgtgtcacacaaggcctgacatatcctttgctgtcaacaggttgagtcaatatatgcaatctccaactttagaacattaggggctatcaagagggtgcttcgatatcttgctagtactatgcatcttggccttgtcttcacaccatcacataatcttcaactctaaggctacacaaactcagattggacagggtgtcatgatgacaaaaagtccacttctggttacaacatcttcttagggaacaatcttataagctagtgctccaaaaagtaacaagttgttgctcgatctagcacagaatctgaatatagagatttagctcttgctacttcaaaagtaatttggattcaatccctcatgtctgaactatccacttctctgctcaattgtccaatcttatggtgtgacaaccttggagctggatctttagcatctaattttgtgtttcatgccaaaacgaaacacattgaaatagacttgcattttgtaagggattgggttctttctaagcaacttgaagtacgatatgttgacaccgtcaatcaagtggctgacatattcactaaacctttacctatatcctccttttccttcttaagaaacaagttgccacttggtgtccacccgtgtcacttgagggatgatattgaactagtagcaacagtcgaccaacaac

SEQ ID NO: 2819 - DNA, 2437 bp, Cannabis sativa
attatattaaattcaggagccaattacactcactaataccactctccacccacaaatatatccagctttttgaataaatacaaattatattcgaaaactgggggagcagtggcatggcagtgtcatgcctaaaaaaataccatatatataaaataattacaaaaaccggcacccaagttatcactttaaaaaccacctacatagaaaaatgctccaattgatggaaggctttacgcatggcagtccatcctcgttggttgagggatgtaggaggacgtataatctcgaaaacaactcgaggtgattcttgaggaaaggataagtgccaaaggtggcactggttcaatacgagaggaagcatgagtccccaagccaaggaaaacatgctcaaaccagggacaactgcagacctctgaaaagggcaatgggggaatggggacaggctcaaagtctcggaagctcaaaaaaggatttaaagacaagaaagcaggatcctgaggctgcaagtctgaaaaaatattagaagaagaaggattatcccttgggggttgacgtgtttagtcttttagcaagaaggctatgtctgcagaagaaagttccttaagaacaataagagcccctgaaacaaaaattctcaaagcacttttaagagtggcaaggttcttggcttcactacttatttatagccaagaacgttaaccaacatgcactaaggaaaggtgccacgattttgtacacaaaaagccctagatcaattaagacagtgacacgtgtcaactaattatacactcctcaaatctcgagaaactctaaaagcatatatgtctttccagtttttaaggtatctttcaagttttcaataaaaaaaaaataaaagtaatataatgaatgataaatataaataacacactgaatgtcatttataagggaagagcgaaggtctcagtaggcaaaagaaaacaggtaatatgtggtgataggcacgcgataatcataataaattacaccaaaattcagcaaaaacaaaatatacacaatataagagccccagctaaggtaagactcctttttttttaaaaaaaaaaaagaaagagaagaaactaggtaaaacaaactaattaaattaaaagtaagatacagtatgaccgacgtaacaaaccataacaagcaaaagggtgaaaaaaagtaaaaaaaaaaaatgaactaaggaaaaactaaagctggtacatcaagaactaaaaatgctcacggtaagggtgatgccagcacaaaatgcatagagagcttgggatcacgatggaacccctcaccagccttttcttacactgacaacaaccaatatgaattctaggaggatagaaggggaccccatcccttaagcattgctccatccatcttttatttgctagatgcttgcgttccaaatctttgtgccattcatgatgattcctagctcgcaattgacagagatcgcatcgacgttcggcacgcagacgaagagcatggaattcagccagaacattggcagtagaaggaacattttgcccttcgttctcaaagaagttctggagccattcttcatcagaggatgaggacgtgtcattaggcctagcttgataggcccgcatcatcctcccaacaatggcctcaccactaggccagttgctgtatgagaaggtttcaggacaagtaggggagcgattcccaacatcagaatgaaattcatctccactcgaggattggggaagaggggagccttgacagtttaacatctcatataaaaaggatagaaatattaagcaaggaatttggaaggagaaattttttaatacaagttatgagaaaatgcacttaagtaagttcaaaaaagaagggaaggtgggaaggtgaagccaccagtcaccgaggctttaaatgtcgttaataaaccccactcccacgagagaacaagtgttgagtcaccttgagagttaattgagtaagaaaaaatgataataatagtaacattaacatataaatatagtaataaccaaggcatcagcctaagtgagaatcattacaaaccacataaaaataattgtcttaaatagtacgccaatggtggaaataaaaaaaaaatataagaaaataaaaaaaaaaaataggagggggagataaaaagcaatccttaggcgtcaccgacaccgtcgttatcatcactcgccccgtccgagtccgtagaagattccacaagatcctcatccttcttgaactcgacatacctctggaaaaacttcttcaagtcccacgaagcagacttaccctcattgaactcagaatagagtttaaatacggactgataacaacaatacgttgttgtatctctgccgatatttttctaaccatacaattaccagtacacttatagtgattcccaatacaagagtaaaagtagcag

SEQ ID NO: 2820 - DNA, 1097 bp, Cannabis sativa
ttgcctaggtaattattatgtatgatgacgtgtcatataaacttatcttagttgaatgaatattctctttctaatcaaacgtatgttattgtaaatcacgcttagtttcaaaatgagaaattttacatgacaataacactaagaccaaaaggatctcatttttaattttttatttcccaaagaggtaacccttcaacccgacacaaagagccccggattggacactgaactatggtaaactttctaaattattgggcaacactaaagaggaatgggaaagctactcttcttcttcttcttcttcttctactgctacttgtgcctatgaaaaactctccgattattctcaactttgcacaactcaaaggttgagtgagttaccaagagaaagaccagacctttgcttcatcccatcaatgcccatgtagaaagctcaactgggttttcctttaaaccttgaaaggaaactgtttctttatttgctctcctttccctcttttcttatttgggcttgctagctttttttttttcttccattattctgtctcaaagggttaagctgtttgtaaagatgccgagaccaggaccaagaccctacgagtgtgtgaggcgagcttggcacagcgatcgacatcaacccatgagaggttctattattcagcagattttcaggttctgggttttctctgttgtggtattttatttctattttgtcgcgatgtgggtgttgtttttgtacattttgctgattgcccgccatgtgtttgattagggttgtcaatgaagctcatagctcttccactaaaaagaacaaggaatggcaagagaagctacctgttgtggttttgaaagcagaagaaattatgtactcaaaagccaactccgaggttttgtcttggtttttgtttactagatcctggttgaaacttgtttgtttattgctttactcatattgcattagtttaactgctcaggctgagtacacaaatccagatacactatgggaaagagtcaatgatgctattaacaccattatccggagagaggaaaccactgaaactggagaccttttgcccccttgtgttgaaggtaccaca

SEQ ID NO: 2821 - DNA, 2497 bp, Cannabis sativa
aaattttttgcttccactccacactactcttttttctaatttgcttcacatggcttacaaaaaaaacactacactacatgcatgtagttttcagttttcactacaatttataaaaaatttagtgtatatttaggggaatgttatggtacaagtgttactcttggggatgttttattttttaggcacattgagaaattataatattataattttttttatataatagtgtacgttgtagttataataaatatttatgtgattttttaatatttgtgatatcaaaatgttgctcgtgtattttttttatacgagtgtaattaattatttttttaaaaaaatggcatggtaaataatgacagagctaaccacaaaaaaaaatagagtattaataataaaaaaatgtaattttaattgagaaaaatataatttttaatggtataaaaataaaaatatgtaagagtaaaaataagaaatataaatattatgatgataaaaatgaaaaatataaattttatagagataaaataaaaaatctataagatataaatataaattattaactttttaaggacaaaatgtgaaatatttaaaaatatgtatataaaaatataattaacaaaaaattgtagggggcaaataaccccacatgtacatgtctctgcttggttctacctctaatagtaaactataatattcataactttgaaaaaaatcgataaaatatctactgtaactacaatatttactgaagtataaaaaaatgaattataatttatccacgagttcaataaatataaaagtggtatcttactctaaaacttcacagtatatgtaagtatatactactatatctatatagcatctaattctctaagttgaaaatgcttggaccaccaaattaccatttacactaaaagatagtaatgaatatgataaggtattgtaattaagtttacacaaattattaaatggtgtgcaaattaaataaatatttttaatgtcaaatttacatcttatgtggaagtggaacactcttttaaataattttttgtaaaataacatttaaaaaaaaaaaaaaatctattttaacttattactttaatattaattttatcatttacactcagaatatttttgcacaattcttatatgcattagtgctcatgttcaaataacacaatagtttccaactagggcacaaactcctatatatataaaatttgtcttcgtaatctatagtaagtgaaagaaataacggtgagcataaatcgattcaatctaatagcaactgatcgatttaattacaatttaatattaaatatttaattgtgatcggattaaattggatattatttttttatatccaattagatcagatcagatgttgaatagagtatctgaaaatttaatacatctaatatccaattaaattaattagtatttttatttagtttgaataagtaattaaattttatattgttatacataaaatacatatgtatataaagattaacattaaaattttactatttttttctccaatacatattgaatttaaaatattagatgaatttaattcactctaaaaaatattaagtctaaaatattgaatgaacctaaattgaatcaataaatatatataaaatacaatggattgaaccgatccattatagcatctaataaatattaaattgattggatgactcaaattaattaaatcatatcgtatggtaaaatctagcatccaatatataattagatcgaatctaaataaatcgaaaaacacgtccaataagcactcctacttacatcaattattagataaaatttgtgttgtaatcaccttgatcatgaacaatctagttaagataagcactacttataagaaagaaccttctttttttgtctgatgaatataagaaaggaacttgatgagaagaaaacatgaatctgtacatatatttatatatgacccaccaagttgataataccaaagaaaaagggtaaaaagagtatgaagaaagaatcttaaggtcatagtaagataaagttggttccaccatgttttattatgtaattgggtatggggagcaaatgaatgtgacctccacctaatgtgaaatgtcactaatattaggcaataataataataatatcagattcaaatctcatctcatctcatggcccatctcaactagttgtactaccaaattcattaatattatgcaactgcatattgaagagcactgattagtactaatcacttaaaaagacttctaaaaaatacttgttagttataacttaagaatgtttactttattaatctccaaatcaaaacttaacaataataccctttttctttttctcccatacacaccatcttttgtccctttccctccaaaaatgcacctcatcttgaaaaggagtctgttgagtgttgacagtggtgagactaaaacccatcacaagaatatcaattttcttttctcaaaaatgg

SEQ ID NO: 2822 - DNA, 1497 bp, Cannabis sativa
tacctagcttagttacgttgaatattgtagttatattagggatctattaatttcaaaactttaaatatattgtcagattcaaattaatttaaaatggttaatcaaatcacacgtataaaatatcactaaaacacgcgtaatattattttcagtactgtaaattatttaaaacttttcatatacaaacatgcatatcaactataataattatatacgttgttacatataattaaaattaaaattaagttgtaatgtaggaaacaaccctacaatagaagtgaaagtgatgctgctttctatgtatattcaatttaatatgtataattaaatattttgtttttaattttagttattaaatgatgtgttaattatgaactttaattagaaatgaagataatatatacatgaaattgacttgtgaatttataactgacacacattttaattttttaaaaaaataaatagggacaaaataaaattgacaggacctgaatttagtgaatttgattcagataaggaagcaaatagtacttaatctaaagattgtggttggaattaatataggaaatttaaggaaatcaaaataaaataaaaaaatagtattaataaatatgaatggtacatttgatcatgtgagacatatatcaaatataatatactatgttcatttcaaatatatatatatatatatatataatttactatgtaattgattttaaccacaagcattttcattgtgatttttttttttcacatttagatttgaatataggattgtaaaaaccatctcttattatctttatagtcccaaattttattatataattatttaaatattccatttattgtataatatttatattttgtattttttttttcatgattatagtaacggggaaagagcgaacggttaaaggttttccaaaaagacccgactttaacatattttcatcaagtgatgtaaaatacgaagcaaaatttgacataccaaaagattttggagaagtgggtgctataatcgtcgaaaatgatttcgaaagagaaatatttttaaagaatattatactggaagacttgccctccgaaccaagcacccttgaattctcttgcaactcgtgggttcagtccaaacatgatgtccctactgatcaacacaagagagtcttcttctctaataaggtatgtagtaattcatttcaatctctacaatgactatgaataatgtcactagtatagtccaaaaaattgtcaatataaaagttgtactgacaattaatcatattaaatttatataataattcacactacaataaaaactgtcattaggagcaatttatatagtaatttattccagaaaattatttggcgcgactaatcattcttgatcgtgcttgaaaatcgatatcaaaaacaaaatataacgacatgccaaataatatcctcagtataatctagaaaattatcaataaaaactgtactgacaattaatcataggaa

SEQ ID NO: 2823 - DNA, 1038 bp, Cannabis sativa
tatatatttttcaaatacaaatattaattaaaagattataataaaaagttgatggtattactcttctattctatatactaaattaaattatgagatccaatccttaattggattaacaagtatatatgttcaaacacaacgggtgtaacttagcatatatctacgtacactgctatatttctatttatttattgttgaatgtatatacatcagctcctgtaagctttctcaatctataaaatataaagatgtaatttaatggtactccatcaactccttcatcttctaaattttttacagaaggctacattagttgctccacatctagcgaagcactataaaattttcaaaaatattttaatcatttctcattccttctattttcctctccctcattcccacttttctcttttgcttgacgtcaacatcttccttctcaacctttctttgttgcttggcactgaacaagagatcatcattccacaattatttcattatttgggaagcttggagagaaggaattgaactatatcccttgatttcctctcaattatctccttgtgacctaaatcttaaatttctttagcattaaaattcatttttggtattcatcttgtcgtcttcaaactcatctacccccaaaaaacttcaactggttcaactgggtctcctcaataaattttcaatttcatataacatagctaacaaatacatatattaatattggattttttttctttcaaaatataaattcaattgatatataaatatttatatgtgctcagttgtttctttattgaattcaatttttgtgagttagctttattttgtaagtatcttcagagtttatctttcaaactgcagtaaattgacatttagagatatatcggacattttgagggatttgagcaacaaagggtataatttatccttcttattttgtttatccttaacttaataatagtataaatgagtagacactcttaaggtacctagtttatcattggcttagttagttacactactacaaaattgagt

SEQ ID NO: 2824 - DNA, 2263 bp, Cannabis sativa
caattcatcattccgtatttgaatatttacctggacatatatgtcaaaaatgcgcctcccaaggctttcatatgtgtgtccatttgtgaatgttatctccgcaaaatggagattcactgtgtagttcccattttccaaacaatgatgaaaataagtgagtgaaattggtgctatgcgggctgctgtatatagctcagacaaatttgatgacggaaaatttgcaacgtaatatttatattggacatcattatcatccagaaagtctccagtactactaaatccccaatcacccttttcgtttaaaaataattttgcagtgccaccttctacatctccatctccctcatataaaagtacattgttattgatcttgactttaacgtcctttccaccgctattaacatgccaacaagttgaatctgccacaatgatatggtgagatcacacattatggggaagcaataatgtgtaaaatataatactgaatattcagcaaaataaaatgactggaacttagtactgataaacaattaagccggaagagtaatctagtttaattcctgggttggaggttgttagaatttggaataagatgcatggggttccattctatctcaaaatcaattgacaatgggaggagtagctcattcatcttatacatggtatcttatttctacacattagtaatgtgggactaactcttatagagttttttttttttttttttgaaaaactcttatagagttaatgaaatgaaaaaaaaacaattttcattctatttttttgtttggttgcattttaaaatattagaatgtcattccattgaaatgattttttcaccattttgttggaatgactttcataatgaaatagaaaggaagactattccaagtaatatgaggaaaaaaattcaataattttaatatcaattttttaatatattttaaattttattgctattcccattctcatttccattccaattttttcattcctcccaactaaacacaaccttaatgtctttaagccaaataggtttagaaatgaaaataccaggaagtatttatcattaggtttggatagtaagatggaattaaatgaatgagtttatcatttgccaacactaaattagaagaaaatagagtacatgcaaagtagcaattctttttctaaccaaaaatgaaaagaaagaaaaacatgaaaatggtgattggatagaataaaatatttcagaactttccaaagggattaagttattccaaactagggggattgtttaggttgttgggtgaattttttcagtatctttctaatttgataacaaaaaaatattataaaattatccacagtattatccactcaaatcccacttcccaaaagtgacctatatagatatagtgataacattatttcttgaacccagttacataatataatcatttcggagtctctgttaaatatgctaggatttatttataagtaaataatgaattcatcccagaatcctaatatatacttacatcgtcgacagttagaatccttcaagcatggaaggcctcttctaagaaagaacgaaaaaaacaatctattaggaaagggaatacagaccaagctttataaatatgtactgtaacgttagaatcctgggactgaacttgaaaaatgttataataaaagaaggcaatccacaaaagttgagaaaaagagcatctcacgagttgttccaagaggaagagcttcgaaacatattcaggtttagattcctaaattaaagggaaaaaaaattaatcaaaaccacatgcacatgcacatgcaaatgcaaactgtaccgaaaataattatcaaatagaattctgacttgctgtccaaacaagtatgttcatcaggtccttgccacttgaagttattgtatgaaagatcactgttcataattaaatgttattattagtcacataccataaccaaaatgtgtgtacaaaataaatatttagtgtaaaagaaaaagcatctgattcagaatacagaacaggaaaatagctaaagttactccacactgaattttaaaagattataggtataccatcatattgatgaaagaagaaaactattccaaaccataaatcattattaaccatcatccaccttctcccaaaaagggtccgaaatttctccttaaaaaacaaaagagaaaataatggaatagaaaatgaattgaggtcaaaagtctttttgttttaagaaaacctatttgactagaagccct

SEQ ID NO: 2825 - DNA, 1386 bp, Cannabis sativa
atgtgaccgaactttacccaaattagccattatttgctcaagttatcgacaaaagtagaaggaagtctaaagcaactcatgacatgttggaatagattaaacaactgctttcaaaagaacttatttccctcctattgaaaaagagcttatcattccaagcatgcactaatttctattttctttccttaatatcaccaaataattgctttttatccctctctgaataagcaggtaagcctagatatttctcatggcactcactaatatgaatcccaaggatttgctggaaggaatttttccagcttttgaagtgtttggcgagaaagacatgacatatttatctgagttaagctcttggcttgaagcaggatgataaatatataatgcacgcttgattgccccacaagaacgattatctgcttggcaaaaaagaagattatcatctgcaaagaatagatgagatatagatggagatctacaagaaacaaccaaccctttaagccttcctattttttcctcaaattttaatagtctagaaagaccttcagaaaaaattaggaaaagatatggagagagtggatccccttgacgtaatcctctatgcggcattacagaacctgaaactgaactattaatgagaaaagaaaaggtatttgtgtgtaaacacgtcatgatgagagagatccatctgatattgaagcctattttccccataacagctgctaaaaaagaccattccacccgatcaaaaacattactcatatctagtttgagtgcaacatatcctttggaacctctctttcaatgcttcaaactatggaccatttcaaaagccaccagcatattatctattatcggtctagtagggaggaaggcactttgagtctcagagatgacatgagggagaacatcttttaaatgaataaccaacattttgaagatcaacttgtaaatgacgctacagagacttattagacaaaaaaatatttcatggtttgaggccttttaactttgggaatcaaggtgatcaaggtcttactaaaagcaacatgattaccactatcatttagcacatgaagaataactttagaaactaatttaccaataatatgccaattatgttgataaaatattgctgccatgccatatatacctggacttttatatgaacccatattgttcaatgcaataagaacctcagccgatgtgaattccttcaacaaaaagtcattatgctcagctgtaattgtagatggaatgatggatagcacatgtgataatagcccaatgatcttcctccatagcaataaagatttgttcaaaataagaggaaacaatgtctgaaatttcttctcttgatgacaatattgttggaatttattttac

SEQ ID NO: 2826 - DNA, 3046 bp, Cannabis sativa
ccgctaccgcgtcttccatcacgcgccgccttcctatcacagaaatccaaccgttcgatacgtaagggaaaatattcatttcctcatcatcaccatcgagtttctccgtcttgcaaatgttcggcggtgattcttccgatcgactcgattcgccgctgggaacgatggcgtctgtgaatttaaaagatcccgatctctttcgatgcattaatcttttactattacgacaatcatcggattcgtaatcggttttttccgaacttaaggttctcatcggcggcgtcgtcctcaattttctccggcgataatttctctgaatcgaatcggagcttttctcagtgatttccttcatcgaatgaattgtttctttctttcttcaaatttttccctcctatttataggggtcgaagttgatcacagaacaatatcaaaatgatctgagccgttgatttctaagaaggtccgttaagatgggtcctgtggtcatattggaaaagttgaaagtattcggatgacgtggacagttgggattggggaaatggacacgtggcgtaagattgagggttgaagttattagttttggcgggaactgtgacatggcaaaggtgggtgagaatgttagtgtgacatgtgggttatttatataatacaacgtggcggctcttattactgcggtgctagccttgcacttgcttgcctcttcgttttatttttgctttattacaaatttaattaaattgttttaattactttgtttataactattttatttttacatattttgtttaaattccaacttatatttttagtgattttattattaccaaattatactcatttttcactaaaatgtataaaatacccttcaagatatttatttccaccgtttaatttttttttttttgaacttaatgacaccgttcaaaattttatgtatgatttttgtaatgcttatcaatacatagaatatgattgatatatatatatatatgagtaattaattaatggttatatttttattgtgataaatatatttttttaattaataataataaattattaataggtaaaaaaaatttagaattaaattaattataattaattattttttaaaaataatttattttttatttaaatattaaacaaaaaaaatttggcgttaatatttatacataattttatttttacatttagattcttgttatttttaggaaattattatgtatgctgtattttttatttttatgttttttagattttttattttttgtaaaatctatttttattttgaggtcattctgtttttatgttgacgttacgttgtttttattttataaaagttatttctattttgaaactactttgtttttattttaaaattatgttgtttctattttttataaataaatgaaaagtataaataaactttttttaatagccaaaccatttaattataatttttattttacaattattagactttctctccttttaaaataattttttttaataattaattgatttttaaaaataactcatatgacgtcatttattttcaaataacaggcgctatataaggtgttaaaaccatttagcggataagcaaccacttagcgtcttttttttttcagcaaaaataattgtctttaaaagtctattattgtagtattgttactaattgtgcaactaaatatcgaatctcatataatttaatgtaataaattttaggaaatatcattaataatcatagagcatcacttctaaaaggtatcaaatatcattagtatccaataacaatgctctatcttcataccaaacatgagataaggtttattccttgtcccagtcctactattgtatccaaagggagctttcattgcatgtaataatataggaaattgcttatgtgcagggacagtcttcaaaggcaaaagtataaagttgatattgccatctatggtcatgtgcacaactatgaaagaacatgtccaatataccataccaggtaacaaaaacaacatctcacaacatttacatcatattattgacttcctcaatctcttactagataaatttcactaatctttgctatgatatgtacctgcaacagaagaattattataagggtagcttgaatgggacaatacatgtggttgatggtggcgaccgatcgagtcttgtgaaattctcctcagctataccaaaatggagtctagttctggttagggactacgactatggattcaccaaacttatagcattcgaccattcaaatctgttatttgactacaagaagagtagtgacgctagcttcttaagtctcttggagtacaagtgcaaatgtttttcttttttatgtgaacaaatcttctttttgcataaaaagcaataccaaaatacaagaatagtctcttaaatattggtctaaaatggtcatgaagacgttggtgattaaaatcgacaaattttgctatgaactagaatttacatttaagcctcaaatccttaaaatacattatcgcaagcaatccacaaaattaactcaatataaaactgctatactatttactttcagttctattactcgtgaatcttggatccactattattattcatcaaataacaaaaaatttccacatatcgagtcatagtataatataagcaagaaacgaacaccagctgcatccatgctctgaagaatcctgttcacgaggcttgccaccagtgttttgaagcaaagtaagttttggaataaatatattttctaggaagatgttgttgtaatgccacggctgctagcctgcctgctaactggttaagaaaggcttatggtttcgccacacagttgttccagctcacgctccaaaacatccactaaatttgctttgttccgcctataaacccaggcatgagcatcgtgatcccagtcgaatctggaaggaccactgcatggaaggaaaagaaaatcaaagactagaccggactgaattcacgaaaaatgaaaacaactattgtgagtaggatccattttaccatccaaatgcct

SEQ ID NO: 2827 - DNA, 1557 bp, Cannabis sativa
ttcttgttgaagggcttccttaagagttgctggttccctcattgctaagtagatctttggcttgaacacaccagatttggatctggttatcattaaatgtttgttgtatttccctggtgtattaagacaaccagcaacaagtggtataggagcaggggaagagcatctagggagagaaatagggtcaagtggtgtaccaactccttgtgatcatgaagaaaaaggtgagaaaatacaggagtgtccgctggtgtaatgacatctgctacagcacctggtgtttcacctgcaacagaaacagtaggttggcttggacaccagttgttagtatgtggatcataaggtgtatgaacatgcatattgttgtcagataaaacattttggtcatggacattgtgagatgcagatgagtgatgtgatgaaatagaggtttgtatcaagtcagccatagtgtaatgttctttgaaatgggaacaaacagtaggtatgctagacttagactctgaaacattttggctaacaagtttctcatatgggaaagaaaactcatcaaatattacatctcgagaaatgtacaaccttccattaggatctagacatttgtaacctttatggttaaggctataacccataaaggtgcatggtgcagacttaaactccaacttgtgtttgttatagggcttgatattaggatagcacttacattcaaaggtctttaaagcagcataatcgggttttgtgttgaaaaggacttccataggtgatttattttggcgtaagggagtaggaagcctattgtggatgtaaactgctgtcctaaatgcctcatcccaaaacttaagaggtaaagaggcttgagcaaggagagttaagccattctcaacaatatgcctatgctttctttcagctaggccattttgttggtgagtagtggggacaaggatgtctatgatggatcccattttcagtgagatacttggtaaatgatctaaactcaccaccccaatcggtttggagagtttttagagatttaccaagttgaagttcaatttcagccttgaaatgtaggaaggttttaaaagcatcagatttattctttaaaaggtacagccaagtgaacatagaatagacatccacaaagtgtatatagtatttatatccattaaaggattgtgtgtgagatggtccccacaaatcagacacaataagttgtaatggttcagaaatgactgtattggatgcttttggaaagggaaatttatgtatttcccaagacaacaagctgaacaaaccgaaaagtgagagtttttattgaccataggcatattacaggtttgaaacacagtgtttacaactctttcagatggatggcctagcctattgtgccataaagtgaaactgttttgtacattagaaatacatttcatgcaatctgatacagtaacagtagtgttattaagagtagcaacgaaagtgctcttttgtccaggttgagaacaagggctgctactggttgagggcagattttggcttggtgtgggatcaggacttgagtag

SEQ ID NO: 2828 - DNA, 1497 bp, Cannabis sativa
tgagtgagtgagtgatgaccccagttctcccaacaccacactgtttaactgtcaacagctttacagccaggggcgcgtccttatcacgctctccaattctcggctgtgttatcccattcggccattcctccctccccatcttatcagttttttttcattttcttttttcttttctaaaaaaaaaaatataagagttttgttggtttgtgttttgagagacagatgaataattaaatgggtttgggttgacgccaaaaagcgcgtcacacatgtcggagaagagcgcacgtaggcagctcgctgccttaaatgccgacaatttaatttttcctaagtaattccgtgcccttgtccacacaaacacaacacacacaactctctctctctcttttcactccctaagaacgaacctcaaccccacccaaccaaaagcttctcttcactgattggagtgatccaccgcgacacctcacgcgccgccttgttattatctttctctcctctcaatttgtttaataattcaagtataaaaacatgggttccacacaccgccagttcgtttcaggtttcaggtacgggaatgcgtgcaaagagaaagacacatatccggatacctgacccgcaaggtttcggtgcagtctcatcgttgttttacgcgcttcatttagcgcgtggattgttgtttttatttgttttttcgctaaatgaaaagaaaattatgttacatgttttattacattattataataataataatatattgcttgcttgactacttgttggtgagctttgcaggtcatagtcgtaccatcactcacgtcctcacgcgactactggcaatttctttaatacataaattcagttttaattaattattctttttatttattttttttaagttttaccgcgcagtaagagtgtgacaaagatttggaattggaatttggaagaagttaaaaatgaccgggtgaaccggttaccaataacggtgttggtaggattcagaaaacgggaaagtatatgaaggggtttgagggacgacagctcttttctgcagagaagctaaacccaaaaaattaaaaataataataatttttttatatatataaaaaaacctaaactaaattaaattgatgaccacactctctgtctccttttatcttctcttctgaaactatacccaaattctcttttcttttctatctatcactttttttttcttagctaagtgctccagcttagttaatatataagttggttgtgagtatttttccatttttcaattaatttagctttggatttttgaagtggtggggtagtttgtcgatcaatggagtttgaagatcaagaagaacacgatgaggagatggagatggcagcgagctacgactcgttgggtaactcgggatcagggcgagtcaaaatgccgagttcgggcggagtagcaacagcagcagcaggagccggtgaaggagtgatgtctcagtcggcgagcca

SEQ ID NO: 2829 - DNA, 1083 bp, Cannabis sativa
ttccaagtttgcacacgaaaatgttgttatgagcatcacttttaaggaaaatcacatctcaaaaaaagctttaacctaataagaatcagattcttaaaccaactaatgacatgattaattcaccttctttatgtagtcactgttatgtgattgtcttgatttttttatcatcaattgtattgacaagatgcagtttcagttcaaatttgttccttattgcaaacataaagtaaagtcaacccagatctttgttgttttagttggtccagttagtataacaaaaaagctaaatggttttaataaatggcaaacaaattattttcgcttttcaaataagtaaaactgattagatacatatagattatgatgtcattaaaactatcctaaaaaaatttctttactccattagagcctcaggaagctactcagagggtcatgaagcatacttagtgtacatttcagaaggtcttggaaagccactggattgtgaaagagtctttaagtaccaaaggaaaaatggttctctgtttaattctccatccaccacagctgttacttttacaaaccatgggaatgctgactgtcttaagtatctctgctctgttgtagacaagtttggaagtgcaggttcctccatcttaacttttgagtggttttcctggttttgattaacattatgctgaatggttttttcattttttttttctcagttccaacagtatatcctctagatatttatgctcgtctctcaatggtggacaatctccaaaggttggggatagaacgatttttcaaagaggaaatcagaagtgtactggatgaaacatacaagtaaatgtccttatgtttgtgcaaacaatagtcatagattgttgattttacttgattagtatgagttctaattatttcatttcatttttttcaccttcctatttctttctaagaggccataagttatattacttttgagacatgacattagccagtgaacagatattggatgcaaggagaggagtgtgttctcttagatgcttccacctgtgcaatggcatttcgtttattgcgtgttaatggatatgatgt

SEQ ID NO: 2830 - DNA, 1707 bp, Cannabis sativa
catctataactttcatattatctgtattgtaatcaaccactaaaccgagtacactacaaaatttatctgtattgtaagctttcatattataaaaactattgaacttgtgcctttaacctattttcaagaaataaataatgtggaatccattttgttttcttcacataatataagatgtccaacagattggaggaatgctagtagctttgagtccatttactgactagcccgggtactcggtatgaaccaaggaaaccagctagaacttcctgcaggaacataggcgcaaaaggcttcgctctgttggtttctctaggactggtgaaagtgttgcaatggagccagataaaggtgactgactgcattgtaaactgtccggcgatggtaacaaacacaggcctggaaaagagaccatgttgagcagccctatgttgatgtataaactctattcattttgatgtgaaagcaatagtctttcccagcacaaaggtaaccagagttagttcaatgaagaagatggtgttgatgagggcgcgatcaatcgtccatccaaatattgtaatacctcctggattggtttgcaaatacatcactgtataaccccaataaagaaaatacaaattgttaagttcaacacagcattgttcatatgaaaattaaactaacaactagtagttatatacaagatatatatggggaaaaggaagctgatatgaaacagaagcaaagataggaatccctaccaaaagcttgtctcctgtgatatgatgataaataagaaactagttgtgtattagtcggcattgaaacataatctaatgattccaaatcactctcagagtaacttaaatctaatgaattcaatgcttggacagcttccatgtttagcatattgttgtttgaagctctgtgataagatgaatcattagaaccgcatgttactaaagcgtgccatctacttgcaagtgatgctatgccttgtgctctatgggaaattcttgttgcagcatgcaggcaaacaataatcccaactacctggacaattgaggagacctggaatttcgggggagaaataaacaagttaaaaaagggtcatgcttgatctaattttcttttatttttttgaatgctagtgccatcaaccaaggcatgaaatgttcaaagaaagcttgtgcctttctaatcttatggcattgaacttacagcaaaatcacctccattaacgaaagtaactattccgcgataccctgtagtttggaatagagtgacaacatggcctgttgtaacaacaaggaactgcagaactagaaagatccgaaatcgatggctaatcttagatagatggtaacgcagacgaatgtgctcctctataaataccaaaacatcagattctctttccaagagcttcccataatcatcaaagtggatagcttgcaaattgcatatcaaatgaaacaaaatgctggctgttagagagattgtactcacataagtccaggatacaactaatgctaataaaatagcagttgaaacccaccaagaaccacgatttatatagtacactcgaacaatctctcgtgctgtctttagtataaaacatggaagtgcccacaaaacaagcaagcgtaaggatccctgtcaaagtaataacacaatcaaaaattaagagcacagcaaaattagatcttcaaacatctacatttaatg

SEQ ID NO: 2831 - DNA, 2089 bp, Cannabis sativa
aaaaaaaaaaaaacagtttaaaaaggtacccagaagaaaatcttcacttggactggcaagaccatctgctgcatgaagatcctcaatttcttcaacttcatccagcaacccctcaagctactaaatcaaaatctcatcaaaaaataaatagaaatatcgcaatatcacatgcagaaccacaaaccctcaaaaagggccacagatcaacatgctgtaacatattcaaagaaagaaaagtaggtttcacagagaaaatattcctgaaaaataaataacttgggcaagataatacaatgtttgaaaaagatacatactccaaattctaactcatcttctccttgctgagcagcattagaatgcaacccaccttattagacaataagaagaaaacaaccaagtagaacagcattagagtgactgtacatagatgtttagtgacctgtaataggaaggaaaagagagaaacagcagcagctaaacacaaaggcatcaaatagtaaatgacccttcaactacacatctcacaagaatgccgtgcaatgtaatctcacaacctcaggcacaagtactctacacgagcatatccaggaattaataatgaacaaatgcaatatgttctcacttctatttgtaaattctacttccaataaaaatgcaaataggaagaaaaaaattgtgtggcctatgaagtacatatatatatgcatgcattcattcataatatgcttgcaagtcccacaagagaaacagtagtgtttgtttgaaaggatacctctatatgtatcagaaaaatattcgtatcgtgaaaattcttcaaatccgaagcattttcccccattttcctcaccaaaatgtaaaacaccatctacagaaacattctcaattttaggttctgcaagcaaatgatccactgtttcatcttctaatgcaggagcaaaagattcttcagccttgacctataataacagaagaacaatggatgagataacgatcagaacattcaacgaacacttcctacactagcaataaccaactacagatacaatcagaacattgaaaactgtaaggaccatatttagggtataacaagttaagacccacaagattctacctcaaccaattccaattagctaaagagtaactcatggtagtgttctcacttctattcaatgtggaattcttaacagcattggcaggacccttaaatctaataactgaaactaaaagaacatagattctattttgcattaactagacaactttgaaaactttgttatttggtaactctcgcccttactttatccataaccctaccctctcaaccctgacactagatgtcatcccaagtctttggattcaacaccaaataaccataccacagacaaaaatatgatcatgaacctaaacctctcattcaaacatctagtaaccaaacgattttcgcatgtaaaaatgaaaaaggtgaaaattaaagccgaatgtacaacatacaaaaatttgagagaataaaatctcacccgttgggatttcatgttaggaaacttcttgcgataatgtccttcattatccatctcatgaacacacttaagattaatcctacatatccaaaacatgtagcagttatataaatggaaaacaaaaaataaaaagattttccaaacaccatagacgaatgaagtacaacaagccaaacaagacctaaagaatcacctacaagtatattaacggaacataatcaaagagccaaatgcaataaaaattgtaaatcgtgtttaaaaaaaacctaaaccagaataaaaattgcataacatacacatgcaaaattgcaaatcattcgaattaaaaaaacaaacaaacaaaaacacaaaaacttgattaaaaaataaataaacgatcaagcacgaataaacaatttgaccaacgactaaaagaagataaaaaaaaaatgagaattaaaattcagatgacactgattagttgctaagaaaatggtaaattcagcaaaaaaaaaaaaaaaatagatgtcggaccagttgcatctaggcccgatgtataagcgataaaatttagataaaaagagaaaatattt

SEQ ID NO: 2832 - DNA, 1256 bp, Cannabis sativa
ctccttaccaccatactcttgcttttgattcatggttgagggatctgaagtaatatgattgcttgcaccgctgtcagcgtaccaagcctcactgtctaaaatttcaggtgttgcaacaagagccgtgtgagcttgtttgttttgagttgctgagtttggatcagatcccatgtagctatcatcatagcgattatagcacacagctgcactatgaccatacttcccacagacttggcaagtaggccttgtgttgctgctgctgttattgttgttgttgttgttcctacctctgccacgaaatctgcctcctcctcctctattggcatgtctgccaccattgttgtgttgaggtgtgtaggaccctctgccacgatttcctccattaggtttgtgagcaagattagcatgatgatctgtcaatccaccatatgttcttccattagggccaaaaccttgaagtctttcaactttgctatcaaaactgagcaatagttcagtcagatcttgccaagtcgtttttgctcttgcttcaatctgcagaacaataggcaagtagctaacatcaagtctggataggacattagagacaagttgggattcagggtatggttctccagccaaagccaaagaatcagaccagtttttcttttgttttaaatattcagtcaaaggagtgcttccttttcgagtagtttggatgagagttcttgtgtcatccattttggctcttgaatgagcaccatatagatgctccaaggcactccataaaccagcagctgtagcagaacccatcacttcagtagctattgactctgtcatagagctatataaccaccccatcaataactggtcattgatgatccagttttcgaaatctgggtttatgagaccactcgagccagaagagatctctccagtttcagtacctgcagaaagaaattcaggtggacaaatattagttccatttaggaaaccatctaatctatggcctctaacaatagttgagaccatagtcttccataaactataattgtttctatcatgctttagtgagaaaggttgatttagggtgctaaagtgatgagggataggtgtttggggctgagagctgctaaatcttgcagctgtaacatttgaggcagctgctgctggtgcgacatgggatgcaacaggggttgattcttttgcgccaggattttttctatcagtcgacatttcttgctctgataccaagagaagattttgtaataaatgtt

SEQ ID NO: 2833 - DNA, 651 bp, Cannabis sativa
agacaatcagattcaatgctaaaccgttgatacctttgttggatacccgactgaagacccctgcgaatcgccatcaattctaactgcaatggtggaagttcttgacgcaccgcaactgctgcagcatgaagaaccacaccagcagagtctcggttaacccagcctaaactcgaacctcctcctccctgcttcacacccgcatcaacatttatttttacaagattcggctgaggaggaatccattgttgagctgctcgctgaaccttcctgcttctgctggtggtatctccttggaattcaacaatataggtgccgcaccactccaccatatcctctggtttcggactacacccaccatgaaccaccgagttcctaacattccaagtattccacaacagaaccagaaaaaaaaaaaagcaaacttatctttgtcccattctctagctagacgcatgagaaaggacagattatcctctctccccactcgcttcatctccttagcttgaccactcacccgccagaagcttttattggccgtgcactcccataaagcatgggcaatggtctcatcagaccgactgttacaacgagcacaggttgtgcccgaatgaccccctcgtttatatgtggtttgatgagcacatttttttt

SEQ ID NO: 2834 - DNA, 561 bp, Cannabis sativa
gtagatgagaatatgagattgtataatatctacagaaccaattacaggacaaaagacagagataagattttgaaattgatggttccaagaagagaacatgtaagaagggtggtctgtagttgtgacatttcaacaattaatcaagtttggtgataatgcatgacacaaaaactcgtttcacttttcagagatgaatgaaggctaaacaacaagcgtgagaacaattacgttttttgtttttgtttttgttttttattctgttttttaagagaaagatgccaatcccattactatattaagtgtctttggttcttttgttagaaatatgaaaatgcaagccccaaataaaattcacacgatcacagcttcagattcccctgaaccctaggtcgagaataataattaggctcattagttgagaattatgataaccttaaaaggggatttttctaaataagacttgtatttatcgtatgaattagacaaatattactgataatatctgggatattgatatcgatattttctgtaacatcttttttgtttcttaaataatggatg

SEQ ID NO: 2835 - DNA, 1230 bp, Cannabis sativa
ccctccagcgccgagcggctgcagccgctcttttcgatctttccttcagttcctcttctgcaaaaatcacttatttaatattttttcaccaaaagaaaacgatgatggtcatgagtaggataagatgaagtgtaatttaatatcagattcttaccctacaacaccattagatgcagattggtataatttaatatcggattattagacttttctttatggtaaaacgttttacctgaactttggtaatcttttgtgtttccccaaagattactccagtatgactcggtgtcattaccgtttttctgctgcatcatccttattttagcttgttcctataattttgaaaaaaaaaaagccaataggtgaatcttttaatctttttgttctggaagagaagtaaatccaaacaaattgaaaaaacatggtagcagaacatagaggaaattgttaaagagagcataatatagtattgcaccaattataaatataagattacaaagaaaaaaaaagtacgagttagtgataagtttaataaattgttatcatataaacaatgaggaaatttctttaggattttagtaagaataaagaaatatgtgtgagtagacaatgcaatttcccggtaagatggtggtgaatagcattctctttctcctcttctgggtttgaaaatattttgctcattctaaaacttttagtaaacactcaaatagaaatcatgaccccatatattttttttttcaatttagtaaacatgccatatgtgacacaaggaattcttaccaatactcttgcttgcctcttattccatcgagaacttgcctgcaattagcaagttaaacagaataaacaaaggtaagccaccacagaaattgtcacggattgtaataagtaccgacacttaaactattttcatcccaaaagatcttttaagaacatgaattttacatcatgtttaagtgatatgatcagaaaaatatttcaaaaagaaagaaaaaaaaacatagtaagcaatgcatgcatgcttaccattctgaagacgtctactgatgataatcccattcctgaaagcatcaatgcaacctaaccatcatttagaaacctctattagcatttgacatggaaaaaattaaaaaggtatcatggagacactatataaatctcagtaaagataaaatgcttaggcaatagttacatgaacaacaacaaggcttgaaacattctctgaat

SEQ ID NO: 2836 - DNA, 3349 bp, Cannabis sativa
aaaaaataacaaaagtgagtataccatataaattttctaattgaaaaatatccaaataagcaaggccaaaaaaaccttccttggacatggagaaaataaaagcaaccaaaacaaaagaagaaaataaagtagctagaactaacattatagcaatactcaagttatatgttattatgacgaatgtgagttataaatgttcatctttaatatcatctaattttaatattcatagaactccaataaaaataacttatatgttcctgaaggcaagaaaaagaactacctttctaccaactattgtaaagataatatagattatagcaaagtaatccttacttatcattatttggattaattcagcagtactatatcacattcacattctataatatgctttatattttagcgtcaacattatgtcactctgtcaaaatttaatcagaatttaataaattgggtgtttaaaataagctgactttcagtgaaggaataacaaccaaaagaattttaaaccatcaacaaactggaaacatcaaactcttgacattaaactaaggtccatctgaatctgaaacgtggcttcggtggtcaggctaatctcttttctcaacagaaatcaaactcttgacatagaagttggataaacaaattcccatatcgacctcaggaaggggaaggcctcttaatgtttgggtcttgagattgtaagacactactcctttatcaaattcaccatgataagctcatctgtactactaaatattagtggaaagtgataggtttcaaggggtccaattgttggatgtgtggtccaagaatattcaccaccattgtagtcatccattacaaacatttgaatataacaaggaagattctccttatattcgtctaccacaagcaagggaactgatttattccattctacaaggcacttttctcttttatcaaacataaaatccccattccgcattgcatctactggtagtggcatggagtgaaactcctcattagacatgtcaaaagaaagaattgtttgatactcaaagtcagggaaaggggttaataacatcatcaaccaataaaaaactcctttgcacaacactcctttgccatggtgaaaacaagtatcatcaagtttcacatcaattttaatccgtttccaagaatcagaattcatgctgtacaactcggcaaaacatttaaaattacgattacgaccaaaaatcctgaccaacttaaaatcattagcattcaaatcgtatccaaattcctctccatgagtcttaagaatgtgacgaagaggaatggttgattcaggaagaatcctggtttctctgataacaggatttatgagaacagatttgcctttatccatgtagttttgagctatacagatgatgccattacaatgataggtacgatagtaatcatacatttcatcccaataataggtacgaggtaaatggtcgaaaaaatcagtaatagaatgaaagaggttaaggaaatcggtaggataaacagcctcagggttactaaataaagaaagtattggtttgattttattgtcccctgcaaaatcaacgctaaaccaactcaaaagtattgatgtggaagacaagactgtatcgttattatggtggaccaagtgattgtatgcaaatgatgggtcagtgatgaagccatgccatgatttagaaacccatttgaatcgcactagagactccgcaggaacctttacaaggatttttctcatgagttcgtctggtagctcacaacttaattcccccatttaggttcttcttcttgatcaaaacaaagctctagtgctccaacaaatttcagaacaaaatgagataaaccagattgtattacaattttcagacaaggaaataggcaagaaatggggaaaataaaaatcatgtacttaaaacccaagttttaataaagacaaatgcaaagaaagctcattggaacttgaaaacaaaacaaaatcacatctaaatcgactgctgtgggaacctttctttttggaaaagaaatcaagaaatcctaactcaatagtgatcacatttttgggttgaaccaagaaaaattagagaagcagagtcttaatcaaatgacagggaagagataacggaaaaaagagcgagagaatcaaactaagaaagaaaggttaagagttaggagtttgtaccagtggtgtcaactgtcaacaatggagatgcttctatggaaaaagaaatgttttttatgaagtggggagagtgaggtttctagtagactcaataatggagattctcctatggaagaggaaattaatttaatgaacatgggagagcgaggtcgttcagtagactctttttattgacgacagttacaaaccgttagagagaaacctcaataaagctttatggatatgtttcttgaatcttgctctgtttttgtttttggctttatttttcaaatgaaaaaaagaatgacgtaatgatgctttataacttgatttggcaagtgaagactgggattgagtgtgcgtgactacggtagtcttatatttgataactgtgacgttctataatctaataaatataaattcacatattaatagggttttttttatttttacactttaaaataattttttttatatttttacgaaattttacagagaaattcctattgcaactagcgctgcaacctaaattacaacataaaatcgtacagaaacccctattgcaattagctctggaaccactttagaaacctaaactgtaaatttgaaaaaaaaaaaaaagttgaaaaatagtatatggggcaatttccctaactaatataagaaaatttaaaaattagtattgtccctaaatttatagctacaagttgtcttttttctccagccaggcccactagctttttttggacataggtgcagcttggtcagagctgtgttttgctattgcaatttaatttttgttactgctattagtcttgtctttgtaacatgattttgagtgttttagttttgtgtaacatggttttatttgttttgttttgttttgttgttggttctttcttgttcttcaatagttcgtcatcaaatcgttgttagtagttgagaataacaagctctctgcaatggaggaggttgttagtagtgtagttacgtactttgcacaatagttgagtgctcaagctatgagattgaatgaacctactgctatagtttctactgttgtattttttttagcaataaataaaacttaatatagatgttcttaaggttaattatgatgatgcaatcatttttatctcactttatgtttagtttttttgttaaacaatctgagaa

SEQ ID NO: 2837 - DNA, 894 bp, Cannabis sativa
tccttttccacttgctgctttgcataatctcatggaaagacagtttcctttttcatacattgatttttttcttctttctatttctatactatttgatcagtcggtggattgtgaggcagcaacattctcttcaaattccctcgagtgatcatgaacaagagttcccaggtcagcatccttcatatagggatccacttaaattgagttatggttgtaaacactacaagagaaattgcaagcttgttgccccttgttgcaaccagctccacacttgcttgcgctgccatgatgaaatcactgaccatgtcatagataggtatgtcaaaacttcactaattaactacacatattacaagttcaaattcatttaaatttgatgtttttaatgtatatatgtgttcaggaaatctgtaacagaaatgatgtgcatgcaatgcctgaaaattcaacccataggtcccatatgctcaacattatcctgcgataaattctccatggcaaaatacttttgtaggatttgtaaaatatttgatgatgaacggtactatatctttaaatcttatagacaacacttaatacatttttaagaatgttattattaactttttttttaatcaaatgaagaactgtctgaactgaacagggaaatctaccattgcccatattgtaatttgtgtagaattggtaaaggactaggtattgactactaccattgcatgaactgcaatgcttgcatgtcaagaacactattggtgcatatatgcagagagaagtgttttatggataactgccccatttgccatgaggacatcttcacctctaatttgccggtgaaggccctccaatgtggtcatttgatgcattcaaaatgttttgaggtaatatttccctttg

SEQ ID NO: 2838 - DNA, 1594 bp, Cannabis sativa
tggttaattcatatattttgttagagttatatattgttaaagtgtaagaatataacaccacatataatataagatgtatgaattattttttttttcacttattaaattataacatatatcattattgaacattatctaaatctaaatcattaatttataaactgtgaatcaatataattctttaacaataatataagaatttgtgccttgtttgaatgtttagatcctctatttatacacaggaattgatgttctgtgtttttcgatcttatttcttctaattgttccaagttggcatcattttcttctatctcctaagcttcatccttggtctttcttgggctctattgttccagacctttttatcacttttttctttagtgaaataatgtgctttatcccctcttatcataactactttggttaattcatatattttgttagggttctatattgttaaagtgcatgaaattccatattaaaattaattggcaatgagaaaaataatctattcattttatatatgttataatctttccacacatctaataaaaaaataataaaatgtacatacactcaaaatatatatacaccaaaatattatatttatagtttgtgatcgacactactttttaaaagagtgtgacttaaattaaataaatataattgttaaaaaatttattatgatcataggtgtaaattaatttatacatatattttgagtgcacgtattattgatattgatagaaaaaaataatagattgaaagaaaatgatcttcattgattaataattatgttcgagtatagattatatataagagagaaagcaagagaaaaaactaactaaatgttataccagaataacaaccataacagaaagttataactaactcgtaacagcaatattatctaacaatcattacttttccacactttcaatcaaaatagtaactttggtaacaagagaatcgataaggaattaaaattaaaagaccaatgaaatggataataatgcattttcttcatgttcctaattgattacaatgagatgagttatcattgatgttgaagctctcattggtagatcaaaactaactaagatccaaccctcttgaagggcttccactctaattctggatattatactccttagatcaatatatagaactctcaacttcattttaagtaactacaaataaagaaaaaaagaagcaattaatttggtcaaattccattgtgtttattttccacaaaaaataaatgaagtatgcaacttggaaccttaactaaatataagactagtgtagctagggtgtatctatctctccaaaccaaaaatgttggactaaatccctcttgtcttctaaggatattcatattggatcataattagcatttacacattcctcctatttggatccaatcaaatctgaaaattgagtctatatatgctcttcttattcgtgtatgaatctgttattacaaggctactttaaattctaattaatgttggtctctatttataggaccattgagccaatttcacatgtgacaaaacagacctaactaacctgttgttgacttgcaactaat

SEQ ID NO: 2839 - DNA, 691 bp, Cannabis sativa
atgcaaaagaagataaaatcaaaattgtttaaacactatgccatgattgaggagttatcatagtagccaaacattaccctccagctccagttaatttaattgctaacttgagtaaacccggggaaaagttgtgcaaattaatttttttaacatcatagttgtaaaaatcatacaatttgggagtaacaaatttcttgatgaagaagctgcatggtaagaaaatagaagacaatgatctcatctgttgactaaaaacaaatggccacagcaggaagcaataaaacataatacaaaagcataatcaattctgcaataggaagcaacccaaatcaagaaacaaagccaacctaacaggaaacaaacacaaaagaactaacaaatttgcaaaacaacaaattggacaacaaatcatcaaaagtcttaaccaaacaggttgaactcaacaaagcctccaacaaaacaatataatctctaattatataagtcatactcagagaaaaagtagtgtataacaaaaccaaatatcaattaataaagatcttaaggaaactaatttacaaaactctcacttctttctattcatcactagaatcataatcaatactatttcaacaccaaaagcttataatatacacacttataatatatatgaatacccaattgcataatttctcttttttttttttttttt

SEQ ID NO: 2840 - DNA, 1210 bp, Cannabis sativa
atacaaatgttcaaatatgaccaaaaccaatgctaaggaaaataattgtgcaccgtgggaaaacacaggagaagaaccagaacatgaatctgttgactaaaacacccacaaataacattcccctacaatgaatctgtctagattttggatcacttgttcagtcgttagtagtgaatcaatacaattgtctcacttacacaatgaaaagtatcagaccataaattagagaggtccaaataagatcaaacatatgaaatccctatcgctaacccaaatacataaaagtaccacattgtgtaattattaaactattaccaaaaatttaatggaaaagtcagaacatcactgcacataaaagtgcaataattctttgctacacataaaagatcaaaataaaaacccaggtagctaaattggaaagagaatcaaattcaaccatttcagattcatgacgaaatgacccagatcacaaaaacccgacagcacatttttaaactgatatataaataatgaattaacaaaatcagattcaaacaaaacaacccagatcacaaaaaacagaaaaaagagggaaaatgaagaattagaagggggattgaaccagagagatgtgaggggtctttgactttcttggcgagaccaccaccggcagaggcagaggaattgtcggtgggtacctccttaaccaggaagacataggcgaagccaccttcaccgagctgcctgacgatcttgaagcgagtctcattgatccagacatctcctgcgccattaacggcgtcatacagagcattcaatccagaaaatgagcaacccatcttcttctttctctagaaatgcatataaatgttgtcaccaagtaggaaagaggtgaagagaaatcaggttttgaaagcagagagttgaagacctgatttcaaaagctgaaatctgatcaatcaagcttggttttgagtgtgattttgtcctctgtttattatttttcttccaaaatttaactctttcgcttcagatctaattttaggggatttttgggtattttatattatttattttttaattatttttgtgggtttttgagtccctcaaatgtcaaactagaagtaacacgtggagactttatgacagaccactttttattcctccaatttgggaatgtaacgacaaaaacaagtaattatagggcaatcccaatttttttttttttttt

SEQ ID NO: 2841 - DNA, 1967 bp, Cannabis sativa
actgagggccaggaagataaaaaatctgaagttgatcatacaagtctaaaagttttaccgccgtggatgatcaagcaagggatgaatcttacaaaagaacaacgtggaggagaggtcaagcaagaggcaaagatggatggaggcgtgtcaactacagagacctcagaggataaaaaatctattactgaaaatgatgataagaaaaatctccaggtctggaatgttgtcttgatttttcttaattttcatgtgctatctgattttccacctgacaaaaagaatattttgcggttgattctgtctgttgtaggatgaatatgttaaagcttattatgctgctctactagaaaagcagaaagaactagaagcagccacgaaacaagaggaattgtcaaacgctcaaatgctcgatggagaagccagtacatcctctagtcgtcaggtaggaatgaagtcgaaaagggttgaagatgaaggtgaggaagatgttgaatgggaagaagcggccccagttgctgcaggtaaatctaattatctaacaaatcttgttccagttttggaattgaagcatttatcctctgaaatgccattgtcactaaacttgttcctcgctagaggcccaaagcattaatttatagatcaattatcaataaacattaattgaacattgcatttggctgctcgctgatgactgattgttgagaaacagaaagttatatatctacatctgttgaaatattcatcttcaagagtcttgagtttgatggacatattgtctgtaacaggaaatgcaaatgaaccttacaaggtggatttgaatgttgaagctgatgctaccgcagataatgaagaggacgatgacgacgatgtggactgggaggaaggttgatttattttcttcctctcatctttggatgtgtcataactgccatattcagatatcaaaggttggaatggaattggtgcgtctttttagtgttacaaaatgcgttgtctgcggagtccattagattctgtttatacagatgaaccgtttcttcttctttgtataatatactgatttttctatttagtctatacgtgtactgtttcttcttgttgtataatatactgaatttcatatcagttttgctagcaattatttgtagtagagtaatagacggttaaacccatgtcaaacttcacttctattagtaagtttaaggtgccgttgaaaatttgttatttctcaattgttagattctctagatgtacagtcttatatattttgacacgtttaaaattaaataaaaataatttgaagttaagtcttatatatatattttcagtcttttggtacacgaattcaagttctttgtaagctttagttactaaatccttctaaaaattctttcataagtccagctttaggtctttactaaccacttataaagaaccattatagtattgggcacgttaaaatgtctaagaagaaaaggagtactcctctacaaaacacaaaaaataagaaagaagggaactcaggcaaaatgatcgggtggcaggtgcctttcacagtacaattacacaactatttaatttaatgatttggcacttaacagttaactatttgctgaaaaattcccaattggatattttttgtgaacccatttgagaattttcttaaatatcttaacaattttacttgtgtacatattcttctcacatcttctagacaaagacaacatgacaatgttgcaaatgagtatattaagcggagtatcattgtttgcttcgtgttcaacaaatattaaagtacattagttttgtgtttttggcactttttcttacaattgttcctggtcttttgaaaaaatttaaataatttaatgcatacaaaataatgcttaaaatattatgtacggtattacgccctaatgtacaaataacaaaaagatagatactttaatgtcttttttttttttttt

SEQ ID NO: 2842 - DNA, 1258 bp, Cannabis sativa
caaccaatcccaattggagggccattaatttcacatcattgttgaccttggtcttagcagtgacctccatcctcttttgaataaaagcctttaggctttcattatgttactgtttaacaaatgtagagagtcgacttccatgtccttgtcacatgtgttgataaattgtttgttgaaggcttattgtaagtcgttccaaatgtcaattgatcctgtagctagtcacttccactaatcttctgcagactttgttagcgttagggaaaaacataagcacttagcatcatcattaacttgggcaacatgcctcattttgtttaactttgtcatgtgtgctcgcagatcagttattccctcctaaaactgaatgtggggcattttaaagtttttcgagagtggggtctccacgatcctccttacacatagttctggatcctaatcttctgaatctgagagggctccattgtattttttgaccaacttggttagagcagctattttcttctccatcctcttagtgtcaatcgtagtcccctcattttactgcttaaatggttcctatggttacccccaggaggccttgccttttcgctcttagacttctcgtacttggcgtctaatcatcgttagaggtctgtattggacaaagtgtccttagaatgtcccatggtcatccttctgtcctggttgatagaatttttggggtggttcgttcccttaggcttaggtactctagtattttgcccctttggcacaacttttcttctaagatcagaagggcatccaggcttgaaagcacttgtggccttctgtgtcctcaagagctgaccaaccagatttgtatctttttaagaaggtttgggagcatacttttatgggagctcatctaccttgcatttacctttatctgtgcatggattcgaggttttggcctctgtttgcctacgagcacgttcttcgcccattacttccaccaaaaggtcattgtcggatttcgccaagtctttgaacttattttggaggcactccatcattcttgtcatcttcatagtaagcctcctcttctctaccaactctatctgagtagcttctatctctttggttactcgttgcaagttcaactcatggtcatagtaataaccatctttataataactgtctttcacatagccatctccatcgtcctcctcttccctgtctttagggtttttgtcacgttcaatgccgtcaaacaagttcagatcggaagagcgtcgtg

SEQ ID NO: 2843 - DNA, 785 bp, Cannabis sativa
aaggctaaatgtttccaaacataactttattctttggttggccattcaggataataaaaaataggctgcaccacttcaatgtgattgaggattcttaatgtgttttttgtaaggtgcaaattgaaaatttagaacacttattcttcaattgaccttttagccaaaagtgtcttcaagatttgaagacttcgctcgagtggaaagccagctctctttctcttcaaagtctcatttgggagattgaaagagctaattttccaaattcaaaaagtgggttctctcagctgtcttaatctctcttatttatcatatttggagagcttattgactcagtgtatacaagtgttatgtttcataaaacgaaagaacatgttagaattagaatctcatgtatttggcctaaacatataggacatgaggatatagaatggtatactagtttgtaattggaaattttttttctttttttggggaatttattatgtatagattcaactactaacactgaggtcctctcttttgaagaagctgttagatttgtaaaatgtaaatagttttggagtaatgaatacactcctgattcatgtaaattgcttatgttttattccacaatgtttatccaaaacccaagaaatgtttgcaaaaaccaaaataaagacacttaagccgaaattggtggtttctaatggagtcccatacaccagtgagtaataagcatagtcaaaacaaatacatgaatataaaataagcttatgaagaactatcagctggcttcattgtgtttg

SEQ ID NO: 2844 - DNA, 1442 bp, Cannabis sativa
atcatcagcactactagtatatctatatgcatactttgttcaataattttatacacgtgtgtgtttgtgcaatatgatcagttgtactccttaatgcaagacaaattaatgactgtatagcgaaatagataaagtgaaagaaaaagaaagaaagatatatcaaagaacgtatatagagacaaggcatggacggtaaggtaagcaaaaaaaaaaaagggcatgggtttggacccttttattatttttagcttttaataaagtttttttttttacttttcttggaaatctcctctttgattgtaccggggtttcgcatggataagggtgcaaaaccaaacaatgagagacccttctctgcaaattattataatatataatatatatttggagagagagggagagattaacgtatatatagtggtggtgatagtgtattaatagtgagctggtattctttccaagaaggcacgggtgctccgctgatttctccaatgcaatcccagttcccattagggctttttcatctttgaatatacataaaactctgtactattctatcacctccaaattaaaatttcgtcctcggtttgttgaattcatagtatactctcaatataaatatataatgtatgttttatataatactttgattcattctgttaatgtgtattgttatgtagcttttctgcttttggttcgtagtactcacgtaaaattgaactttcaaaaagaaactaatttcttattagtcgtcacaactttttattaagggacaaaattattatatggccaacaaaaattattatggccgtttatatttaaatagcttttctcccttttcattgaatgggaagaagttccttgggtttggaaaaaaagggtaacatatatatatatatatatatattaatattcttcatcatttttcaataaattatttttatatctttgagtagtacccatcatgctatttttgttagtagaaaacaaatgtggaaaactgaatcaaattatttttgcatggtactatttacacaatggtatgcgaagtgtgtaacaattaaactataagcacaataatcagaaaataattaaaataattcaaggagagacatcacaatatgaaatatatcacacttacacttacacacacatataaatatataacattatgacattgctgatcaaaaaagttacaaaaacttggtgtaattcataatttttttttttctttttttgaaaaaaagacatccgatagggtgcaacaacattcaaatccgaagttcccaaaattcatagcaagtgagaataaaacacataattattctcatatgctattgccgaacttcaaatgaaccatttatagacccctttttgcatgcaataatgcctagctatagctattgcactaagttagctagaatataaaaaaaaaaaaaaaa

SEQ ID NO: 2845 - DNA, 969 bp, Cannabis sativa
tatccaattataattggattagatggcagatgggttgtctaactccaatcaaaatcccatttacatgtagtatatattaaaaataataaatatatttatgttctattttcattggatattggatctcattagttcctcttacactcttccacacttatttagagaaacttttaaaaaaatatatcatattattaattgttgtgttgaatattttgagacatttttaatctctttggatggtattgaattgtgcttgtacatttggtttgtatattaaaggttttttttcaaatttattgtcgatgcttttagtgttgaataactctaatataataagtaaggagttattttttctaacattaaagtgttgtttaaatttttaggtatctctttctgatattagtcgcaatgtaatgttgcgatttatgtattgacttaacatacctttcaattagataatgaactttcttgaaagaaatttctcttttgtaactctactcgagcacagttgtaacaatattgtattcttaacaaaataaaaaattgtaaagttaataaccttttgtaatattgaacttgaatgattgccaatgtttaggttttatgttattattaattttgttttgttttttatatatatgtttaaactaatatcaagaatcactttataaatttttatattagatcgaattgaattttaaagttcaattggattgaatgataattttctaaatacaattactaattaaattaaatcggatagacagaccaagcaaaatacacatttgctatatgagttttaacaaaatactcttataccatgttcccaaaaatgactattaggcataaaaaatagtcattagggtatctactattctaaaaattagaataaatcataattttattattcacaagaatatactgatttggtatactatgtttaattttaaactcaaattctatgctata

SEQ ID NO: 2846 - DNA, 2013 bp, Cannabis sativa
tttttttttttgttttaataacaatatatttatgaagggaaaaaataaaaattcattttttttggtgaggaatgagtacactttctaggtggtgttcttagatggccaacaaaatgatgcccaagtgtggaaattggtttcttcttatctttagttttgcccttaattattttccaaagaaagagatgaaattgaaattcacctctaaaaatgaaagctctcttcttttaacaatgattttattgcccaaaagttgtgacacctttcaaccctcattgttcatgtgttcccctttctacaattgccacccaccaatgcaatttccaatcttttttcttctttaatttgaaagataaattaaaaaataaataaaaaaaattctagccctttgatgtaaatcatgtggttggattttgatggtggtacaaagtaatatatttattaagtagtctttcttgcattgcaccaactagacattatttctagaatcccatgatttgttttaatagtgtgatcttatggttattatgatcattgatttctaatcatttttctttggttttttctattgttttcattttaccttaaaatatagaaagaaagagttttcattaattgatatgatgaaaacagattaggagtcggccaaattagtttaattttgttgttttgaattttgattagctaaaaccctattgtctaaattaagggtatcctaagtcaatttataggtcattttaagagaattgaatgttcttacaaatttagactttaaaaataatataatttttgtggcatatattaattggtccattcataaaaggggatatagatttggggaaatttagataattagaatttttgctcgagaattttgatatttactaaactatactttttaaattttttaaattgttaaaaatttttcttgaattattgggattgttatattcaatgactcttgtttgattttgttcaattttactaacgtagtaattatccatgtactcaatcgtgtcctctagaatttttatatatgtatcatcaaatcatgtttttcgaactttgacatgtatcaaatcgtctcccttagattttcatttacttcagacttttattaataaaattagacaaaagatcttaaatttaacaatctcaatagttcaaaaaaaaatattttaacgacttgtaaagttcggaaagaatttttaataactttaaaaattcaagtggcacgatttaatacatgtcaaaaattgaggacaaaaataattattttctaaaaaaatagataataaaattttaaaaatatgaaataacaaagtaatatgatttgtcatacatttattggttggtcatgaaatgaaatgagatataaaaaatgaaccaacaatatttttattaattccaaatttactactaatgaagaagaaacaaacaaaaatggaaaggttaaaaaaggattgaaaaaataaatggaaatgatgagttggtctacttatgaaaaacaatcacctacccatattgcttttagtccaaaaagattcaatttgtcggaagtaattaatttttatttattttttttgtttttaccttaagtcactaactagcaagtttagtaggtataatcatcaacaataatttatttttacttatttattttttctttgatttatcattatttttattatgttggagggatatagtatggactatgaagactcttttatccgtaattatcgatcacaataattattataatatatattatttgtaattataggtcaaaataccaaattattaattagttacttcaaattgcaaataaaaagtaataatttgatcattatctttgttcctctagtgctataggacggctctaaatttttgtgatcaatcaatattatgatggaaaatttatgtaaatacgaaaatttgttttttatttttttagactcttgaaaaagacactttttttacttttagtttcaataaattctttctgaaaatata

SEQ ID NO: 2847 - DNA, 2648 bp, Cannabis sativa
tagagttgtagcccaagttgaaatgtaaaatattctgagtagaagaagatgatataaggcataaatgataataatatttcaataaattagaaagattacatggccagaaagttatttagatattctgaagcactcaaggcttcttatcaccataaccaaactaaacccaataaataatatcaacttgtggaagtagctagaatgataaataatgtaactattgaataaaaatgcagacatttttgtactaaaaaatgcatatataggtaggctggtagagtagagaggactaatgcttgaaattccaatcaggcagaggttttcttgttgggttcaaacacatacttgataagtgaatccttgattgataacaactcagggaactcatttttcaacttagatgcatccatttcgttgttgctgcgaggtgcaacgatcaccttcgcctgttcttctagcgtgaaatttgaccactgaaaatttggatccatgtatttcttgtacatctccaggatctcattgtggctcacaacacctgggtttgtgaagttccaaatgcccctgcagttcctctttgccatctcaactgaaatgggaagtagctcatctaagatagtcatactgtttggaatgtcaaccactttgtcataacgtgtaatctttgtgatgaagttcctaggattgtttagatcagatgatattggcattcgaactcttagggtgcaaacattgtcatattctttcaatagttcttccacctggcacaaaatagtaaacaagagaaaaattaactaactgctattctaagagaaaacattctgaaaaggaaagaggaaaagacttgttaaagaatttaccatggctttggttttagagtaaaaagatcctatgaaattaggagtgtcttcctccttaaatccaatgccagatcttattggatgcgcgtcattgtactcaaagatgcaaccagtggcataattcatcagtagaaggccatgctctctgcacacatctgccagagttaatgtaccaacaacatttgcccgaattgtctcgggtttatgactttcacaccaatctacattgggcctgccagtcactccagcagcattaaagacatgggttggtttagtactttgaatatctgccaagagctgtgatcgattctccaatcttccctttccatactcataaggtatactttgcttctcacagattttcccaagaagacctccaatccatcctgttctaccataaatcagaaacttcagggatgacttctgagcaggtggatcgttcctagaagctggaaccacattctgactctgagtagatttgtctacagcaaaagcggaaatggaatcactagcatcagatccatcaaactgtctttctattcccggcaccatcagcatccttggatgagggagcaatgcaccagaaacatctccccaccaatcagggttcttgacataccattccattgtcttcttgagaccctccccccaggtagttctttcagcccagcccaacactttcaacttttcatcatccaaaaagtatctttggtcattaaatggtctgttttccacatacttgatatgtgtatctgggttcatggagaagagagaacatatttctttggctacatcaatcaccctcctctcccttttcgtcccaatgttgtagacatggcctacctcacctttgtgaagaataacttcaaatgcctcagcaacatcttcacaataaagataactcctaacatttgatccatcaccatgaataggaagtggctttccttccatagccaagagaatgaattttggaatgagcttttcggggaattgattaggcccatacacattatttcctctagttgttattacaggtaatccatacgatcgcccatatgccataacaagcatttctgccccagcttttgtagcagaatatggatttgtggggaggagctgggaagcctcatgatttccatcaacagcgtcttcttctgtttcaccgtacacttcatctgtgctcacatggatgaaccttctgatttgaccagtgactttgcaggcttctaagaggacatgagtaccatatatgttgtttttagtaaattcaaaactgtttccaaaggaattgtcaacatgggtttgagctgcgaaatgcattattgtatcaattgactccgtgagcaggatgaaattgactaagtcagcactgccaatgtctcccttgatgaacttgaaattgggggatgatcgggaaggaagcaagttcttcaaatttgaacagtaatcaagcttgtcaagtacaacaatattgtactcagggtagttcctaataagtcggttgcaaacatgggatgcaatgaagccagcagctccagtaatgagaatattctttggtttataattggtagccatatccaagtagttctacacaagccaagaaactcagactctcagaactataaagaaagacacggcaaaaatacagtaggggaataggaaaaatgtagtaaattagcaaagctgaaagagagatcaaattgagaaattggtagttggatttccttgatctgcatttacaacaatagctttcatctcttaaagccttaattaaggcagaacaattaactt

SEQ ID NO: 2848 - DNA, 749 bp, Cannabis sativa
atttgatcgttattggctagaggaaaaaaccctggtgcagcccctgaaactatagggactccaccagtactaccaccgccaccctgatcagctgatccgagttgctgtctaggtggcggaggttgatctcctactagtcttcttcgcttttgtgattccaaacattgaagaagttgctctaattctcttacgaactctatggctccaccaattattgatgcttgatctccctataacataccaattgtaggttctaaattaaaagaccttgtgttcaaatcaatactatttgacaatataatttagtactttccgcaatttatagtaactatttaatagttttttatattatttagtaaattaaaatacataaaatttaatattaaattatatcatcttatctttaaaataacatatgaacacatgaatataataagtggcaatgaaatatatactactaattatcatagtttctcatttaatattacttatttaattgaaatattttaaactaatttaacacatattaaattaatctcaataaatttgtaatattaacaaaaatagaaaatgttaaaaagtaagatttcaaatactacttttttttggtccaattctaaattgagtcttacaattatttttttttttttttttgaataataataatataaaaaatacgtctattaaaaatcttaaaatacctaataacaatatgcgctctagcccgacaaataacaataatgctccat

SEQ ID NO: 2849 - DNA, 591 bp, Cannabis sativa
gtcattacattttattttaggactgagcctagttacaacagttcttaaaattctagatgaggggtgactgactctccaatgccatagttgagagcttgtgttagctgtagttgagttcttggtgcaagtaaaggctcctggtgctccaatagatttggttgatgttgtggacacatgtagggcctttgagagatcaagattgtacaatcatcctttaagagtaccccaaagaagtacttggcccaaagtcttgtccttgatacgacatgaataattagaatcaaaaagcaaaatgatgttattatctgttgtgatttttgaaatactgagcaaatttttggtaatatcaggagcataagaatgtcatttaaggctaatgatttatttgaaacatgagtagaaatttaagtagaacaaatttttgaaatatggatagaggatccattaccaactgtgatcttggctttacctttgtaatcagttggatttgagagctgctacgaatctaaggtcatgtgatgtgtagttccattatcaacataccatccattattgtctgtcaaagttgtggatgttggaaatattttacca

SEQ ID NO: 2850 - DNA, 1995 bp, Cannabis sativa
caggaattgagccatttgtaacattgacacattatgatattccccaagagcttgaggatagatatggaggttggcttagtccaaaatcacagtaagaatctcactcattttcattactatacacacgaattaatgaatcaattaccacatatgatatgcatggtctaatgatttacaatgtccagaaatgatttcgcctactttgctgagacatgtttcaaacactttggcaatcgggttaagtattgggcaactttcaatgagccaaacgtccaagctatatggggttaccgcttaggtacatttccaccatgtcgatgctcaagccactttggaaactgttcaaatggagattcagagagagagccctttatagcagcacataacatgatcttatcccatgcaaccgctgttcatgtttacaggaccaaataccaggtaaccagctgatcatgcacaagttttgggaaggtgaagttctcacagcatataatataatgtattcttgggattttacagaaagaacagagaggtagtattgggattgtcttgcaagcaatgtggtatgaagctttgaccaactccatggcagacaaggcagcagctgaaagagctcattccttcacattgaactggttagcttatctatttcttgataagaatggtaagcaaaagaatagtaaaccaaagttaagtttgctgcaggtttctggacccaatcatatatggtaaatatccagctgagatggaagacattttgggatctgtcttgcctaaattttcaagtgatgacaaggagaaactgaatatggcattggattttataggcatcaatcactacagcacttactatgtccaggactgtatcgattcatcttgtgaacctggatttggtgtctcctggactgaaggtctgtaccggcaaagttcagaaagaaatggagtccccattggagaatctgtgcctgtatgtaaaaatattgatcttatagcaatattattcctacaagtttaccaattaaccttaaagtctctgaacaagaaaatgtaacttcctttgattgtgcaggctgcagttgattggatgaatgtctacccacaaggaatggagaaaattgttacttatgtaatgaaaagatacaataacacaccaatgttcattacagaaaatggtaagcatagacttgaacatggaagatatatgtactcatcttcagttcagggagataattctgatgagaattattgtggctcttgtaggttatggtttcgttgacaatcttgataacaataccaaagaatctctacatgatgactacagagtgaaatatatggctgactacttagatgctctgttgaaagcagtgaggtagccattgttaactgcaattatttctgttcttgagtcagtgttaatggattttaatgacatgttttctctgtatttagaaatggagcagatgtgagaggctactttgcctggtctttgctcgataattttgagtggaaatatggatatacagtaaggtttggacttcaccatgtagattatgccactctgaagagaagcaaaaaactatcagcaacttggtacaagaaattcattgaaaagcaaaagggaaaatccataataccacaacatgatggaaaaggcttccaatactaaggaattcacatatttcttccaactttttttatatcatggagagaagtattagaaaacttcattacatatttgtttgtataaatgaaatgactatgcagtttatcctatatgaaagtcactctatgtttgattttccagaattacaagaagtaacatagttcttcagcttacagggcttgctaatctcgtaaatgaaatattatgatagctcaaagaataacttgctagcaaatgaataagctacataaagatgagaatatgcgatcagatgatggcatacaaattgatcaactttagcataagaagttaccagaccttgcagtcaatcc

SEQ ID NO: 2851 - DNA, 1826 bp, Cannabis sativa
gtgaccatcttggctacgggggaaaaggtatcaaaaaaatctaatccttcctgctgtgtatatccttgtgcaactaaacgagctttacatctttccacagatccatcgctgttgtatttaatcttgtacacccatcgacatccaatggcttttttatttggtggaagccgaacataggtccaagttttatttttgagaagagcaaaaagttctgtttgcatagcttggttccaaacattaagttgagctgcctgattgcaagatgttggttcaaaaagagctgtaatggcaagaataaattttttatgagtgttagatagtttatcataggagataaatctattaatagaatgaggtgtagaggatttgtcttgaaggacagagtgacattcatagtcacgtaagtatgctggttgtttgggaagtcagctactttgtcttaaagttggtggaggttcgtcttgttggacagattcttcttgtgtcatgtgagagtgactatgttctggtattattgctggtgtatttgatataggtgcatttgaatcaacctgtggagctgtggaaggacaagtgctagttggaacatttataggaaaatctcctacatcagtttgagagatattaggtgaagggaaagatattttcatgaaagatcacatttctagatataaacatctctttattgttaatatcatatagcctataccctttaatgccttgaggataccccatgaaaacacaagttcttgctctagtggtgaatttatttctttttgctgtaagtgttgaagcaaatgcgagacaaccgaaacttcgcaagtactcatagtcaggtaactcaccaaagagtaactcataagggtgttgtttgacaagtttggtgtaggagtgcgatttatgagataagttgcagtcaatacacattcggaccaaaatcttattggtaattttgcttgaaaatatagtgctcttgcaacatttaataggtgttgatgctttctttcagccaccgcattttgttccggcgtttcaacacaagtaaagtcatgaagaattcctaacttggcaaacaaatctttaaatgttaattcaggagcattgtccgatctaaaacatttaaacatgcaattaaattgagtttggatgtaagaaataaactgtggtatgatcaataatgtatcagatttttgtttcattagatatatccaagtgaaacgagttttatcatcaacaagagtaagaaaatacgtgtgattagagtgagaaggaatataataaggcccccaagtatcacaatggatcaaatcaaatttattttgggcaaaattattgtttttagggaaaggaagtttcctttgttttgccataggacaaacatagcaaggagaatctttgtgaaggttatccatattacaataaattttattacagagcaaagctaaacgtctttgagaggggtgtccaagtcttgagtgccaaatttcagcagtgacagcaagagtataatctggtttggaaggattttccaaaacatagagtccattgcactccttacctttgcatatcaccctcttgttgagtgtttcctggatttgaaaactattagtacaaaaatcaatcttaatagaattgttattggtgagatagctaacagacatgatattaaatttaaaacttggtacttagagtacatctttaagaataagatctgtagatatagcaatagtaccacttcgattgacagtaaaggtttcattgttgggcaaaattagccttgtgtcaggaacataacaaatagattgaaatagttttgcattattgca

SEQ ID NO: 2852 - DNA, 3870 bp, Cannabis sativa
aaaattgttgaagtttctgcagtattctatcaaagtatggagttcatggatttcctactctcttcattttgaattctacaatgcgtgttcgatatcatggctctcgaacccctgcttctgttattgctttctacagtgatgttactggtaagaaaagaaaactcttgagtgaaaagttctctcttttattactttctggtgtcattttcaagtgattttattgggaatgttgaattataatgtaggcattatgactgcatcacatgatgaagcctcactgaacgaaattggaagctcatcaaatcacgagaagaatggcaactctgagcaggaaagctgcccattctcatgggcaaggtctccagaaaacttactccgtcaagaaacatatttggcgctagccaccgcatttgtggtactgagattgctctacctaatttttcccactttgcttgtattttcccaatgtgtttggagaaggtacatccgaaacatgagattcgacaccttgttggagcatcccatcgcttatcttaagagagcggtacagttatcaaattccttaaaggagccttgtaagagaagcaatttacaggaaggagccatgaatgccaaagcttgggcttcgaaatccctcgccactgtttcaatcggcgatgcaagcaccagcagccggtgtgtacccgtgaacgaatgccaataaccttcttagaaaagctcaaaaccactcgaaaagacgaaaagtcttcgacttcggtcacccatgaatggtccaacaacaacagcagctgaaaacagaaagaagagcatttgtgctagaagaagcttttcaagaatatcatcttgaagctcttgagaaattagggggttttaattttggggttcaacgagtcattgccatgaaggtgaaatatgtaactaaatcttgatgatgatgatgtagtaattcatttttccttttttgtctatatgttttttcaatttttttcttaacaaattacaatattaataagcaattagttattcaaatttttgcttttggaaaccatcatttgggtttaattaattacattaattataataataataattattgtaactttcattatacgtaccaaaaccctcttctttctcatttagtttttttttttttttttgaaaataataagaataaataaataatattcttaatgcaatcaatgacagaatattattaattttttttttttttaaaaaaaacaaaactttgtaataagacaaaaatgtctggtttgaaaaattaggtttttattaaatacatataataaaagacatagccaaacgcggtcttatcaagcttaccggtttggttacgctgctggttcctcacgcagactcgattttcgtcttcttctttctgtaattagggtttttacgagatcagctttgaaaaagagaaaaacttagtcatttccattaatccctaatcaaaagttctcttttttatcatttgattcattcccaatttcgtcgtcttgctttggtagatccagcctcgtaaaataatcattcaacctcgaaatggagaggagagttgcagataagtataagttgggtcggaaaattggcagcggttccttcggtgaaatatttattggttagtcaattgcttgatcgatgtaaataatatttttgggatgtttgtagctccaattttcgattttctcagttctgatttggtgaaatattgttattgatttttttctttttcagctaaccatgtcgaaactaatgagatcgtcgcgatcaaaattgtgagcgctgatacactctttgtctttttttttttttcatatgtatattgttctaatgaatttatcgatttaattacagttctggtaattgtaaagctcgttttttattttttatttttattgctcaattgggtttgtttgttctaatatcaggagataaattcatttctgtaactgaagcatggttaaggaaaaaaatatatgctttaatgggaatttaatatttaaacttctgatgaaagtttgtatgtgattgtgacctttggtaatgaaattgtttgaacttccccattctaaattatgcaaagttttgacttttacagaactcttgttagggagtgtccatctcatgattagaaaatgcatatatataaaacattgcttagaaaatgttgccgctggttgctgatgctctttagttagtaattgattgtttttactcaattttgagccttgtaggaaaatggaaaaacaaaacatccacaacttctctatgaagccaaggtgtatagaattcttcagggtggaagtaaggattcaattgctgcagcatatttcgatttgaagctacttgattttgaaaaaaaaaaaccaaaaacattttaagtttctatgctattcttatctaattcttataatttttttaacctttcaggtggtattgcgaatactaaatggtctggcgtagatggcgatgacaatatccttgtccttgatgttttaggaccaagtcttgaagacctccttgtgtactgtggaagaagcttttcacttaaaaccatcttaatgttggctgatcagatggtaattttctttaattgtttggtaatgtttttgacatcgttgtatacgatttacgtgagaacatgtttttcttttagaactaaaatgaagggtacagaagtagatgttaaagtattgtagttttcaaatttaatggggtaaaataattgttatgcaaatcttttaatagcctaaagcttttgtgtaattgtgtaatctttttcttttgaataatttacctcttttatgttacttgaatttcagatcactagaatagagtatgtgcattccaaagggttcttgcatagagatgtcaaaccagataacttccttatgggtcttggcaggaaagcaaatcaggtagttttcttttcatttctattgttttctgtatatgcatatgtagatttccatccactttaatttcaatcttatgcattcttttataaacctctgcttttacttttttcgaactctaaaatatgtatctttgtctttgtgatcaggtttacattatagatttcggtcttgcaaaaagatatcgggatcccgcctcaaacagacacattccttacaggttaattatgcgacccaattagaagctatattcacttttgaatctggcattcgtgctgctcttttctcgagaaatatttagattccatgaacttcaaatattatgtggtttctcaactatttaaatcttcattgccttttgttaacttatgcagagagaataaaaacttaacaggcactgcacgttatgcaagttgcaatactcatttgggaatcggtaagctgaatatgtgtatgtataattttgttacatttgctagatggaaaatgtaatttcatactaacttcttttggtttttatgctctcagagcaaagtcgtcgggacgatttggagtctcttggttacgttcttctttacttcttaagaggaaggtacaaatttgatgtgttagttttggaatttttatctgcacaatttcatttatctaccaattatttttcttgattgctgacttgttttcgattttagccttccttggcaaggtctaaaagctgccacgaaaaagcaaaagtatgacaagatacgcgagaagaaggtatcaacacccattgaggtatgcatcaataaaaatttcaatttagtggctatcttagctctttttgtatttgttgtttaccatcgaaattaaaatgcaagttcaactaacaccgcgtttttcaaaggttctatgtaagtcacatcccgtggagttcgcatcgtacttccattattgccac

SEQ ID NO: 2853 - DNA, 784 bp, Cannabis sativa
ttctgttatggacatttgtttccatccatctaaacctattttattcactgggtaatatttcacttcattttatatattttttttccctaattgcatatcccaaccccatcattatattttttttttcaggtctgcagatggtgaattaaggatttgggacacatcgcagcatcgaacaatttcatcggcatggttctctatcaagttttaaacaaagtaactatttacattctgttgagagttttgtgtttattgtgtatagtgtgtaatttcagggttcatagtgctgctcatggagttgtctccgtagctagcagttatttgattggaaccaacaaagttatcaggttattttaacttgttttacttaaatcaataaaacttagtattctgcttatagaaaaataatggattttttttgtttagccagggaagggatggaactgtcaagtgttgggatttagaagatggaggcctatccaggtggtgatcaaattggggtttatttatttatttattttttcactatcatctatttatatatctggggattgtaaaatatggggctaaataatatacttttcaggaacccattgcttactattaagacaaatgcttaccacttttgtaagctttcgctagtgaagaaaccttatacttgttccaagcagctcaaggagaattcccaagaacagggtcaagaaaatctgacaaatcattctagcaactttcaaggtttggtttagattaacatttgatgagatattagattttgcatgtgttt

SEQ ID NO: 2854 - DNA, 641 bp, Cannabis sativa
tggcaaaatgtcctctagctcttcatgattaattacttcaacctcaccatatttatagtccctttggtggttaaaacctccatcttccagatagaaaagctttagcttggcatgtgtgccatgatgcgttagcatcataagcaccatgactcaatacagcaacaaatcactatcatcgctatcatatagtgtggattacaaaatatcgatacaaggtgttaacctatgatatcaaaaagcgagtgagagaaattattgcagtagtggcagaagagctcaatattaaaatagaaaatggagtaatatcaagagatcatatacatatatttgccaatataccacctcatattaaagtgagtgaatttgtgcaaaaagctaaaggaagatcgtcaaaaaagatacaagaagaattcccaatattaagcaaaaagtattggggtagacatttatgggcaagaggatactttagttcgactagtggcaatgtgactgatgacatgattaatgaatatattaatagacatactgatgctcatgagccagcaatgactactaatataagactggaataagctttagcttgattcgctacttctagtcgctatagacaaacttttatctctcagatgaaagtaattgat

SEQ ID NO: 2855 - DNA, 1352 bp, Cannabis sativa
taatagcaatgctcatgtaataatgcaaggttttgaaaataaaggaaagtcaatgcatacttccgccgccctggattcaagtgcttctagattatattttcatgtaagaaaggatgccttctatattatatttaccatttttcgaattttagcatatatgaaaaggtgttttttacttcaatctacattaaacatttattaataaaattggacaagttttttttaatttaattatcttaatagttggagaaatttcttttagtctaaaatgatcataaattataatttgttacatgtcacaattgaaggtgaaaaattcttaattttgctatggagattttgtgaaatatctttgttctgtaaattgcatacattctggacaaaaaatttattgatatactttatgtattaaaataataatgataataataataaggtcacaacttcatcatatacttaatttcttaatttattcattgtttaacgagattaatttctctacatggctccacacacacacacaatgccgccacttcattattatatatagatagatatgttattagccttattttctggctccaccgcttcattattaattagccctcactgctccctgttgatccaaggcttgggacgctgcaaaattaaattaatattttcttcaattaaacgacttgttaaattaagattaaattttaattaatttaatttatacaaattaaaaaaaattataagaaattaataacctgtacgagagagtgccatattgtcatccccaccaacatgccatgcaaaatagccacgtaatctgttgtctttgatatacttaaccttagttcttatactctgaatatcatcgaacccaaaccaagtcctaccagagtaacagtaatcgtttaccactcgagaatcaaacaccgccgtcgccctattatcagctatgaactgcttgatctgctgataagtttttgctccgttgtccggaaaagcagctccggtcgtcggagcaaagtacccattgttactcgggttcgaaagagtccatccatatccatagaagggtactcccagaactatcttgttagccgggaaacctgcctgaatccaagccttgatgccggaatcggcgctgaccgaccttcccggattgtacagagctgccggaggtccggtcacggtcgaccaacccggcgcgtagaagtcgtaactcataacgttgatccaatccaaacttctcgacaaggcgaggacgacgtattccgcaccggtttcgtatctggaagagtagaaaaccgctgctgctagaagaagcggcgatcggccggtgttccgagcctcttcggcgacgg

SEQ ID NO: 2856 - DNA, 1153 bp, Cannabis sativa
tcaactgtggtgaccaacaagtccactaaggatgtcaaatccgtcaagatttcgatatccaaactctacggcccaatctggggtctgaccaagagtggtgatttctacacattgccatcatggctcaacaatataccagctgggaagagccttgagtttgtatacattcactcagcttcaccagcagatgttgcagtctcaagctacacattgtcttaattaggaaagacaaagatttgtgcagctatacaaatgcagtccagaagtggggtcttattttttcctttaaaagtttcaatctttacttgtgttttggtatttgaatagggttttttatatagggatgatggtattattattattattagcttaagataagcttgaagaactgggggaagaaaggagtgaagagacagtttatgaaaagtgctcatcctctttcacctctagtacactatttatatagacagagagagaaagagaaagaaagatagagagaaagaaatgtgagaagtgatattagtaatgacttctcaaatgacaccaagaagaagtctatttgttgtacttcacagcaagctttgaatgtctttgcttttttgtgattgtaatgttgtaacctttgcaacattttgcttttttcttttcaatttccaatatgaatatagtttgtgcagttcaatcttgtctacttaatttctattatgttatttttttccatattttgttcccaaatatatgtttcataaactttggaaccaagtacacttgatatgacaaaggataccatatgttctcaacatgaaacaatgactttgtacttaagattatttatcaccattgacacttaaattatatttttttttaattttttttttaatgaaatatcaacttcattaaaatatattagcataatacaaaagatgttaaagatcaagtgaaattgaaatattaaaaacagtacaaccaagttgataccgagagtgcctagtaacataatatactactcggtttactgattgtcttataaaatataactgaacatcagatatcgtagataataaatattgacgaacctgaatgagaaggccaaaagtgcatacttatcactatttaaatagtttgtaagtgcatgtttcacatcagaattctt

SEQ ID NO: 2857 - DNA, 1597 bp, Cannabis sativa
gtccgtcaacaccaacccgaaatgcttctaatttctgaagctcgtatctcactaagtaagttctctgctatctgtaacaaattgaatttctctggtttccactacgttccaccagttggtctatccgggggtattggtctctgctggttacaaggagtccattgtaaaatactttctgcaaataaatttgtcattgttggggaagttagttctgatcccataggagataaatggctcattcttggcacctatggaccccctcatggatcggataaggaagaattttggcgctcaataggggacatggtcctccttgcaacaaacccaattctcattctcggtgacttaaatggtactttgcaagactcggaatgcattaactatgtcaatagcagcaactcctcctgttatgcctttgatttcagaagaatggtgaaccgcactggccttatcgatttgggttttgaaggtcctggctacacttggtccagaagaaacaatgagactccgggtgcaggggctatcaaacgagccaggctagatagaggtctggcaaccacggattggagaattctattcccagcggccattatcaatcacctatcttcttctgcatcagaccaccgtcccattattctagatacaaatgggggagtcatgtgtaaaggcaggctctttaaataggaaaacatgtggaaccgggaccctagatgtttctgggtggtcagagaagcttggatgaagaggctgcactccaaccccatgatcaatttccatcgcaagaccaagaatactagccgcaagttgagacgctggaacaaaactcatttcaggaatcttaagttgcaaatccttgaagccacttcttctctaaaagacttggaactgagggacccggataacgtaactcaaatagaagctgcaaaaaagaaattggatgaagcacttcttagagatgaaatccattggcgccaaaaatctcggattcaatggctttcggaaggtgacatgtgctctaaatttttcatggcttctactatcgtaagaagaaggagaaattacatacaaagcattaagaatcctgaaggtggcgactggattagagatcattctgaaattgccaaatgcttcctgaaccattataaagacctattttccaagcaaactaccatccaacagccgaatttaaatgaaatctatacccagcaggacctctctgatgtggataactttctcctaaatgccatccccaaccatgaagaaattactatggcaatctcgagcatgggtaaagacaaggcaccagggccggatggccttcctccgagtttttactcgcaccactggaaaacagtcaaagaggatgtttgcgaaatggtaacccacttcttctctcatttggagcttcccaattttatcaatgatacttcccttgtcctaataccaaagaatgaagctccgatgactcctaaagattaccgcccaattgcactctgcaatgtctcttacaaaatcatctcgaaaatccttgcctcgagactaagagagctactgccaaacatcatctccccaaatcaagcggcttttattaaaggaa

SEQ ID NO: 2858 - DNA, 679 bp, Cannabis sativa
ctctctctctctctctccaattaagtacacttaaaattagatatgttaaaaagcataataagtcttatattgtgttccatggtccaattcagggcagagattatttttggattgaatgctcttaatggaagaacaatacagcgtgatggttctgcaactggtgcttgggactcctccaatgctgaatcttttatccgttacacagcaaaaaacaactactcaatttatggttgggagttaggtatgatcactttttgtaataactgagtaaatttatggtttagagatgaactttgcacgtttggaaaagggaaaaaaagtggtacaagaaaattgaactttcccacctaattaacatgcaaatttcacatgaattgttgacaatagtaatcttacatattaatattaagcccaagtgaatatttttattgagcagggaatgaattatgtgggagtggagttggaacaagagttgcagcagctcagtatgcctctgatacaatttctctgcacaacatagtgcagaatatctaccgggaaagtgactcaaagcctcagactatagctcctggaggattctttgatgcaaattggttcaaagaattttttaataagacaactaaatctttagatgtggtaactcaccacatatataatctaggcccaggtatatatatat

SEQ ID NO: 2859 - DNA, 2530 bp, Cannabis sativa
aggtactcaaagattaaagtaagtaaatgttgactactaggtttaggtattttcatcattgatttaagcactactagcttgaattgaagtagtagtaattaaataaataatatattgatagatggatcatgaaaagggtttatagatggatcaaataaaattatttaattttagaaaaatgatgatatatatgaaatgatatgaaatgacatgacaagaatgcatgaaaatggaaaaatgaaaattgagttattgataataaaatcccacacactaaagtggaccccatgagttgtcttccccttatgcggcaatacagcttttctagggctcctcacctttcgtcctaatacctctttttttttgtaagaagtgggatttaatagatagatagatagatagatagatagatagagatgggtacgttttcaatttcatgactccatctctctctctctctctctccccacttaatattcttcatttcaattattaatttctttttttattattatttctcttcacatagtcacaataatattatacacgacacacagacacagatttgcatgtagccatgttatatatctaacttgtctttttcataattcctctctctctaacccaatatatataattctaccctaatatattcttccactagtggaggataggaccccatataatttcattcgctttatttttcgattttaaactctctctaacaactcttgcttcatcatctacctatttatgattggagaaattaactaattaacaaccaatatatatattttaactttcatagacaaataggttataattaagaaaattttataggagcctatttgataattttttttttctcttttacagtatttatgaaaaaaatttaatttattttttcatacataattagtttataatatagaaaaacaatcagtacaataaagtaattaaatattattttatcgtaaaatatttataattttttaaaaattgagagtaattaatactaattaaataactacaacttacaaaataaaaaaaaaaaattattaaactaaaaaatcccccaaacaccaaatctgataaaaaaaaatatactcatgaaacaatccaaacaacatttttaagaggggaactataaaattactcagcctatatattcactctttgaaattatgaatatgtaatgattaacgtttgtccaccttcacataaaatatatgtatatacaaatataagcactatactagctatagctaataattaatggatttcaactatgtatatatattgtggctcatttcatagaacatttatagtacaacactctaatttataattaaatatgattgcttagtttacataaggtagtcaatctatatcctatatattcttaactacgaaggaagggagaaaaaagtatagtcttgtttttatttaaaagtaaatgtatatatatatatatgtatctaagcctatatagctagttatttacatatatatatattgattaattaagcagaatattgaactaatcgattatatctatctctagatctattgatgatcatatataatgaattggaattggaccacatgcaattaaagtggaatacagtacagctatatatttcccttacctgtacttagtcgaccctatctattatatatagctcaattcatgataatatttatattacatatatatagttcaaatcaatctttcaacaaactgaaatatttgtcctttatttatcattccattgatcttttggtgaccacaatatatacttaattttttctgttgtattttatatactaattagtaattatatcataaggccggccaattaagcttttgattatataaactatactatagaataaccaaattatagtttcagatactagtcaatgccatgaaatgtctaaaccaataaaaaaacatggataaagtgttttagctatatagggaatatatatctctctagaattaatacattgaaagaagaaaaaatggatggttctaaatcctaaacattccctattcacagtgtggggtcctctcatatataaaccccttaaatttcatactcaatacatattggagatttttatatatttatttatatatgtatggttcacatggtgacaaagcaaaggaatgacaagatgatcttttccactatacccaaaaaaaaaaaaaaattaaaaaaaaaaggatggacaagatcattcttgcatgactataatagatcatgcccccttggacaaaggttgcatgtgactttgtgcctattgggtttacagagagaacttacaaaagtatatgtaagtgataattgaggcctagctaggcagagagaatttcatacagacatccctaaaggaccccactacacttaacccctagggctatacatatataatatatcttaatttgttctttcgtttaattattaattaatgacttcaaaattttgtgttgcccaagattaaagatttgcttctgcgtatatat

SEQ ID NO: 2860 - DNA, 2486 bp, Cannabis sativa
tattaaatcctacttgaaacttatcagtctcatttactggaaatgtcaaactgaaacttgctatgtcacagtgtactaaagtcttattttctacattggtaaattttgtagccattggtttggaaaagcagaacactgattatctagcaaaagcagacaccagtgaattattttaagattagataagaagtataattatcaacaagaccagtttaatctgagactgaatgtctgaaaaaaagcagattgaacaaagagtaaaatatagagtttcacttaagatgaacacacgttgtatgacttaatgtgaatgccaatgctctactttgttgaataaagggtttcttctgttacttctctaaatattctttgtttagatttgtcaaaagctctctttctttatgttttgatgacttctcaataatttagtgacaatgttcattatgtaccatagaatagacaataactgcattgtcgtcatctcacaagtcaatattttaagaactagactagtaacaatctcatttacaattttgtatatgcctacttgcaccctcaacggggttgtaacagcgaaattgttgcatcatcaatagaatagagctctcctcttgctctgcatagacaacattctttatttaactcaccactttcgttaatggagaatgcaggttttttaggactaatgatggctgcagcttcattcttgagcatcgataaaacctccaacatggatggcctatcaaccggactttcctgcacgcatagtagagctatctgcatgcatctttctattttgcaagttgacgaagagtcatctagtgtttgatcaacgatttgtgctccaagaccttctttccacagttcatatgcctgaaatagtggacacattcaatatacacatttttattggaaactctttgaatcacagcattgataaaacttataagtagaaaacaacttacatattccaaaaggtgtagattttcattcagaccatagtcactagtatttctcttgccacttatgatttggagaagcagaacaccgaagctataaacatcatatttcattgaatatatgccttttctaatgtactcagggggtacatagccactgaatattgcataggcacaaggtaaatggtcagcagtaagaaaaagcacaaacatacaacacatgctatagagtactcactctaattacttactatgttccaacaatccgaccagtgattgcttcaaattcatcttttctgaacattctggccaaaccaaagtctgaaatcttcggattcatttgattatctagcaaaatgttgctagcttttacatcccggtgtataataggaaaattcgagtattcttggagatacaaaagaccttgtgtaattccttcaataatgcagacacgtttcttccaatctaaaagatgtcttttggtttgatctgcattagccattagttctatggtcactggtttcaattaacataagtcaaacaaaagaagtagatttcaagaatttttttcataattagtgaagaaaagacttaattttcataccaaagaggtagtgatccaagctattgttcgacatgtattcatagataagcatcttttcgtccctctctatgcaatatcccagcactctaacaaggtttacatgttgcaggtttgcagtcagcttaacttcattctcaaactcttcgaaaccttgatttgatgttttcgaaagtctcttcactgcaatttcttgtcctgtcctcaaagtaccctaatggaaaccaatgtgcttactagaaaaattagcaatcaccaaaaacatttgaaccaaatgtactatgatcaattaggacaaaaaggacagttatctttctttacacactagttgccaagctaaaaattacacctcaatattgtttccatgtgcttttatttttgctgtttaataagaaaaaatggtgaagcagttattgcaaacttggagatcttaagtaaacaataaaagagtctagtagtaccttgtatacaggtccatatcctccctctccaagcttattttgatttgagaagttatttgtagctgccttaacagttgaataactaagtacttgcagattagaggcatcactgtctcgatgttcagtagctaatctgattttgagtttataaattgaccttttaatgatattcataatccctacagccaaacaagctaagttcatttagataaaagtaccaatagtcttttatatcacacacagctaagaaaatattacctgttgaattgagtgctcttctttgtaataaacacaagatggttgccagcaaaagaataatcatagcagttgtaactagaaaaatggtcaatagtcgatgcttcagtccttgctgatctccatctccctcaagagctatcaaagtagttgattttatgaattataaggtacttttccacatctaacaaaataatgcaaataatcccc

SEQ ID NO: 2861 - DNA, 1009 bp, Cannabis sativa
ggctgccctttttatagttcttgtcttttgaaagcctttgtaacaacttgtcaatttaaatgttttacgagtttgagatatttgcattcttttcttcaatataaataaataaaagaattattactttattatcttttttcattatgcaatagtgtaaaaaatagtactgctttaattgaaatcattactagacttcttacttatcggttgtcccattagataacgatagtgacattggacattaaatatgtaatatatagtatgatttaatggttatatttggttatgtctatacatgaatgtatgcttttgtttttttattgggtcttgtgaatcacatgtactttgtggtgtaagtaaagaaatgactgagttaagtcagccataagcttatccggccggccggtgttgccgagtaatagtcaaaattttggttgtggcaactctaaagagagtaagtatttagttgtagaattttaatagaatctttatgaatatttttaaaagagaatccctaactttaatttttgtataatgctaaaacaaatttttatgtcttaaataattagtaaattttaattaaaacgtatatatatattttttaaatcattagtttattattattaaaataatttatgaaagcatacacatgacatgatattttgagcgttttgattgtttataaatctgaatgtgattaacactttaaattttaattaaatactttattattcaattgtttatctttggccagatttggaaattagttacgagcgcactagaagagcagtgaaactacattagtaagtaataaaaaacttcacttcgaaaattgtctgttccatcgagatgtatatgtatgaattatgatcaatacctataatatgaactgtttttgtacaagagaaacaaagaatagtttttttttcttccatgtcctgtcagtggtccttaaattaaataaaccccagtagaaccatctaatataaaatggaatttgaggggcttt

SEQ ID NO: 2862 - DNA, 3943 bp, Cannabis sativa
taaaatatgtctaattaagaagataaaaaaaaaaattaacttcagtacccatagcatgaattggagttggtgtaggtgatgagaacaactctttactaatcaaaggtttattgtaaatttctttagactaaaataaaaacaaaaaagaaaaatgctattccacatcacaatctcaaccaattttttattttaaaagaaaaaatatgaaggtaagcttattgaattaaaacatgaagaataattaaaacgactctaaaagttattatcttaaattatatgactctatttaaaaagtaataataaattatatgaaactcaacatttaattgcactaataataatatgacaccgaaaagaatactaaacactagcggtgacttataacatttctcaatttataaaaccaaggttttattttgtcctacttaatcaatgaaaatataaaaatgagaatgaaagaagaaacaaccagaaaagagagccaaaatattacacaactctaatagagatatctggctatgaaaaacaaaaatggaaaaacagaattggatatacaaacttaaaagaacaaagatcaaggcagcaaaatagaattaaaataaaatatttcttttttccttgttactttttttctttctttcccaattaaactatcattaagaatttttttttttattcggacgaagaacaagcaccaccacgaaaatgcagaataagggggtgggcggcttcttcggtcctgcctcgccatctttgcaacaaaaatcctttttgagctgagtgagacatgtttttgaggagtgaagaagagctgaactagttttcattacaaatagaaaaagagagaagactagcagtattgtcaatataaacatgcctctggttttttttttcgggtttttttttctttttctcctttggttcaaattacagaacctgaattaaagcaacatatgggacacaataagtaagaaaataagcctacatataaaaactacctgtctataccataaactactaacctgacaaggagggaacaattaattgtgagtaaagggggggcagagttttcacacaaacctcacaaaaaacaaagactgatcggtcacaagtcactctcgaaacaagttaaaagtccatctctcgagccagaacaattatccggtacaaaaagaatttgcacaatggtcgtaccaagaaaacaagttctgattcgagtaagatatcatcgtcaagagagttattagcaaccgatacaagattctctgccaactgattcttcggagagatctaacaccttgtcgttgaatgcagtgaccactttgttacaacttattgtgaatcctctgaatcagatggcagagcttgctaaggaaagctcatggagctcacttaacatccattcctctccggtctgtccaccaaggactatagctcttgttcctccaactacacaagtactatgcccccaagcaaatcttggtggccgcccaggtacgttaagtattctccatgtgggcttctcatctgttggatcaaggagataaagttgtgaggcggagtgaagaccagcaactgacccaccgaagattaggatcctgccacccgggaggctcacagccacatgatcaagtctaggaggaggagcaatgccccctggatttccagcaccaggcattccacttccagtgacacatctccagcatggttcctcctcacttagatccattgtaaacacatcactggaacgaaatctaagtggcccgctcttggcaagacctccaaacattaaaatttttctaccaccatatacagacagtgtgtgacccaaccgagaaggaggtgtccatgctgctggtatttctctccatatgggtttctccattgagagatcaagtagaaacgtgtcactcagaagtaccccagaatctgcacagccaccagaaacaatcaacttggttccatcaagggtgcaagaactgtgccatgatcttggtagtggtggagccaatccggatatttcacgccaagttggaggtttggcatccaaatccaacacaaaaacatcatttagcaagccctgtgttccacaacctccaaataccactaaattagacccattcacacaagaaagcgtatgaccccaacgacctggaggaggagagctcacttggacatgctgccactcggggttgcttgcattcagatccaacacaaacgtgtcattcattggctgcatattaactccttccccaccaaaaaggacaacacgattcccaactgcacaagcactaaagttacaacgtgatggttcaaccccacctccaacagtcacttttctccatgttgctgcttcaagagttgtcaattcccgtgctagtcgaccccaccctaatctctttgcaccaggcactgtttcaagaacactagtcgtctcactaccccaagcattttggcaaaccattctccaaagatcctcattccttgtcaaatcatagagtcgtctacacacagacccaacagatgcaatatctctgggagtcaatcttgaaagtatcttgagggccagtacttcatcactcaactgtaatattccacaaaacccacgacaaatatttcggtccccggaaggaatagggcggaaagtggaaagattagaacgaaaccgctcggaagattttgcagacatcttgagcgatgaacttggcactggacccaaatcaatgttggcctccgtaaagaattggacgccaatcacatgagttattgtttcatcatctccataaataggtgtcagttgcaatctattcatcaacggggatccatcttttctaaagtttaataactcaccttggaattcaatgccttcctcaagacatcttctgatttcagaaacaactgcagactccaccaaaggatgccttcttttagcaaatggacctctacactgcaagaaacgactgaaaaaaagggataaaatattagaaccaagacaccactccaatcaattagtacttgtagtgataaccatagcaacagtattcaagcagaaacagaactcccagttccattcgaactaatcattaaaacaaaggaacactacaaaatgataaagtacacaaattttctagagaaattcacaagcaaaatacttcagcactgcaacaaacaaatcgccagtgattataccataaaatcattaaacagatcataacagcaagaagttggaattctttgcaacatgaaaccattctcgaacacgacaaaagctagcaagagacacaaacatttccctacatgcacaagcaaggtccggtaattaaatccaatgtatacataatttgtaaaaaagataaaacactggacaaaagtagagcagtatcacatgcagttcaatcaaactagaattctagaaatattaatataatccaatcacaacagaagataaagtcacgaaccgtatagcctataacattattttctaacaaatgaaattttaattgatataccataaacatgtacatcaaagctaaagaatgagaaatgctctaaaataaatgtataaatcagctagacggagggtaaagaaagttacaatcaagtttgtaatataaagttttgtataggtttcaaaagataaacagcccatatgattactttcagatcaaattaaatattttttagttaaagttagtatgtttaaacgactaactaaaaaactgtaaagattaattctcaaatatcaaataaaggattatacagattataaggcttttctcataaactcataccaccatagtatatgaatattaatttaaaaacagtaatatggctgtcatcaaaaaggagaaacttttttactacttttaggaatgataatcaagagattcgactaatagtagcttttggttataactgattatatgttcatttcagtgtacta

SEQ ID NO: 2863 - DNA, 1683 bp, Cannabis sativa
tacattccaaaaggagagtgcactacatagttaaaggcataagaaattgaaattctcacaagatcacaagtagttaaactgcgcaggggtaatacagttatacacacttacacttgcggaacaaaagtaagccattgagaacaaatatatatacatacaattatacacatatatacacttgcggaactatgctcttactcaatataagccattggggcagcatcaccaacacggatacgtgttcgaagcattcttgtgtatccacctgctctatccctgtagcataacaattaatcagtgtaagtaataattgttattatgataaagtgggatacaactgctgtgtgagtctgagatttacttatatcgataagccagttctgtaaatagcttgtgaatgacatcatctcctcgcacaaaagcagcagctcgtctagcagcacatagagagccctgtcatggtccaaatgaaaaaaatatatgtacatttagaaacttcaatacatacatgttaatatagacatcaatgaaaaaataaaactctatgctcaaaaaagcgtactgtcacattttcaaattcacacagaaatcacatccttaaagttggactgcggaacaatgctaaactagaatttcttttcctctttgactgttcgtgcttcgttttcctagatgacagtatcagtatattctaccacacgtccctcttccaaattttactacttccatagattgaaacccttaattccaccacttttcacctttaaatgaatataaaaataacataaaaaaccccttttttgcattttttttttctgaacatacatgcaacatttggtctagtgaaaaaatcacataccataaatataatctgtaaatcccactacgttttatacggaaacaagagcaaggtgtaacaacaatgataacttaggcagagaccagtaagaaactcaagcaaacacatagtacttcggaaaaaaaggagtttgcatccctttgaaagttcattgctccattcaactactagagctacttactattgcaatcctagtttctcctcaaaactcatttctcatccacacttccaggaacctacatccatcttccactccctcattcttgttccaacatccagaacatctgctcaaccaaattttaatttgtaaaccaaaaatacttttgcaaatcaagtgaggttctaatgcagaattgcaataaaattagtggatctttctgctaaggctgattcactaagaaaactctcaaagttcaataactttacaatgatttactttttaccaggagggaacatggaagcaagtatatattaagttcaaaagcataaatgaatttgagcatactataaatttagtggctgaaagcctagaatagttagctatgtcgcacctcctttccaagttgaaccatattatcagctagacgccgaacctctttagcctgcaaatgggtatagaaaacagatgagtccgaattcaacccttaataaactcaattcctgggtaaataaatgatcaacaagttcaagtgttacaacatttcaatgacatcaaaagaagcataaaaagatcagttcaacttaactgagatcacttcttcccagaaagaaaaacaaattcaaaagagactgtatttaaacaaaatcaccttgtactaatctaa

SEQ ID NO: 2864 - DNA, 3151 bp, Cannabis sativa
  modified_base (1911)..(1916): a, c, t, g, unknown or other
aaaaaaaaatcttcaaagagaataaaattgaacaattacaacaataaaattagacacgtatcacatggaatcaagctaaataatttttactgaaaataataagaaatatagattagtaatagagagtataataaatagaatagtaatcaatgtttatgaagacgaaaacaagtaaatagagcacctctataaatatatatacacctgaattacagtctacagatactcaatattcatattttttgtttaatcaaaacacagttttcaatcttgtaagaaagactatatatgatttttgatcttagattttcatatatatgtgacaataattcaaaataactttaataaaaaaaaattaaaatatataaataagataaaaaattggtagtgtaaccaatatatcccaaaatagccagatattttgggttcatcaaaaagattacatataatatgcccatcgatatatatcaattaatgtacagaaatagttttcaggcagcaaaagtattttccgataatactccaacttattactttagttttcatttcttttttttatttgttctccgtcaagaattcaaataaattaaagaaaatttgtgggctattatggtaagaatgaaagattcttagagacatgctgtttttccatttactaattgatattttcttccctgatcaaaggtctaattaaagtaccagctgcaaacctcttgtaaactgattttaaataaaaaaaaatgagtaaactaatattaaaactaatatatttttatttttaacttcatctcgttgaagctttcaaaccagaaaactcaaatgaaaccaaaatttaacaaacttcaacccaacctatcagattatacatgcacaataaacctaaacaagaaagggaaaatacattcgggcatcatcacaaaccaacacaacaacaaaaatggtggcactaagaacagtttgattaaactcaaacatcacaaaaaaaaaaaaccaaaaattaagccctcacatctgccaaataattcttcttatatcaattgcttaggcaaatgtcaatggaattataaaaaattcaaatttcctctcactagttcatcttttttgtttatattccatgactctctatgagttattcctccgcttctatatattttttccttttctcacttggttctatcaccacaccaggcaaggggcaaagttgacatttagtgaaatgtctactctagtctaccatactataattaaccatgaaatgaagaacttctaagaatttgttttcccaaaaaaaatctcctccaaatttatataaataaaaaccaacaaagtgttgatgaatatcatttcagttatcacatatactgtgaaagaaatagatatgaagacacctaatttagttacagtcaaagtttaccttttgaagaggaatactaggcatccattgagatatcatgtaagagaggagtagagggatacctttgcaataatcggcggtttggttcaggaaacgtttcaaagattgcagagcgcattgcactcactcgagcttcctttctatcaatttctgaaaacgaagcaaaaaaatgcaaagccacataagcaaatagatagtaattcacctaaattcacatgtgcaaatcctttcttttttttttctttgaaacgaaactacttgtgttattaatcatgagttaactagaaatgaggaataaataaagattcacccagcaacaaagagcaaaatacaatagccaaactctacaaaataaaattgcaatctctcaggaatatcttcaaacccctcttcataatgtattcataaagccacaatttgtttggttttatcacaaattgtaaaatttaacaactattaataaagcaatgcattttgtcaaaaaaataaataaatannnnnnaataataataataaagcaatacataaattataaattcttaaatcaaggattaatacatttaaggcctttcttcaatactatgttcttgcctggtaacatgttttaagaataaaatgagaagatcttaaaatgttgggataagatgaaaagtatagaaaataaaataaggtaaacaaaaacaataaaaattaaatattttattgctgataaaccctaataagaggaagtaacaaattctaccaacaatcaataaaactattctaaagttgaaaatgccgtatttttaactttcctttagttcatttgattaatgtattttaattacagtaccttcctattaaattgccacttggaaatggtatacaaatttatttgagaagccaagaacttcagtctatcttttttcttgttattacaattttgttttgagctattatagaaaaaacataatagaaacataacatgaaacataaatataaaaagaacaaaaaagtaagaacttactatgtgcctcgaacaaggcagtgttttaagctactataattttgttttaagctattacaagaaagataacatgaaacataaatataaaatgaacaaaaaaagtaagaacttactatatgcctcgaacaaggcagtgcagcaaggtgctgatactggagaagaaggtagctctcgcagaacatactgccaacgggacttggtgattattgaaatcaatggataaagcataattgtcacagatagtattacttgaaacaaataccttaatacagtcaccaaccacatgagcatcctcattaggatcaaattcaatcttgcctacaaacaacaaaacattgtacaatttcagttaggactgaatgtttataaaaatccaagatcataagcaaaattagaaacaaattatcaattcttgaaagatgtttttaatgttcttgcagtcaaacaagagatcgtggaaatattgtagccagcctgaagcaaataccttgttcgtattcttgtactcttcgttctacttcctcaacatctgcacactgtcgtaaaattccttcaactttagtacctgttgcttatcaaaaaaagagcctttggtgactgttgaaagacaatagtaattctatgatcgatcaaattgaataattcaaaaccaaaataactctctcaataagctaaacacagctctcgtatgagtaaaacgatgctaatcaaaatggtaaagttcaattttt

SEQ ID NO: 2865 - DNA, 2098 bp, Cannabis sativa
agtcaaatctgcaccttgttgctgacatcacatgttagtttataattgtaaaatactttggtaaacggttgttaccaaatggtagagaaccagggctcttgaactccctgggaacatatatcaatatcatagtatttcttctagtttctacctgttcttgtactttgctactgtattaaccaattgataggaataattcttatcatttaccttttgggttttatgcaaattcggatagttggcatccttggctatgttacatttctcctgtgcagttgtgcttatggtatattgttttacagaggcgtttttttcatcttgataccggatgtaatggtgtcgtttttgtgcaaatgaggaagagagaaggggatcctggccccaaagatattgtgcagaacattatgaccactgcagctgcaacaaagaaacacatgtccaggttcatgaatttcatgttaatttactttatattgggttcctttgtgacaatggagtatttgtttttgagctaacaaatagggatattttcatttgtaggtttatcttgagaattttacctgttgaattagcatgctatgcttcagaagaggagatttccagagctatagttcctcttgtggaaaaatattttcctgtggaaactgagactccacaaaaggtcatcatttatgtgctaaacataccaacgctattttttttttaattgtataacatactttatacacgcaagtatctagaatgtaagccatgcacattaaaaatattattctgcattgttggcagtcacaggcacccacactcattgctcttttttccctgctactgggcctggtctcagttcaaaaatggttctaaattacttaccttatccaaaaagatcaagttctacaaaatcatttgttgttatctccatttttcatttatttttccttgttatattatgggtttatggggatctaaaacctgaaccattctcacagaaactcacccactcactcatggaacttccctttttaaagataatgctcaagtgccaaaatctaagcaattagttttcaatgttaagatgctgactttttaaattacgaatgcagtttgcagtgctatatggggcccgtgcaaatactggagttgagaggatgaaaataatcgatgccgttgcgaaatcagttcctaagccacatagagttgatcttaacaatccagatagggcctttgtagttgaaattgttaaggtgagagccttttctaaataaactgatacccttattttgttgatgtgtcaccggttgacacacacacacgctctctctcacacacacacatccagattaaatgacacacatatcccaataaactgatacccaaattaacgtgttttgcaacaccctttggacatattttcagaaaaacagtttcctggaaacttgataatacacacacagagacacataatcccctttcgctttgtgagtacaaataatgtatcaaattcaaatttcatggtaaacctcaaattatttgcctgtgtgaatgcatgcgtgtgcctgatgaagaaagtagaacattatgaaaagttctcaacttatttttgttgtcttaagaataaggtctaatccaacctattttatttgtcagactgtatgcttgatcggcgttattgagaagtacaaggagttggccaagtataacttaagacagctcacatcatcaaagccttagggcgttgaactcaaattaaagttatgtcatgcgagactcaaccatagaatcttgagcattttagctcaataccttattgtcatgtttgtttcccttgtagaaacgttgatgttctgaaccaaccaatgttaatctaagtttatgatgttcaatggaatattattattattaggctttatatggttagattattgttttatttttatttttataaatttagtatctttacgtcttatcttacattacttgtgtctttttttatatgttttgatcttgcaagtatgattaaaggagtatgattaaaggagtgcttcaagaagaaagaaacaaggatgttaaaaggggaaacaatagaagcaagtagccaaagttg

SEQ ID NO: 2866 - DNA, 2709 bp, Cannabis sativa
ttttatattaatcacgttaaaacaatgtaataatgatggtcacatcatatttgtatatgtattatgtattgtatgatatgtggggcccttggttacggtcatgttgtaaatatccactatctaagcatattgcacatgcaaaaacagttttaaggatagtgtgtatggaggggaggctggagccttagccttcacaagctaagctatagtataagaaagaaacacatgaattgattcttaaatcgtccaaatgagaaggttggtcatactttattgtttatacctttccacacgatatgagacacttccccacatgtatgctaacttctcttgttctgtcttctcagatttgctaacagaccatctctcctacattttctatgatataaaaatgcctttattgttattattatagtaccactagtgtgaacttttccattttatagggattggtataatacctgacaaaataacctaatctaatatgattcaatacttcccttatcatgcccaagggttgcaaaaacttctaaagttcgagagattgatgctatatattctcattcaaaatttagagttgattctctaacccattattaaacaggttctcaagcaagaaattcactttcttactctctatttgggctccaaaacaatacaaggttctcctcaaacattgcaagaaataagtcttaaaaacatgtatgactaaactttaatataaataggtcttcggttcttgaatcaaatgaggttgaagtgcggagtacgttatactttgatacaaatttgggattgttgctccaaataattgagtttccttccacaaattcatctatgacattgatcttacattaaagaatgtactataaaaaatctatagtacattttttaatagggtgtttctagtgatgaacactcttaaaagtatcaatccccaatatagaaaaaattacattaaaaactatcaaatattttttttatttgataattatagtacaaaaaaataaaaagaaaaaagtcttcacaaaattaaataaagtagacctagagatttttttataacaattaaggcttcacataatgaaaattctaagttcttcattgggtgtttcgatagacctcttaattcgacatttaagaaaatattttagtctttttttatgatatagttatttagagccatttatacattttaagaaaattttaaataatttacggcaccaaaattaatgttcaaatattttattgcacatgtgtttatttatttatttttattggattctcattaatcaaacaaactatttacaaattacaaacttactcgggagaagttgaagaatactctttttttatatatattaaccaaatttacctctaaataaaatttaattcaaatatatatctttttataactattgtacccaaattatcctcacaccctcacaccctcacataattaagacataatttcaaacatagtagatttatattttttggagctggatctgtaggtttgagggaaaattaaggcaaaattttaattagagaaaaatagaaactattgtgaaagtgataggggtaaaattgatagaattattaaaaaaagaggtaaacataataaattttgaaaagaaataaaaatcaaaaaaattaattttaaaataatatgtagtgtaattttctcaacttattcccatcagggcaaaatcccacctcactacaactctttgataaaatttagaatgtatctatattttgtgtgtatatttcctttcatttacataattaattcttaatttgatattattacgaatcatcttgtctatacattgaggagtcaagcattgcgactcaaaaattcataaattacagtttaacttattttaaaaaatttatatgaatgatattcagatattgtaactataatgagtattattattaatatttgtttgaacgatatgtattaaaaaattataataaaagattgacgataacacttttctttatataaacattcaatgatcctaaaaataccaggaatattattaattagagacattttattttctaaaccatcaatcaattgtaagactaatattaggagttgttgtactgtacatgtacccgaagccttttaacaaatcataaccacatttttcttaattaaatgataagaacttaaaacattaattgttcacaaaccaaacaataataattaaattatttgaagcaaaatgccatggttcatagccaatatatatttaattattagggagaatggatgactggtgaaggtttggaaagatctttgtgatcaagttgatgatatgtaacgcatgccattatgagttgcacaaaccaaattggtcaaacattttagaaagatatccatttcgttttcattacttttcttactttttttctacaattaaaaaacaaaatatgtgcggtagaaaatagaaatcataaagacaaaccggcctcgtttgttcccatgacatattatttatatctatattcttattgtacacctattaatactaatttctatcgtcattatcatattatattaaaagattcaaagtactatttaaacttaatgaaattttcattccgaacggaagtttttatttctaattgaaaattggtctaattaaattaaccggaataataatatccaatcaaaagcaaatatgtatgcagacc

SEQ ID NO: 2867 - DNA, 973 bp, Cannabis sativa
tggtacaagtttttggttttgtcttcaataatctattaccaactatattgatccatatttcttaacttattgtgataaagatgataaatagtctggtatcccttgtccaagagtataatatagtttttttgtgtcatcagatctgggatgcgtacaatgtgaaggcacagacctttaagactgcaatagaagcagcctgcatgcttctgagaatagacgatattgtgagtgggattaaaaagaagcaagccaccggagcaggcggagctcccaagcctcagattgaaacagaaggagatgctgatggtgaacaaattcttcctgactgaagatgttgagagtcgaattgacatatcctgctgttgttttgtgtttctaatcctagaatgaaagacaaaaaaaaaagcgtgttggtttaattagctttacatgggttttgtttgtggagccttcattgagccagaattttggtccttccgaatgcgtttgctgttggaatattatatgtaaggtagaatgaacttgagtttttatttttcgtctaaatgaaaattttatattatcatttttccattatgaagtatatctttggaaaatgcaacttgacagtatgactatcgtcttatatgtatctgttagatttatataatttaggagatcgttatttatataatatgtcatttttagtgtttactgtgcttttccttttggcgtgtaaactatttacttaataggatgagcggcagaatctcagtagctgccccaaagcaaggaaagaaaccatgcttaaagctgctattcaagctattctaagctgctaacttgtgctataactatttttcaagttccaatcaatttttgtgatgatcttgagtctattatggctagattttggtggcgatctagcacgactaacctaaaggttcaaaggaaaatgagtatattttcagaaccttctcatttgcttgaacca

SEQ ID NO: 2868 - DNA, 956 bp, Cannabis sativa
aaaagatttagtctgtggaattgtccaaagcttaatgttggattaccatgttatctctacttgtgatcaaatgatggttttgctccccaaactcaagggattacaatgttggaatcgcttctagactggggatcacactcgaaagtaaagatacttgaattagagagattggaattactttttgagaattataagcaatgggatctgcataaactctcttctttagagttcttaagaattagtagttgggtaggtgattcatttcccgatgaggggctccttctgatcgctctaactaggcttcatctcgagtattccaacaacctcgaaacattaaatggcaaggcctttcaacaactcacctcccttacaaacttgcatattaataattgtaaacggctgcaatgctggcctgaagaagggctgccaatttctgtatcttttttatcaatctatgattgtcctttgctaaagcattggtttaagaaaggaggagaagattggccaaagatcaagcacatcaattatgtagagtttgataaactacatgttgaataaactctgcaatgatgtaaagctaaaattgtattccttttttctacttaattggttgaaacatttaataaaaaattgtaacttaaaacagttagtcatatgatcatttcaggtcaaatatgttttgtacttgaaccaaagatatgagagttgattcttcttacttcatgccaggtaatgatagttcttggtatgctaaacacaaaaacctcacttgtttaaggaatcattggtgcattaattgtggaggagtggtgaaattcctcaagtggccgaggcgatcggggtgtgtgaggactaaggaggctttgggttggatcaagcagcggggatgggcgaatgtggtgtaggaaattattggctcagagttaggaaattttttttagattttgttaaacgat

SEQ ID NO: 2869 - DNA, 1156 bp, Cannabis sativa
gaagaccatgatacattgttccctttagatatcttagtacacgttttacagcattacagtgtgttgtggttggagtttggaggaattgacttaatttgttcatggcaaaagacagatcaagccgtgtgtgtgtcaagtattgtagtcctactattatgcttcgatatgttgttggattattgagaggctctccatcagcttttgatagagtttttcctgctgccataggggtagaacatggctttaggtgctgcatattggttttgatgagaagctctttgatgtactttgcctgattcaagtaaattcatgtgttgtcacgatgcacctcaattcccaaaaagaagcttggaggtccacgatcttttaaggcaaagttgttatttaattttacaataaactcattgagttttgcaccattgtttcctgttataataatatcatcaacataaatgaggactaaaatgatgacctgagatgttttgaagaagaacaatgatgagtctgctctggaattctgaaatttccacttgagtaatgttacttttaagctgtcaaaccaagctctaggggcctgtttcaggccatacagagacttggataatttgcacacgatgtctggtttttcttgatcaacaaagacttgtggttgctccatgtacacatcctcctccaattttccatttaaaaatgcatcattaatgtccaactgtctaattttccatgactttgcaacagctatggatagaacaattcgaatcgttgatgcctttaccactggactgaaagtgtctctaaaatcaatccccggtctttgatgaaagccttttgcaaccaatctggccttgagcctttcgacaagttcatcttgaattctcttgacacgatatacccatttattcccaacagtatacatccatggaagtttgggaaccaaaatccatgttttgtttttcttcaaggcaaccatttctacacccattgcattgttccaatccgggtgttgcaaagcttctttaactgttgtaggctcttcatttttaacatgccaaactgattgcccaacataggtctttggtttgaagattcctattttggctcgtgtgatcatggtatgtgttggtgctaagggtgcaatacgatatgtggctggtgg

SEQ ID NO: 2870 - DNA, 1148 bp, Cannabis sativa
taatttacagagaaactttagaagaccacaagcttatgtgcagttatttgcctcttctgagggagtttatcccaagtgctgcagaagaaattgaatcagatttacaatcctacaaagttggaaaaggttgttgattggtagcatatcccctctttcgtttgtttaagattaagataaatggttaagagcgctgaccctaactagaaaaacattttggattgagttcattcatagtccgtgccagtatgatgatttaagttttcctcttgcaaaaggaaagaatttttaagtttcttatgggaggcataccttttgacagcccacttctcagaagtcttgtacatttgccgttcttccattgcttaaaaattttcctgaccatttttgtcaatagttgttgtgttataagcaaatctgtccatgcagtctggacttttgaatttgatatttcgatttcatgttgtctgcttggacttgtaaattcctacttggtctgccttggggcttagggtatagtttaataatcaacttaagtgattatttcaagatgactaaagtaatccatgtattattccattctttatcttactggtatttgtttttgtctatgttaatatattctgtttgttgagtttctctattgtgtttaatggtgcaaatgcagaggactatgtgtatgatttttatactataaacaatgaggtagacatggccactgtagatgctttgcacccctttcctctgtaagtaacttgtttctgtttataaaactaacaaaattatttctttattaacaaaaagtggtgcttatattgatgtaaattatatcttctgttcagggttcaagtagatgaggaggattactgcgatgggcctgatgcttcagaatatggaagcgatgattcaaatggtagctatgataatagcttttctttctccattttatgcattcaaaacgttgtatttacaaattccctctttttgtggttcgcagatgaaaataatccactgaatgattatcctgatgagatatctgatggagaagacgaggatgaagaagtggatagtaaagcctctgataaagaatcaggagaagaaagtgctagtgatgaatcgacagaatctgagcacacagaattgaaggtctt

SEQ ID NO: 2871 - DNA, 2473 bp, Cannabis sativa
gacagaactcaataatcgcttcaatcaaggaaacggacctcggatattcgaactcaacgaatctttgatatacctgcatcaaggagaagactcggtcagtacttacttcactaagctgactgcaatttgggacgaaatcaatcaactccgccccagaatcccttgtacctatgctgcagcaactcaaagacaagctcaaattaatcacgatcaggttcttcaattcctaactggtttaaatgaatctttccattctgttagagctcagattttactctatgatccttggcctcccttgaataaggttttttccatgatcgttcatcaagaacgccaaagaagccttggtaatcgaccaaatttaccagttgctgctgccacaacacaaaaaaccagcactcattctccaaaaattgatcccgatcctgctgcgaatcttgcttccaagaacaagaaaatgcgacccatgtgtacccattgccataaacctgggcatttcaaggacaaatgctatttcttgcatggttttcccccaggatatggcaatagaaaaccccaggaatcttcaacaaaaaaaccagacaacaacaagactctgccacatgcttctcaagtctcagaatcctctactgatttacacccctctcaacttaccaatgaccaatgccaacaattaatctcaatgctggcacaacaaattcagtctactccatcaacttcgaacaacactcctgcttcaaccaacttttctggtaacaaatcagactttccatacaatttctggattatcgatagtggggcaacccaccatgtttgttttgattatagatgttttaactctttccaatcaaaaccacatgctaactgtgtcacccttcccgatggcacttcagttaaaatagcaaaggttggcacggttattatcaattcagaaatcactctcactaatgtcttatatgttccccaatttcggtttaacttgttatcagtaagttcattgttacagcattgttctaccaaattaatattcacatctgattgttgttctattcaggggtcttctcagacattgaggactgggattgctaagaagtttggcaaactctactacattcaacaagagactactgccactaatccttttttttgcaatgtctcttgtaataaaaaccaatggcattcccgccttggtcatccttctgtattgattacaaataaaatcaataaaatgtttcacttgtcaccaaatcattcttcttcttttcattgcaaaatatgtcattatgcaaaacaaaaaaaattgccttttatttcacacaataacattgctgctactatttttgatctcatacatatggacatttggggtccctaccatatcgaatccattgaagggtacaaatattttttgactatagttgatgatcactcacgatatacatggacctattttttgcatgctaaatctgatgcccctgctatcattacaaattttttcagccttgtcactactcaatacaactcacacataaagtcagtccgcacagacaatgccaaggaactctccctgtcaaatttttttgctagcaaaggggtcatccattacaattcatgtgttggtcgtccacaacaaaattctgttgtcgaacgcaaacaccaacacatcctaaatgttgcacgggcccttgctattcagtccaatgtccctctgatatactggagttatatggtacgtactgccatatatttgataaatagaaccccttcgattttacttaaagataaaacttcgtatgaaattcttcaccacaaaccccctatgtatgaccatttgaggaattttgggtgtttggcctatgcttcaaacattgttcactcccataagttctctccaagatcaaaagcatgtgtctttattggctaccctgaacatatgaaggcttatactttacttgacatggctactaataatatttttcattgcagagatgtttttttctatgaaactatatatcctatgctcaacagatctcaccaagatgatatcgacaagttcttttcatcctccatttcccgtccatttatttctgaacagcataccaacacctctgctgaaaccagcaacactgctaacaccagcaataatgctgaaaccagcaacaacacaccaacaggtgattattttcgacctgacagcagcaccaatgctgcgaatgacaacacacaacccctcaacaccagcagtcttcaacaaccagctgatgtgcatcacacgaaatctggcaggccatcacacaagccaaaacatttagaacaatacatgtgtgacttcctacaggtccctgcctcaacatctcaccccctcacaaattcactggcttataccaggttttccaaaaccttcagagctgctatacttgctgcccataaattggttgaacccaaatcctattcccaagcttgtaaatacaaa

SEQ ID NO: 2872 - DNA, 2682 bp, Cannabis sativa
cggagctccatagaattcagtaaaatgccatcttggctcattagcaaaagtaatgtagcagtctaaaatacttatattataatttaaaagtgttacatctacatcatctttccataataatatcaaaccatcacctaaacctattctaaggacttcaagtccattattgaaatgtaaaacatgacaaaaacgagaaataacattaagacctaacttagtttccattaagaaaagtatattcgggaattgctctttgacaagaaatttcaaatgacgaaatgcatttggatttcccagtccacgcacattctagctaatgatttttatggctgatggcgtggctgaaaactagcctgcgctgtattgtcaaaatcactagtagaattcataggtgctgcaaaaacatactggttttgctcatcaactactatcaaagtagaagtgagcaaaggccaagcattccctttgcaaaatctgttctatacctgtcatatccagatgtagggagggctgacccttttatagttggtctatattctagatccagttcctctccattgtcaagtttttctaagaaaaccacacatttattataagaatggccgagtttaccacattccatacaatattctggcagcctctcatatcgaaattcaacccaaatcttatcccttgtttttggataatgtgatcatacgtccccttagtaatggctttgtaacatcgagtttgactcaaatgtgcaagaaaggaccccatccttcatataaagagtcttgaaagacttctataaattcaccaattatattaccaagtgcttcagccaaaaggggttgttttactcatgaatggcaaacggtatacttgaacccagaaaggcaaaaatttaagatttgaagaagtgacattctaacaaacatttggtgtgtaaagcacaatatgatgattttcatcagttactaagagtatttccaataatagcattctttaagagtgtcaaaaatttccacatcatttatttattttatgtctcttccacattatttttggtacttttgttctaaaatgatccaaaaataagtatctctaaaaattattaaaataatattatataattatgtaatttatattaaataaattaattttcttactttatgataatataagaataaaaaaataagaaagagaatatgtaaataatgctatggtatgatattcttttgtgtttttttttattctaacaataagcatcaatttaaaaaaatattaaaaatatatccatatcatcaaatatctttcgtagcatattcattagagatgctttaatgaacaactctttaaaggctcgttctagtatttggtcgtattgtattgtattatattatattgaattgaattatatattatatttttatataatattaagttaaattttaattcatactaaatattatatatttaggtattcataaaaattaataccacacatagttttatataaaaatattgtataaaatacaattgaatataatattatacaatacaatacggtataatacggtgtaccaaacaaacccatgttaattttttactttatttttaattgattggtcgtccacatcttgaaaattggcgattgtttagttgaggaaaataaattaagaacagttgataaatatattgaaacgaatttacgtctgagcatttatcgctgcattgttgcctttgaggttgggttggtctagtttgtaggctgatttagctcttgattaacagtacttgccaatctacttaattatacctatgcagctatgctacagtttgtctgccaaacttctttaatgttggtaaaaagtttcctttgaccataattttaaatttataatttaactcacaagtggctaaattatgatttatgctaaaaaaaaaaagcaagagtggttaatattattttttagtgttatattgttattgatatataattaagtatagacataattaattaattgtaaggtatcacctttaatcgctgaatagcaatgttcttataaattaatggacaaagacaaccgttgtaaattaatgaccatatttgctcattctaaatttgttcaaaggggaatgtactcaaaattttaatagctagtttctgactttgttagtagtgtatatagacagatctacctgtgccagagagaaatggctctttcttctacaacagccggagagagtgccttaaaaaaattaagtttagcacataattcaacttagtcaactatatatacatcatgctggcaattgtaggatcaaatttacacaattcccaccacgaattgatatgcatataatattttagagcatacccagaaacttccgcatatgcaagcaagcaagcaatcataaatttatatatagaataagtttaccaaagagtatcccatattcccatgtgcccatagaattatatagaacttgattaatgcagatataagttaattaaactgagtacaaattagccataatataaagacaaagagtataagatcaatagaagtatgagttctcgaagaaaatatactacaatcacataacgtacatggtttcagttacaagtggcaatgagagaatggagactataaattaaaacgcaaactaattgtagaaaaaattagagttatttgc

SEQ ID NO: 2873 - DNA, 3162 bp, Cannabis sativa
tccgcattatggtatcagagcgagaaagagagactttccctgaacgatcctagctcccttctccgatgaacgtatcgcgatttctttctcttctccggtactctgttcatcgtgtcttcttctccctgttcttaatccatggcgatgtcaggcgaaaatctagctgaaactcagatggaaggtgaagatcaaaccccaagaaccacacgcagtccgtcagcttcaatcggacatggaaatcaagatctccaattcatcaatccaaaaagtccactcgaagatccgaccaacccgtactacctccatcacggtgacaacccaggtaatgttcttgtatctcagcttctcactgggcaagacaattatgtttcttggagtagagccatgcaactctcaatttctgtcaaaaataaattgggttttcttgatggttcaattcccaaacctcctcctgccgattatgttctgtacaatgcctggatcaggaataacaatattgttatatcctggatcttaaactcggtgtctaaggaaatctcatccagtatactgtatgatgagtcggccgccaatatctggactgatcttaaggttcgtttccatcaaagaaacggaccacacatctataatctgaggaagagtttgatgaacctcaaacaagactctctcaccattggtatgtattttaccaaattaaaaactatctgggaggaattggcaaattactgaccgaattgcacgtgcaatggatgcacctgtggaggaattaaaaaactccaagaacatcatcacatggagtatatcatgtctttcttgatgggtttatcggacaaattttctcaagttcgaggaagcattctcttgatggatcctctcccagaagtgaatcgggtctttcatcttgttactcaagaagaaaatcaaaagggtaatcttaccactgaaaatgatcctaataccagccatgcctttgcgttccaaggagacaaaaataagcctgataatcaaggtcaaaaacctcctaattccaagaagggaagacccttttgcactcactgtaacatccatggacacaccatagaaagatgttacaagatccatggatatcctccaggatataacaagacaaataagtccaaagatgctgttaccaatcaggttcaaactgctagtgaaaacagtaccaagaatgaagattctcacaccattctgccacaactaagtgctactcaatatcaacaattgcttaacattcttgctggtcaacatggtaacattcctttgactgatcctagcacttcagccgaaaactctggtatggttttaacatactcttcatctaaattgtttaataactcttggatcatagactcgggtgccactaggcacatttgtaacaacttacaactttttcaaagtattagtaatgctgccatcaccaaactcattttgccaaataatgaaactctccatgttaacaaaagtggtactgtctatgtttccaaagatctgatatttgaaaatgtcttatatgctccaaattttaaatttaacattatgtcagtaagtagcttaactaacaatgattctattgaagttaaattcaatactgacagttgtgtaattcaggaaaaacctcacaagactgtgattggaagaggtaaagaacataatgggttgtatattttggataatacccattcggctactgccatctgcaattctaccatagcagctgagatgtggcactctcgaatgggacatccctctcataagcgtttgattttactttgcaacaatcttaattgtaaacttgataattttcatgaggatatgccttgttttgtttgtcctttagcaaaacaaaaaaaactcccctttccaaaacattttggttttgctaagtgtaagtttgatatgattcattgtgatacttgggggccttaccatattccctcacattctaatcacaaatactttctcactttggttgatgataaaactaggtttacttggacctttttaatgaaacaaagatctgatgttgctcatataatccctgattttttatcttatgtgcacaatcaatttaaatgcaatatcaaatgctttcgatccgataatgcacctgagttagtttttaaagatttatttgctaaatttggtattatacatgaatttacttgtgttgaaactcctgaacaaaatgctatagctgaacggaaacaccaacatcttttaaatgttgctagagctctctattttcaggctaagcttcccattcaattctggagtgactgcataatgaccgctgcgtatctcattaatcgaactcctacacctaatctcaacaacaagtgtccctatgaattgatgtatgataaaataccaaaatatgagaatttaaggaacttcggctgcctggcatttgccagtactctcacagcacatagaaataaattctctcctcgtgctcgaacatgtgttttcatgggatatccccaaggtatcaaaggatacaaattatatgacttaaataacaaagagttttttgtttccaggaatgtcattttccatgaaaggatataccctttccatcgtctcaacaccacttatgatgctacagacccattttccaaattggttttaccctctcaacacatatctgaaacttatgttcatgatttacctactgatatgaacaaaattccttacactaacattactcctcagattgatgttactgaacaggacacgaacatacaaaatgagtctcttttccaagacaacactgctgtacaaaataacacaccagcagacaatactaacactgcagacaatgctgctacagacaacacaaatagatccacttcaaatgaaaatgatcatgttctcagacgcaccagcaggattcctagaccacctacatatttacgtgactatgaatgccactcgattcttcaagacaattcttcaactcctcactgtttttcaaaatttatttcatatgataaattgtctgattctcacaaatcctttatttctctcatcacagctttgtatgaaccagccaactataatcaagcctctcaatacaaagtttggaaccaagccatgaacaatgaattacttgctttgctcaagaataagacctggacctat

SEQ ID NO: 2874 - DNA, 747 bp, Cannabis sativa
ctaccataagtcggagatgtgtttcaggcatatggttgggaaggatttgaaggaaagactaacatgaatgatgcaagtaaaggttgttgataattatgaaaaatatttgggactcccatcttttgcgggtcaaagtaaagagaattatttgagatgatgaagaatagagtctggcaaaaaattaaggggtggaaagtgtccatgtttctcggtggcaagaaatgaggtgctaatcaaaaccatccttcaagcgatgcctacttacactatgagttgcttcaaaattactaagagtactatcaatagcctccatcatatgacagcaaggttttggtggggctaatcagaacatcatatgaaaaatcactggtgtaagtggtcatacctttgcaagccaaaagagaaaggtggtttgggttttagggacctactgttgtttaatcaggcgctcctcgctaagcaaatcttgtggtgtattcggtatcctaacacactttgtactaaagttctcaaggcttgttacttcctaaacaaaggtattttagaggctaaaagtagagcgcgtgcctcttttgtatggcgtagcttgatttggggtaaagagatcatattgagaggatataggtggagaattgatgatgagaatgtagtgtgagtactggaagatccatggctgccccgaccacttacttttaagatatatgataagccattcatttctgaccagatgcatgtgattgatctacg

SEQ ID NO: 2875 - DNA, 2018 bp, Cannabis sativa
aaattaaactagtatagataaagagggcaaggcgtacataaggtttattaacgaatgatcgaaacacgaaagaacaccaagtctataaatgaagaaacagtattgacacatctgcatagtcatatcacattttatggtgaaagcaactctttcctgcaaatccaaaataaagagtgttagtccacataaaacatctctgccatcattcttgatcaatggttttaaaaattctttatttttgagtaaaaagaaaaaaagaatagacaacatttgccaatgaacaggatcaatattacagaaaatctgtatccaaaaatttataaaaatgatactgtgtaggaggaaacctttctccatgaatatatatccttcacatccacataacttattgcattatttattctaatcttaaccatttgtaattaggaaaaccagagtaggtccaaggctatgaaaaagaaaaacaccacttttcacttgagacttattttataaaatgagagcttgcatataaaccagagaaatctttgattatgaatatatttgtgtgtgtgtgtaaacaaagacattatgataacataatctaaccttggctctcaggaagtggaggcctccaagagattctgaatgtctttctgcataaagaaagaaaacacaaagttgggtgtgaacaatgtactatgcttcctcagagtgagtgagagtaaatgagataacttaatctgacctcaattttgagaggagctgtggtaggagcatatctctccacaaccttcccttctttatttaccaaaaactttgtgaagttccatttaattccatctccaaagatgcctcctttctgggctttcaagaatttgtaaaggggagctgcttccttcccattaacctcaacctaatacaatcaactcaaactttttaaaccagaaaggaatgcatgcatacacgaatattttgttatgaacatttacatatttactttaacgtgagtagtggcaaacataatattaagattctctgcataactaattgcataaacagttcagtgaattagtattatgaatacaagttatctcttgcaatatgtcatgatttcagagataaagcagcataacttataaagtttcaaattggttttgacaaaatctttgagaagcttgcttttgcttttctttcctttccatttatcaggattaccttatcaaagattgggaattcagctttgaaccttgtgcatacaacatcttgaatctcctcattatttccaggctcttgtccagcaaattggttgcaaggaaatgccaggatctcgaaacctaccaggaacaatttacatgatcgtgacaaattcaaccgtctcaagtcccagctaaaacttattatcaaaagaaataataaacattggcaatttggcattagagtgagtcttgtacctttgtctttgtacttttcataaagaacattcagctccttgtagtttgactgtgttaaaccactgcaaaataaagataacaaaaaatataaagaatgcgacaaacaaaaatcaagttgaacacacaagtaccatagagaaaaggagttgttgctgttagaaaactattaaagtggtccctctttagaggttccatatataagcaaacagtatgtacttaatttgctctaacattgcttaggtagatcatcatgagaaataaaatccaatacctactgtgagcaaaccgtgagcctaatttaaaccagaatcaagcattacctgatcaaaattacatggattttacttttaatattccttataaattacatggatttcatttttcatcttcagtccaatggttctttaaattaacaaaaatcaaagttgtattgtatcactgttaatctgattttcacatagccattcataaaagaaaaaagttttaaaacttagaattcatcgacactgttaagctaatttaatcttagagtaaagatcattttgccaaaatttgctgtagaagtctttcaaattgcaataaaac

SEQ ID NO: 2876 - DNA, 1292 bp, Cannabis sativa
ttagtgaaactcttaataaccctgacttcattaaaactttgtatgatatacaatcaacagaaaagtgattatcatccaaagaatacaaacatgatcaaacttttaatgctgtgaagttatatactgattctgtttactcttttgatgcagatttttgcaaatcagaggggctgatctaagaatacataagaaattagccgttgcatacttactctagccgtattacttatcttgaactactaactctcaccaaaaaaaacatggagaagaatgataaggtttttcttgagagaaaaactacgttgaagagaaaagcaagaatgcttactgatttgtgcaattctaaagtgtgtttggtaatctatgattccaaaggcaatctagatgtgtggcctgaggactccacgaatgctcattctattatcaacaactactacaccaaattagagtctatgaagagaaagaataatgaagtttgtctctctaatgtgttggagaaaaagttgagaaaacttgaggaaaaagttagttgtactattactactacttctactcttaatggggattcatcactatctttgaattgggatgaaaaattagcggttttgtcaaaaaattctttgatggatatggcacaatgtttgaaggctaagattaaagttttggacgagaagattgacatggttaaaggaaaagaccaagcaattttacaaaccctaatccagaataatcatgatcatcagtttgaagatgattatttcagttctcttccaccattattaacactgccgccccctccgccaatgcctcaaacttatgtaccactcaactatgaagaaattcaagaaatttatgatagatcaaaaattccttttggtcaatgttatgaaatcaataatgatttggtacattcttctaaggtttgtcaatttacatttattaattatttgttaattttattcaaatatcataattaactaacactaattattttgtcagcagttgcattactctgattttggatattataatggagatcatcttcaagcatgtctacagtttccagtcccctccagtgcagctacttacacttccaacaatttttggcagccaagtggaatttaacattctacaatctatcattggttttcagtaatatactgtatattattatttttcattcatacaactacaatgtttggttttcaggtttcccagttaacattgtttgtgatattctgattaaaaaagatgcctataatatatctatacatatgtttgatgttttcaat

SEQ ID NO: 2877 - DNA, 2226 bp, Cannabis sativa
tccttgttccccaaccaccaaaactttcgaaccaaagcatccaattctctacaagtagaaagcggtatccgagaggtggacatagaatagatgggaattgaggcggcaatagacttaatgagaactaatctgcctgaataagagagaaactttgtcttccaaccttccaatctttgcataaggctttctttcaggtttaagtaatcatctttcttccttcttttgaagataaaagggttgcctaaatacctttcttccccactagcttgattgatttcaagacaattgagaatggctgccttcttttggtcatttaaattccttgagaagaatacatttaatttcggtttgctgcaaacttgaccagaccaagcttcataggttgccagacactttaacatttcagaagcctccccttcatttgctcggcaaaataaaatagtgtcatttgcaaacattagatgggaaatcggaggagcatttcttgaaatcttgatcccatgtatcttccccctactctcttctttatggatgatcttcgataggacttcttgacaaaggaggaaagtaaagggggaaagagggtctccttggcggaggcctctttggggaaagaacttctttagcgggcttccattgaggagaacggagtaagagactccacaaatacaactcatgatcaacttacaacacttctcattgaaaccatttgcctcgagcacttttttgatgaacgaccattccattttgtcgtaggctttgcgcatgtctagtttgatagccattaacccccctcttcctgtcttgtgccgaattttatggataatttcttgagtgaggatagacgattcagcaatccacctacccgggatgaaagctgattggactggggataccagatcatccatgatcggtctgaggcgatttgagattatcttggcagcaattttgtaagtgaagttgcacaaactgatagggcggaaattctcaatacgatccggatttgcggttttgggtataaggcatatgtgagtatagtttaactttgaatccaccttcccagagttaaaaatttcttgaatcccagaacacacactgctgccaacttgattccaaaacttttggaaacaaatcccgtacaagccatcgggaccaggtgcctttagcggatgaaagccaaagacagtttgtttaatctcttctatagatggagtactcgaaataagattatttgctgatgcttcaacctttttatcaaagagagaattaaaatcttcggggatatttggagtaccagaagaaaataactccccaaaataattgttgataatcagctgaatatgctttttatcctcccaaacccgtccttggtgatctttcaagttccagatgtggtttctgcgttttcggatcatcgtggaggcatggaaaaatcgagagctcctatctccaagattaagccagatttctcgagatcgttgtcgccattgactttcttgttggccccaggcaaccttaagtgattcatgaacctcagcttcctccttgcatcttgcaacactgatctcttggttctgaagccattttaatctgtgttccaacttccgaattgtctcttcacaatcttccattgtgttcttcttccaatactgtattatccacattgcgaattaacacagaaatcccaggatccgagtgactccagactcgggtaatgacatcttcacaagacttcatctgcgaccaagcttcatagaatctgaaggggaaaaattcctcctccgatacataaatgtatcgagtaaaatgggcgcatgatccgaaacggagatgggaaagttttgaactccagcattgggaaaattgaccacccattcaggagaaccaatggcacggtcgagtctttccctaacgaggctgccattaaatcggttgttgtgccaagtgaaattccctcccttgtatctgaggtcaatacctcccgtcgagtacaagaattcattgagccatctgaaatccgcacctctagcctcggtgcctcccaccttctcaagaggatcattgatacaatttaagtcaccaatcacaacccaaggatcaacacatctctttgtaacttcctctaacttctcccaaaagtcatgtttcaaatggctgtaaggggagccataagctgcaattaaactccaagaggccattgattggtgatcctcaattgaggcatga

SEQ ID NO: 2878 - DNA, 1626 bp, Cannabis sativa
agacttaggtgctctcattataaactcaacttctggagatgagttgtggaaaccaacaacttttactatatcacccaaacggtatctatataatcctctgtaagtagtgacaatcacttcatacatttttcctacttcaacatcagaaatgtcaaccgtttgttcgccaacacaactgatctgattgaaatcaaatggaagaaactcaaagtaggctgctgtaggaagcaacacgaatcgggttgtctctggaggttgtgtaatgtccaagttaatacctacacagcattctgaagcaaaatagtcaccacctaacagaggtgtctctcctgcaaagtgcttaagttttggataatactgtttcatgcttccagtggtaacacacttgacatatcttatatttggccataacttcctcacaattccaccccaattcttttcttgacatattgatctaactttgttggcaagttccacttgaggcccaccaagaacctcaataactgaatctctcatagcaacatcagaaatttctgaactcaagaacccattttcaagatcatcacatagttgcatccacttggattccaagagtgaaaatgcccggatcaagcctatggcatagggagcacgaataccatcaataaggtcagagttcctaagtccacaaagaatatgacaatacatttggtgctcaacattggatccaagaatgatttctatagtactagaacttgaggcaaaatgagcccaataggcagccttactactattattccgaaaagcaaaagcagaagcagccatcaccttaaaaccaagtttggtagttgtgacattatcagcataaataaagccaataaatttattgactgagggtctcggaggaaacaatctggtaacaagtttcatatcgatcaacccataatttgattaactaatacccaaatgcatataacattaaataatcaaaggtcactcaaacacataccttctaagaattacagcgctgccctgatgagccacatacgaggccgattttgaaagatgtgaatcatagtaaggaatcaacttgggtttcatcgagctagtgccagagcttcatgacccaacaatatttaatttcatacaaacttatctccataacaacaaaagagaagttgaaagaaaaattacctataaaagaagcagattagaggatcaacggacagaagaggttgaccacgatcatgatcgtgagggccatcagcgagccgattgatgtcgtccgagtaatcctcataagttgacaacggtacgacgcggcgaaaggtatcaacgtcgaaaggcgcatcgtagccttgcaggaggcgctggagataacgtacgccaccctggtgttcgagtatggagtggagtgtttcaagctggtggcgcatggcatccttagtggagtcctcaagctttttcaggagtttctcgtcatctgccatctccctctaaccgagctataagtgtgcgcaggatattactgtgcgcttaccgttcagtttagcagcggccgtcgtgactagggaggttgttggtaaagccagcaaagtttgattaaatcaactttgaaacaaaagagtcaacgccaattttcccgcg

SEQ ID NO: 2879 - DNA, 1687 bp, Cannabis sativa
aaaaaaaaaaaaaaaaaaaaagcttagttcggctctcacagtcaatcgtcaacatcgcgtggtccatttactttcattcatttgtctttattacaccattaaaacacacgccacgtcatcaccaagcctctatctctgactgactatctcctgtctatatatatgtatatataaatattttttttaataaataataaaaaattactattcatatacgtaagaagctacaaaattcaactcttatcgatttcgttttgaactttcgtcaaacaacttccttgcgtataaatatactcatctaccatgtttgattccatctttgactcgcctccgttctcgcccggattctgctcctccttgttcttccatcttccgagggactttttgtgcatgggttaattgttttttctgctctctcagcaagttttttcgtttgggatgggaatggaggagtcaactgaggtggcgtcgtctatggatgtgaagaaggaaaagcccgttggtttgagggcgttagaagctttgggaaaagggtttgatcttagtagtgatttcaggttaaaattcgcgaaagggttgactggaaatggtagtggaaggttggtgttgctcgatgaggctaacaaaagggatgttttgatacctggtagtggtggagggctcacgattcccggtgtttcggaggatattcgctgtgataagggagatcgaattcggttcaaatcggatattctcgagttcaatcatgtaagagttttatctttactctctgtgaatttctctgtggttaacttgattatgctaaatttgagctggattggaattcttatgaatgaaagtgactgatttgagtctaaagaaagaagactcatactatgattgtatgaagctcaaaatcataaattttatgcttatgttagaaccttaagattttatgatattttaatatttgagacaattggaagaattgagtggaaaggaagacccgtgtctcctgtcctcgggtacatcttaaatggatataaaatcttttctatttatatttttattttaacattgctctgcccttactggttcctataacacataaagaacatttttcaatgagaattatttgaaaaatcacagttaatttactataaattagatttggacttcagattataccaaaaggaataaaggctagagtttagcagacatgaaactattatttgtaaacttgtatgaattggattggtgctgagtgaatttacgaatttttcctgtgcatattcagttaatgggattataataaataaatatatgtatgtgtatatatgattttgtttctctgcagatgtctgagttacttaatcagagatcttcagttcaaggaaaagtcccttcaggctatcttaatgctatatttgaattaagtggagattggtatcatgatgttgcagacaccaagagtcttgcttttgatggctacttcatctcattgtacaacttgcatcttacagcttctccattagttctgcaagatgaagtaaaaaaatctgttccacctcgttgggatcctgctgcattgtctaggtattttttactatttttcttggtccttcagacaatgacaaccattttgttacactcataacataattaataagtcaatctttttgaagttggaaggttcaattggctcttc

SEQ ID NO: 2880 - DNA, 1514 bp, Cannabis sativa
tatttgatcaaatttagagcttcattgataccaatctcatgacactatataatatttttctttttttttttacaatttatgttcaatcactttttctactttaaatatagcagtagagactttttatattttaccaaccatcaaattaaaattaaaatgactaaaaaaaagataaaatcaacatagccatacgaaaataagaaatacaatcaacatagccacgcgaagctaagagatgagcaacacgattcttgaatcgttttacaaatatcaaatttaaactaaaatgattatctttgtgtggtgtagtagtaggaatgtctttactggtttaggttaagagtttgaatttcaccatagcccattataggtgaaattatgtttgacattttgggaggctagcttattgtggcagtatcattcttagtagaatgtgaacctttgaagtgcatactgataatccaattaaaaaataaagatgtctaatattcttatagttagcacatggtccttttaatattatctaaactactaaaagagtgagaaagaaatttgtacacctaattttttttttttccattaaaaaaaattaaatgactattagataaaagacaaaagctaattatttttatttaaatatataatataaaaaaattaaaaaaaatgataccacatgtaaatttttttttggtggttagatccgactccgaaatttaccgggtcggatccaacaataccaactcccgcaatttgccgccttaaaacacaagaagacggtagagtgattttccaatattaccctcactgaaattcaatattacccaaaaagtcccttatcaataatatattttatgtaaataaatatataaataatactttttcagagctgactgtaaatttctgaagaagaagaagaagaagaagaagaaagcttcagaaatggcaaatcttcattaaccccttaaagttccaactctgttattcatctccccaccaatgtcgcaagctgttcacctcgtctccaagtgtttcccaggtaagtttcttccctctgtttggttctcgagaaactgtgggacaaaatctttttttggaagcttgggtttttatggtgtatagtttgtgattgaatgtcacgctttttagattccatttgggaaaaaaatttaggtttgagagttttggataacatcatctcccatattgtgtcagtgttgaatttcatatttttgatttagtaaatttacgtgtgttgcctaccatttgttcgatggaatgtttttgggtattgtgtgtaatttttgatgtttttgttgaagtttagccttgcccaccaggtgtttgttaaattgtttatagcaaaatttcgtgtgcaaagggtttagattccattttggaagatttaggttaatgtatttgagggttttggataacaacatcttcctataaagtcatatatagtgtcagggttgaattttaaccttttttagttttgctttttatttgaaaatatt

SEQ ID NO: 2881 - DNA, 1562 bp, Cannabis sativa
aattgttaatttatataacaaaagctcgtcaacgaagacagccggataatttatacgttggaaattttacgatcagtaaataaaaaacacccatcaaagaaaattaatcaaaacccaagaaaatctcagtgaaagagagaaatatcaaagatttgttaatatatgaggttggaagaaagtttgggatatggtctgggagataaagcttgactttttttctttaaaataaaaaaataatatatatatttttatctctgtttgcattattattaattattattattatcaacaagtaggacttattaaatatgaatgcatttgattttgaaggcttcaaagtcggaggacaaaaacagagaccggcgcacgatagcatagaatgttacacgtggcacggcagtgtgcggaaggtgttataggggtgtgtggtctaattctatatcctctaaaggttggtctgtcttaaatttttggttggttggttggttggttttgttagttggttataaagcctcaattttttttccctttattattattaaaaagaaaacaaaaacagagaatttggtctcccattactgttaatggacatcactaacaacaaggtttctgtatggttttaattaattaagaaaatagttaaactcgggcggctgcttgattctgaatcatgtgatgatggctatagaatcatatggtttctttattaataatattataacttagggaatcctaagttgcataatgaattaatattattaattagcttaatttcaatgccttatgaacttacccataaatacgatcaaatcatgaatcagcatgttatgaactcatcttattttccattcaaaaaaaaaaaatccattaattacggaagagaataattgacattcattcacacattaatatctaatatatagtctgtctcttccatatcatagaaagattaaaaaaaatgtggacaccaaaattgacacgtacgatgtaaacacgagtactaaatttaattcatagatgccttattgctagtttatgggcggcgcattttagtagaaaaggttcactgatctttataaaatcgtgcaatgtaaggcagttgtgaaaaataataaataaaagcatggtagtgataatttaatcaattaaaaaagcaaaagaaagattgtaatgaagtggagatgatgttacttggtttttggaactttaagaaaaaaaagcggaaaccgcgtctttgaatagttcatccacgtacgtgtgaggtacacgtggatcccttacttttaagattttgaggtacatttgtctgcctagtaccgaaattttctgcgctaaatttcatttcatttttgctttttgagctcactaatcgttgtgaactccggtgactaggattaggataactattttatcaaagctaagtatagataagaggaaggttaattaccaccccttattacaacttctgagtcatttttttttttttttttatctatacaagaaaatcaaattcactgtaaagcaagaaaccattctctatcattactcttaatcttcttagg

SEQ ID NO: 2882 - DNA, 921 bp, Cannabis sativa
gagagagagagagagaggaatttttgaggattttggagtgggtgtagggagatcaggaagtgcaaaaggaggtgaacggggtatggatttttgagagtgaaaagaaagaaaatgaaggagcattgatgaatcccattgtatttttttatacatacgatattattaagcggattattctgctggtaataataacgttccgccgataataaattaatgaaaaaaattttgaagacaaatgagcgggaaacttcctacatttttgctatcaagcagacccccccgctgctaatagtacatgggtttgctactaatacaattttatatatataaaaaataaattacatttaatagtagttgtctgtgagtattaattctattagtagcagtgaatttgctccactggtaataactaaaattcttgttgtgaattgtgaaacaaacttaaactattatagaaacatgattaaatttgagagagaaattttgaaataatgaatttctttctagaaaaatgttatttttttagagaaaaccaaaatatttatgaataggcaatttatttgttatataaaaatataatttataaagtgtaaaagtgcgaattttttgcatagaaattcaagaccaagtttttataaaagtgacacgtggacttacatcccttgaggattgctgagctgtcaagaagggactcctcaagaataaatctcgcatgaaccaaactcgcgagatgatgtgatcgggcggacttaggggtattgagggaggcctaaagcccaccctgagatttgaaaatatattaatatacaattgttgctttcatatatgcataatagttaaatagaacaattagttaagatgctttaaatttatatgagagatcatgttttgaatccctttgctcctttttttttttttttt

SEQ ID NO: 2883 - DNA, 785 bp, Cannabis sativa
cataatatttacatgaatggatctttttttattgcctattccatacataattggtagtattgttaatatcatggaaaagcagcttacaaatggaatttgatcgatttatattttataaccgagcatgtaaatgtgtaagaaatggtatggagtagttggaatttggaaaagatttataagagaaaaacttgaaaataaataaataaataaaaggtacaaatttttaatttaggtagtgcaatgggccaataggtggctttttaattgtttttctcgtgaaaatgtgttgggtttgctgctatgaaatgctatgctttccgttaaagtctattatattataacgttctcaagctaatccactttaccaaatctctcctttggaccatcactccctaaaaccattcattcaatacatttatattttatagtaaagtattgctataaaatacctaactatttagtattatgataaaatgtcgctttataattagttaaaaaatttttataatatttattgaaataaaataaataaaatttaatatttaattaccatagcaatattacaattgctaacactatagtccccttactatcttctttactttttttccaagtttggttttccaaatattccctttaccgttaattgactctagacatggcaagttttggttggacaagccaagttggtgggtcatatactactcatcaactcatgcatttccatacttttattttagagaaatacgtaccaaaatgtattatcagtgtttgacaaaaaaaaa

SEQ ID NO: 2884 - DNA, 1474 bp, Cannabis sativa
ttttttcgattgtaaaagcttaagtcaccaataaaagtgacttttagtagctaacttatgcttagctaccattatttaccacgtaaaaaatctgaaaaaatttaacatgtaagtctatgtaaaaagttaaagtccgaatttttccaggggtatgcaaaatgaaaaatttgaaaaaataaaaacatgttcaatgtaaattaatacattgaacatgttttaatttgttcatggaagattgttcaacatagtgaacaaaccttcctgtcaaaggctgagcctcaatagatcgcagtatgataactactctactaagtacagcaccctggcaggctcttgggtcgtctacggatcattttatactcaggcagaccaacataaattcgttttgaatttatggtcggaatagccggtttgatgttattatcaacccaaacctgaatgctttctctccattaaagggtatggtaaatattggttacaccaacatagttttacctatggccacactgagtacttaacggtatcgttaccgtataatgacgggattctgacttagaggcgttcagtcataatccctcggacgatagcgtcgtgccattgctcggtcgagcaggcacatgtaccatttgtccgaacctgcggttcctctcgtactgagcaggatttcttttgcaacgacaagtcatcagtagggtaaaactaacctgtctcacgacggtctaaacccagctcacgttccctattagtgggtgaacaatccaacgcttggcgaactctgcttcgcaatgataggaagagccgacatcgaaggatcaaaaagcgacgtcgctatgaacgcttggccgccacaagccagttatccctgtggtaacttttctgacacctcttgattgaaactctcaataatcaaaaggatcgataggccccgctttcgcggtccgtattcgtactgaaaatctggatcaagccagcttttgcccttttgctctacgcgaggtttctgtcctcactgagctggccttaggacacctgcgttaccttttgacagatgtaccgccccagtcaaactccccgcctgacaatgtccacggtgaggatcatgcagattgtagtatgcaccagaaacaagtttctttacggtacacccacgttacctttcaaactcaagtctaagtctcatcaagtcccgaagaacaagacaagtcatagggtcttgagcattgatgaaagtacccacactttgctctagaatttaaggataggaggccttcccgaaccctgaggtaaacccaagtgagagagacactatcccaacttccctttaaccgtgtaagtaaagaaactatgagagtagtggtatttcactgtagccaaggggtcttaactgccaccgaagtaacagccaagattgatcccttggctcccacttatgctacacctctcatgtctcttcacaaagtcagactagagtcaa

SEQ ID NO: 2885 - DNA, 1631 bp, Cannabis sativa
attaacctcatcaagaattagtttatgacaaaacaagcaaaatttcagtactgctactccatggctacaacaatgccagactgatttattatgagattggtttttattttatccaggcaccccttttcatcattattatcatttttcatcatcattgatttcttctgcctcactgacactacaagctattgtgctgatgctgttgtccttaccaagctgatttcaatatacttccatttcagctactcagaaatgaccccaaattaattgctgaatctttattgttgtctccacttgatagtacagaattgggagtccaccttacaatccttattagcctcgactgcattaaaattttgattagatcaaggataaacattgggaaagtcattatcagtgataataatattgagcaaagtacaagccacctggagaattggcagaaaatgtgttttatgttatttatgctaataatgtcttaagtcattgttatccagagagttggtatttgattattgcacctggatttgaatacatagctgaggtgcatatctcttaaaatttataagaacactatattatttatatgatcccttccgataagaaaatgtaataatatcaacaaattgaaccaacaaacaaattgctgccaacgttatattactatattataacagaagaacactgttatcatccaacccaaaacaatccccctatccattctgttaatattatacattatacactaaccttgttttgttttgaaatatggatatttatcctatataacaaaccaaaagagtgaagaaaaagataaaggtcattatctaatcctgatttgtattgtggaaacaaatttggaaagtttaaatatcatacatagactaaaattttaagggtgatatggtgaatgaaaaattgacaattaaattaaaaacctctctacaaaaatatcatacatatcatcctccttatgtacaaacaatagattaaaggaccatttatatggcctatgaagtaacacactaaaagtaaaaaataataaaaaaaatccaagtcaaatatccttttctatagtttgtcagattacaagatttgatcgatcacctgaggcaaacccttaacgagttttctcaaagaagagaaggcacgccttatgtcatctctaacacggtgatgcatctcgtgatgtctgaaactgtctaccttgaacatcattgtattctaacaaatacgaatgtttattcgaggttgatatgaatttatgaaaccgttgtactctttgatcatcagatgaagatttgcttcccgatgatttagtccccttcctcttcgatcggtaaaagaaatcttctgtgtccagtacgtaggaaatctgccacatttcatgcatcatcagactaggaaatgaaagaaacatcaagttaggggaactgatcgtttatcttattatgacggtttggtgactcgaaaagaatgaaggcctaaaataacaagcaacttaccttggatgaattgcaagctatcttacactccaaaccattgactactttaacaccttccatagcttgggcaatcgccgaagactcatctaaaactgtatatttacgcttgtttctgcaataattaaa

SEQ ID NO: 2886 - DNA, 2192 bp, Cannabis sativa
aagagagattcctctgattttattctaatctcaagaaaagctaccaagactagaggctaactcagtaatgagagaaaggtgcaaaaaaggagagcgcatgagttcgaactcaatacccctaacttattagtaaataagtgatactactatgctacactcaaaaaaaatctcactgactgcagcatgcagctaatgtataaaaagcaccaagtaatatgctagttctaactagctttctttaagctctcaagtctctcgtcaacatgactattttatgttctaggtagatggtggaatttcccaatgcttcggcaggggacctaaatcatagatgatttctctgtggcatgaccatacaagctttattgcttctggggtcccgatccctgcacccctaggatctccggctggtccaaacctgtcatagatcattgttttgaaatagttaaacacctagctcaattccctatgtagagatgaggaaggaaagtaaaatatactgaccagtgattttgaggagctccagttgttctacctcttagtccagcataagttgtcccatttactgttttaccgataacctcctgcaatttgacattttacaaagtaaataaatcgatcctgagataaaagtggattattctgatatcatacaagatttctgttgaacaacccaacactctaggtggcaccatttcaactatgaatcttgtgtaaaatggctaattcaactttgttttgttattcatttgttcgtttcgttcttgggaacaaggatattgggttgttgtagcacaagtggaagatttggttaatgggattaatgggagcagtctttgaggtctgatgtttcggcctaccgtgataatgtgaaattgcaaaaattgcatgcttggatattgcagaatgaatgaacataaatagaaaataaatttatgcatagctttatgagagaaagaaatccttgcctgcagaaagtgagcatcatttgaaacaacagcggccgtcaagtgtgcatgcatcttttcaagaatgtccaataccagagggagttgttctttcttatagtcggtaattatctaaaggcaaatgtatcaatgtctatcagtaacaaatctctctcatattataagctactgaatcatatgacagcctatgagtctatgactattccagtcatcattttctataagaaagatcttttaaaccttaaacatgttgtgttctttacctggaatggtccaaatatttcttttgtcacaaggtcataattgttgtccttcacaatttcttcaacgggaacatagacagctgttggtttaatagcaccataaatttggggaatggaatgattctctaaaggttcacccccaaagagtagctttgaacctggtatctgaagcaattgattaatgtgttccagaattgctccagttgttacctgcaacacacataagagagacaaggtcgatgtcaatgggaggtgtttggttgacacacaaaacagcattactggtcacatcaaagagctcattaaggcaatctgaaaaatggtcattggctaaaataggaaacataaagtttagatgggtagcaaaataacaacataagtaaagcatacataccgtaaggacaggaccaacagttaaatcttctaacttccttctatcagcaagatcttgtattttggttataagtgaagttttggcccagttctgcatataagaaaacagagagatcaagaatagtgactggtgggataacgtcaaaagtcttggtgccaaattttattgaaaactatagatgcataggacatgattagaagcattatctttagagttgttaaagcatatcttcgaacccttattttagaacagaaacaatcacaaaaatataccaagtgtcaaattgaagtaacaaacctcgtgcataaataaaattgattgtgcagagcacttctgaccactgcatgcgtatgcatcctggtcacatacccaggcgacataatcctcctatactcaggtaccaacaataaagaggagtgaatattaaccttattactatagcagcatgttttaaggtagtaaagtgatagtagaatacctcttgcacatcaggacccaagattttccagtcaaatcctgcatcttctaacttgacacgacccttcaaatcagcagctaatttatccg

SEQ ID NO: 2887 - DNA, 2761 bp, Cannabis sativa
tcttggcggggctgaacaccagaacccgccccaaaatcgttttttccatcactattttcttgaacttccaacaagtcttctacaatgtccataggcccaatattacccagcccattactattcagcccactatccattcccatattaactctttttcttttattttcaagaataaataattccccatcagtatctatatctctatccacatcaccctcatcaacattctttccctgattagaacccgaacccccattcatagccatattttcctccacaatattacccatatcacctctaatcaatcttccatctaatccctttaagtttaggaatttgagaattaattacccgatttccagcgatcccaattgactgtcctccggcatctcccaccgtagcttctgcttcaggccgccggctagagctccctcctttcgcctgcaaaccttgcttgagccaccttgcaccgatggtatgctgccttcttcgagcaaccgccttcagttctaagttatacggtttcgagatcagatgcaaaggggtgtcaaagagtttcggacaaaacttctccgaatggccgagtatcccacagatgaagcaaaaggtgggtagatcttcgtatttgaaattacagtaacaaatttccccccctctctgttccagtttcattttccttttcagcggtatatccacccgaacagccactctcactcgaagatagtctctccaaatgcccatgaaattgttcttgtcagcctccacaaaggttcccacataattgcctatgtccttgaccacttttgcagacataaaaccggtcgtcataccatgtagttgaatccagaaatcgattgtgttcagtacaacacttctaggtgcttctccaatcttcagtcttttaaaaaccaagggtgctctgtcgaaagtccaaggactgccttctgtgactctatcgatatcgacatcatggtagaattgaaataggtataaattctgatctaactccttcacatataagcccctacccggtctccacaatgacgccattttgtgttgcatagccatgaaatcaagcgccctatccgttaaaaatctacccaccaaacaccacctatcgtcaaagtccgaaagctctgtttcctcagcttcatatcgcaatcccccatcgtcctcatctccttccaagataatctcaaaacgtctgccattctcgacatccatgttatcctgatccgccatcaatcaaaagaactaacagtctcacagatacaataaccaacagcaaaagacaaataacataccctgattcaaaagaaaccagacacaggtcaatagaccagacagttatatatcaaagaatcatatgtgcaaaaatatttattttcttctaaacaaaaaataaagttttccgacattgtgcaaaattataaacgttattcttgttaattaataatattaatataggtactgtacgaataatatagtgttatgttatcatgcgcaataaaatgattcttattcataaaaaaaaaatataaatatataatgattaatttgcttttatattagggaaaaaatattgtgatattaattataaattaatatatattatttatgaacatgtatattgatcaactaaactagtttaatatttattatttgtttttttcttcttgtcaaaatattaactttcaaattacattattattatatataaattagcttcgccactaatatatatatgaagtcttcaattaacaaaaataaatgaaatattagaaaattagcttggccacttattttaccttctgttccaggaaacctttttccttaatcaaaagaggagagaagaactcaaaagaactaaaagtactaaaacccattgaatctaatacctattaaatctaaaactcatcagaagaatggagagaagaaaattggtgtgagagcttggagccaacctctagtacgtgcctcgcaaagcctaggtgaaatcgttgctttgtcgaacaccaagttgaagtctagtgccattgccatccaaaaagagaaaagctaaagaaattaagttatgaagaattgagagagaaaaatacattagcagagaaaaaagagaacaaaggtggggtggcggcagatttggggttgatttattagggtttttatttaacgataataatgataaataacttgtaaaaatactcataaatattattagcgatgggatcattataagtcaagtctatcaccaagtacgtcattggagtggggagctatgtttatagggccttttgtatttcgtttgtaattttcttcacacatgcagagctaaaaccatattattgaaattttcttgaaaattcattaagccttctacgatgtgattggtgatttatatatgaaagaatcttttcaccagcataggagtccagttatactcttttgccctatcaagattatataataataaaacgatgtttattcatacttccttgtgtatgcttcgatgttctctgtgtgttgcctgtttgttgcctctgttgggcatttgcctatgtgttgacttatgaattgtgtgagattgattcatagaatgacttatgttgtgcttgctcatattttgtggttgcactcaacatatgcgagacatgtataaccattgaggtgttttgcatgtaggcccgtttaagctgacttgctagctcagtgtgccagcaagtgtcgcacgtcccgtctacttgggagtgtctaaatagtc

SEQ ID NO: 2888 - DNA, 614 bp, Cannabis sativa
ggcacaagaattatcgacaaggagccgagtttccatggtctctgagccattgagggcaattacaattgagaagcttgctgtactacaatatcagtagaagaaagattagatgtgaggttaactattagttgattgaactcattctgcttattagttaatgcttttaattactagtacttgtttaataacaagatcataatgctgtagtgatgttagttttatttatttatttattttgcaatatttctaataggaaaaaaaaataataaaagagagaagttttattgctatcctattatgaattcccaacgtttattttctcgataattttattgcataaaacttatgagcaaaacctctgaactatgatctgttaaaacaagtagtaaaactagaaaaccatttttttttccaaaaaaaaaaagatacatatataagtactatgtgtatgaattacaaatataattgcagtatgatgatctatttaataatatttagatatctaaaatttaatttattggcattaaatatacaaacagtagctctaaaaactcatatagatattctcataatttattaatagactgttattatgtatttattttttatttgaa

SEQ ID NO: 2889 - DNA, 3198 bp, Cannabis sativa
aaaaataatatataggataattccttttgtttttttcataataattaaaaaggtatataatcacagtaaatgttaattgtgtttttaagtactacttttaattaacccttcttttaaacaaaaaataacctaatttgttaaaaagttggggatgcaattaaaaagggtatataccaagaagatgcggttttggtggtcaatgagtcaacatcaagttcacgtctacacaatgcttcccaccatatatctaatactctctcttcaagagattcttgatcgtgtatttccatacacagaattcacattagatataatattgctccaacattctaacaccaacaacatctctgattatgatttatatatatagatatatatatatatatatcaatgtcgtaattacatatgcacatatatacgggggtagtggcaataatatgtagtcaacatattactcattacacttccaatcattacgtatatatatttctatgtaagaatattttgattgcactttcgagttttgaaaccattacagtacctcatattcaaccacataataatatgtgatatcttttggatagtgttccatctctctcaagacgatcgaataatactatttgacaaatcatgatcatatataggtaatgttcatcttatgtgctactacatggatgtctaataatattagtagtttttcaggtcaccaagagtcatataaatatttatagaaaatactattttggactctgtattttgtaaaaattattaattagattttttgttttattaaatgacaaaataaactttatattttccaaaatggtaaaaatagaactctaatctcaattttcaaaaaatttactttttaatataactaactttaaacaatttctaacacgaacagatacagaaaatgtaaccaattttgtcataatatctatagctcagattattattaaattttattttgacaaaaaatcagttcatggtcctatttgtacaatataaaaaatacaaagtcaattttgtcatctaacaaaatagatggtccaattaataatttttgcaaaacacagaatcgaaaatagttataattgtagccgtaccttccagtatcaactaagcctgttaagtaccaactcagaatcacaaagcaacatattattggatcatttattaaataaaaaaaaacttttacgttttcctctaattttttatttattttattaataaaaaattggtatcgttttttattattaaatttgtatatttttgattaaaaataagataaataacagttatttaatatattgtccaataatatgtcactatgtgttttttagttggtacttacaattaagactccaacaaaattataagttaaagtagtatttttactgctacttttttattaagatcaaatgcctaacaactacaaatgttaaggaaatttcaccgtcaatattctgtattaatttaatttataattaaaattaaaatacataacgcttttcttgcatattacaaagtcatcaataagtgaattcatactaaaaattttgacgatttctctttcaacatacactagcaatagcaattaatcatttaaaaatttattccatcttgttgcagagtgtagtattcactatatttatagttaaaaaagataactttgtgccagcgatagaaacgaaggatataatttgtggtgtgtaatttgcggtgtttatattacacttagtaactactaagccttaaccccataatagaattcactacaacaagattgggcattaggggcgacacttgtcgcctctaattgcgcctaatagctaagaggcaacaagttgctcctaaaaagtcgtctctaatatttagtgcctaaaagtattattaggagcgacaaaagtaatcgcccctaataatacttttaggggcgataataaaattcattatcagaatctaacttttatttttaggggcgagttttgtcacccctaaaagtatttgtctgttttagattttgatttttaggggcaacaatgttgtccctaatgtaataaatgttaaaaaaaaaataaaaaatttataatatcataaatattaatataattttttataaataacaattacaatggtatatactaaaatatagacatcaactattacaactaattaataattaaaatatgattaattgtcattaatgacattaattaataataaaaatggagtaaaactaaatatacatctatataaccaatttttttttatttcttcaaaagaagtttttcaatctcttaatttcgttttgcaatctgcataattcaaatgcttttacaagtcaatcaacaaatctcactaaatcataagcaccctctctctaaatcatttcttgtttaagatatccatgcatcattataacctaaaacaatgcattcaaaaataataaaataaaataagaatggcatagtaaatattataatcgtacattataaatagaattgattcatataatgattagtaaagttaaaaaatttcatcattttcaataatcaatgtcatcgtaaataatttttatggttacgaacaaaagtaagagaaccattgagattaaagaaaattcatcatcaataatcaatatcatgatatctgaataaaataaatcaccaatatcatcatatcagtaaacaacaaaaacaactacatcacaaaactcgaaaaagaaaaaacaaatattagtgtatgagagctttactactcattcacaacatattcttattttttggttaacatacataatacaaaataattattctacaaataaaaaagtgaaaaaataactaaaatactttaataatcttaaggcttttaacaataatcctttctgaaaaaaaatacaaactaatggctccaaataatttgactatgtcagatgacacttttagagtcgataaatgtcgtccctaaagttataagcgggaaaaatcccaccaaaatacaataggcacttttcaaattattaaatgtcgcctttaatacctttaggggcgaatattgccctaaaagtattagaggcgacttttgtcgtcgatccctaattgcttacaaattttaaaaaaaaaaagaaaagaaaaaaaaaaactcatattccttaaggagcgacacaatgttgtctccgctaataaccctatt

SEQ ID NO: 2890 - DNA, 2762 bp, Cannabis sativa
aaaataatgaaaagacaataatgtcctcgtcctcgtcctcagtctcactcttttgccagcacagaaagacatctgatctgccaaaactccattgaaaagctttctctctctacaaaaactcccactttctctctctagaatggtggcgagttcatatcccacaatttaactctgcaacctctctttctctttcattctttcttatttagtaatcttaagcttaaacccattttcaatttcactcaaagtttcaatctttaacttgttaagatgccgggattagtatcgatcaaacccccaccggacgcgccgccgttacggatctcagtctccgaatccaataataccacccaaagatccgaacccggaatacccaaaaccccatctccattacccaagaggcttccatctccatcaccttcagcttcccgatccaaaccctcaccggaccggagactgaagaagccccaaccggacagtccaaaccagatcttgtcagaaacctcgcttgataatccggatctcggcccgtttctactgaaattagctagagacacgatcgcttcaggagaaggacccattaaagctctggattacgctgttagggcttcgaaatcgtttgagagatgcgctgtcgatggtgagcctagtttggatttggttatgagtcttcacgttcttgctgctatttactgtagcttggggaggtttgaagaagctgtaccggttttggagagggcgattcaggtgcctgaggtttcgagaggtgcagatcacgcgcttgctgctttctctgggcatatgcagttgggtgatacttactcaatgttgggacaagtggatcgttccatttcgtgctatgaggaaggattgaagatccagatcgaatcattgggtgatactgatcccagagttggggaaacttcaaggtttgattttttttgttgttaatttttagtatatttcgattcatatctgaagtgggtttctcatttttcgagtaaaaattggacctttttttatacgtgtagtgtaattacagcatgaaattttgtgaaatcttatataccataataacagctattaagaaaaattgattctttataattattattattataaaaatggctctgaatcataatcattagtgtacttgagtttagttgatttcctggaatgaaattatgatcatttttccattatattttacattcatgctaatgcaatctgaataaggtagtttctaagatgagttgttagttgcattaattcatatcccagaaaaaagctgtcccagttgaccatttctatattagtctaaggtgagatttctctggtgaatttcaaaaagtatgcactttttgtgaaaatacatttttccttaaatgaaaaagataaaataaacgaagtcaaagagtttatgtgtagcaaatttggaaagggaattaagtattgtccttttgaagctcttcaaaagatggtttaaatgcaataatctgtttaaatttagtacttgagattagtgcttgaatcttaaataatagctttcttaaaaagaagaagaataaagttgagttggtatatgaaatttcaggtatttggctgaggctcatgttcaagcaatgcagtttgatagagcagaagaattgtgtaagaaaactcttgaaattcaccgagttcatagtgaaccggcatctcttgaagaggcagctgatcgtaggttaatggcccttgtatgtgaagcaaagggggattatgaagcagcccttgagcatcttgttcttgcaagcatggcaatgattgctaatggacaagatactgaagttgcagctattgatgtaagcataggcaacatttacatgtcgctatgtcggtttgatgaggctatcttctcctaccaaaaagcgcttactgttttcaagtcatcaaagggtgacagccatccttcggttgcttctgtctttgttcgtcttgctgacctataccatcgaacaggaaagcttagagagtccaaatcttactgtgaaaatgctctgaggatatattcaaaacctgtgcctggaactacagcagaagagattgctggtgggctgaccgaaatctcagctatatatgagtctgttgatgaacctgaagaagcactgaagctgttgcaaaaggcgatgaagttgttggaggacaagccgggacagcaaagcacaattgctggaatagaggcgcgaatgggagtgatgttttatatgattgggagatatgaagattcaaggaactctttcgaaagtgctgtagtgaaacttagagctagtggagaaagaaaatctgctttctttggggttgtgttgaaccagatgggattggcttgtgttcagctgtttaagatagatgaagccgccgagttgtttgaagaagcaagggggatactagaacaagaatgtggctcatgtcatcaagataccattggagtatacagcaatcttgcagcaacctatgatgcaatggggaggtaagaacagaacagaacaaaacaaaactaactctcatataatgtcacttaaatttctaaaatgccaaatgaatttagtaaaatatgtctattcttggaagtcattcaacttttcttattgtttaatttgtctgaatcattgttcagatataaacttttgggtaagtctatagtatacccctcttaaatggacgtttctgtacacccttttacctgttgaaaaggaaattggatttttttaataccgaaacagatagga

SEQ ID NO: 2891 - DNA, 773 bp, Cannabis sativa
ttgttattaaaaattttccttttgacatgggaataattattgagacatgatattacaccttttattcatttgtttccttttacttttgtaagattagttgtgagtgtccttttatgaaacatattaaagttccaaacttggttttacaggtggatgcaaaaagggctttgtcaagagaagaacaaacctcctcaaaaagtggaaacttttcttccagtagaagctctggagggggaggaaactttaagaccaaaaaaatatttgttggagggctgccttcaacactcacagaagatggatttcggcaattttttgaaacttttggccatgtaacagatgtagtaataatgtacgatcaaaatactcaacgacctcgtggttttggttttataacatttgatactgaagacgcagttgatagagtactttttaagaacttccatgagataaatggaaaacaagtagaggtgaaacgagccctccctaaagatgcaaacccaggtggaggcggtcgtggtggaggctaccaaggttattctggtggtgccacaaatacatttgacagtagaatggatggcaatagatatatgcaacctcaaaccgctggaggtggttttcctccattttcagggtatggtggttatggttacggagcagccaacggtgcagttggttatgggggatacggggcgtatggtgttggcggttatggaggttctgctactggatttggtggccctgccgggtcctatggaaacccaaatgcccctaat

SEQ ID NO: 2892 - DNA, 1015 bp, Cannabis sativa
atacatagggacttttttcccgaaatcgtctgaaattagcctcctttccgactgacattcatcttcatcatgtcctatcagtccacatttgtaacacagcatcaggaggttctcatacttgaaataacaccatatgtccaccccctcctccgtctggaggaactgccctactgaaaaaggtttattcagctgaaccaacaccctgaatcggataaactccttggtggggaagccgttgcgccacaaacggtcaataagcttgacttcacctagccttccagccatttttgacacattttccttagtccagaaacggacagggacttcatacactcgcacccataacggaacagcttgaaggttcgccgaggaccagtccccatcagccggcattggcttcgcaaataaaaaaccatcacaaatcttccaggagccctgtctcaccacatactcaacttcctgtcgaagcatgaaccgcataatgaaggtctgtcgagccacctccgtaagctgccaccctcgcttaagatgccatttttgagtaaggatcgaacgtaacaaaccattaaaaattatctttttggatataacacgaaccaccacagacctctccaccaggtctttccccaactccgccgatggcacgagcgaaatggtcatatccctcatgctcaggctaatgtcgttcacatcccccttggacccagactccacctctttacctttatccgccataagaccagcacacagggaacaatcaaagaaagagcaatggacagtagagaaaacgaagaacaaacgagagaataccacgatacagggtttaataaaaccctagatcactcgaaggaggatcaaaacaacgagaaaggaacagtacggattagggtatcctacactctacggagagcaaatttgaaaattgtttagggtttttaaagaatattgttaactaatcctaaagcgcgacctataaaaggtgttgggaaccactgatacctactagtgatattct

SEQ ID NO: 2893 - DNA, 1312 bp, Cannabis sativa
gtatatcaaaacaatgattgtttagttgttttcttaggttgctcatgagttgaatgctgctgtcatttacaggtatgatctagaacaggctgatcttgcagtagctagtttcaatgaactttcagtgatcaacctaaggagattatttgccaataagggggccactttcatggaccttcaaaaacaaatagttgagaaatctccacctaaaaggaagctgactattgatacccttttctgattctttttctttagtatctctctctctctctctctctaccccttgtaatcctagttgttgatcttcatttttattctcttttccttaattatttatagttaattcttcaattttagctgtatgcgtttaccaaattagatgtatacaattcttattgtcagtgattgaaagaagtaaaaaaaggttaaagtattacaagttacaactactaattatattattataaaagttctcaaataagttcaccttgtcttcttttactaaaaaaaaaaaacagttggcgtcgcccggactcgaaccggagaccttcagtgtgttagactgacgtgataaccaactacaccacgacaccttttggttctttaatttgtaattaccattaaaaccttattaaaacaacacatcatagttgcattcactaaaattaggtaatttactgaaaaaagaagatgagtgcgtgagtgaattagttatactttgtgatagggaaatgctaattacaactccatattacaatctcttagttaatttctaccttcaaaatcatatgttgaaatattttttaaatttttttttcatagcggtattcgttatagttatagtatcattcttgtaaatttttgaaaaattccaaatagtttacagtactgaaagtagagttcttgatattccagtttaccacacgcgtttaaaaaacttcaaatgtattttcggtactgtaaattatttgaaatttttcaaaaatttacagggatgatgttgtaagcaaaacgaacacttttgtgaaaaaaaaaattgaaaaaaaaatattccaatatgtgtttttgaacataaaaattgactaaagaacgtaacagaaagttgacggtaaccattctcgttgtgatatggtcaagtcaatctaatggaatgaaaacaaaatattatttttaattgtacaaaaaagtgggcctagtgtggcatacattgtgctgaggtggcgaaaatcagtgggtttggtgaaatccagaaacgagatttgcattcatttttcttatcttttttattatcatcgtttttttgttttgtttt

SEQ ID NO: 2894 - DNA, 1933 bp, Cannabis sativa
attaataataaaatcaccaaaaaagacaagaaaaattaaatttgaatatggccaaatggtctgtgttacaccaaatgcattctatttttagctttttgtgcatatcttggtacatataaactatatgttataatctaaatttcaataatcggataaatactatgttataaaaaaaatatcgatataatatttttgtaaaatgttaaaagaaaatgttcaagtactacatagatattataaccacttgagttaaggctagcttaagtggccataaaagagagcgtttgtattcttagattcgagttttatattatacatagttgtaatatataaacgctaatccttacgtgattttgtacactgtctttaagcctttttcttcataatatgttaacgtggtgaactaccattcaatatatatgtctaccaaaccaacttatatattttctcatatgaaaataacttgtcctttctactcattctttctttggtgtgtgtccacgtgaagcttatgacaaataacaactcataaatgctcactttctcttgtccttttttttttccttaccgtctttgcctgaaaacagagtccaccaaccaacaccttatatataaatatatattcatatcattatctgaatttatggtactaatttttattattattgttttttatttaaaccccatatcaataattttactcagaaaaagacaaaaacttaagctaaaagaaagatcaactccttttgctaatagtatgagtatgcacggtaatcattatagtgttatttataagtaagtgattcatgttattggagggtcatcatgagtgtaattaatataatataatgagctgagctcacaattatatattaatggaccaaccacttatatttatattcatcattaggaaatattaaagggagggattataataagacaagacaatcagaacttaaatccaaattaattaaactagtgtagtgggtaaagggtccatatctagaccataatagattatattgcatttgtgggggtaaagcaaaaccatatagttcaatttcaattcaatataaagattcacatgtctttgtctgaattataagttttagaatccttatcccaccaaagaacaaaagacaaaatacacaaaacttttactgctttttatttctattatttggctacaaaaaggccacaattttaaatatttttcataatgttaaagttgtggctcttaataagtaattcttctctactcaatttatatttatatattgtaattactacaaatatttttcttatgcttccttacaattaataggagaattagctgttgttacataatttttgagtaattgagtgtagtgtgtgtaagattgataattgtatcaacataattattacatgcacaacttttgttatttgatcatgaattataattgcattggaagagaatattccaattatatcaacagtgaataagagaagctatgtttgaagtaataataccatcattaatattttgtggtagatatagattctcatcatacacatatgggaccacctaagcaatagtagtatattattatcacccccaacatatgtctatatacattttttgtagtaattatcatcaaacatttcttatatcatacttgactttatatacatggcttttgatttaaagaatctttatttttgtatatgcatttttttcatgcaactttttttataggcacaacaaaagataatggttgacttgacaacactaatattatatgtactttttgttcttggaccattttgcttttctacacttcaaaagaacccttctcttattgcagaaaatatcatgaaaatgaatgatatataatttgcactgaatccactaataccaagcttaaattttgtacactattcataaaattaa

SEQ ID NO: 2895 - DNA, 996 bp, Cannabis sativa
cctggagatgcataaactctctataacttagtttgttttatctattgtttatttttttaaattgtaggagcatcgtctatatgtggaggtggttgaagcaatgtgtgaagaccgaatagtgtggcggcaagatggtgtccctctcatacagagcaaagagaatccaaatgaatacagatagtaaaacgccgcatcctgtcctatatttaatggcataaatgcttgagattttgaattcatgtgctgtagaggaaaagtacacatacagtcatgccggcagtgccatcttcttcattctttcccgcagcatcggtttgtggtttacttgtggagaatggagtttatggtagtttcactaattccatcgtggtactaatttttcatgagagttcaagatgatgaccaatatctagttgacaaagtttcctaaattattgtacttgtttttgccaaaaataaaagggaccattagttttatttattatattttatatatcattatattagattagattttcattttataatttatcatatgtcgtctatggataatgaaaaaggacgacaatcactttctccagtattttggtcaattttcaatggttatttaatttttaggtgatacttttaattgttgaaaataaagaggagtgttaattaaatttcatactttactctttgaatgtaaattttatacaattattttattacattataacttattaataaaatacacgttctacacgagctagagcaacatgccttgtgggagttttgtgagcagcagaggcatggattggttccggtggctgctgctacagctggtagaggtttggcaaggtggtgtcctccgcatgtgggtgagtttactctttccacagatgcttcagtgattacggggaggggggtttttggggctgggaggcatgattcaaaatggtgctggtgtggtttggccttgctgggctctctgcggtttgggtttgctatttccgt

SEQ ID NO: 2896 - DNA, 1078 bp, Cannabis sativa
gcttttatatttcgtgttaggcgtattaatctattttttaactcgtgtctaattttttaaatctaaatttgactcgtaaaaaatcgtgttgtgttcgtgttgactcactttaatccattttactattattgaaactgtagttgcagagaaaaatgataaatttagtttcgttagaaattgtatatacatctatgttgtatatatagtttgttatataataaaaattaatttttttaaaatattttaatttcattttaaagaaattaaatttaaatttttttaacttaacattaaatcactaagtatatttttttacataattatattattattaatattttttcttttattttaaaaaaaattgtattaaacgtgtcaattcgtgttaagcaagttgtgttgtgtgtgtttgactcttttttattttgtgtccagtagtattgatttgattttgatccgcgtctaatttttctgatccttcgtgttcgtgttgaaacttgttttgccactcctagttagatgtatgttgcaacttgaaatataccactcttatacggcctaccaaatgagtcatttgatttttgttgtaggctttgtctgtttatgttttttcatatgaaatttgcgaattaattgtgttttgctcatttgttcagaaaataatatatgtacactatttaggaaatttgtatagtagactttctaaatggtcgttctggtagttccttacctgttttgacatctatgagagttttatagtttaatttttttttttttaatgaatgcatatgttgtagttattaagtctatttgtaaatttttaataagttatgaatagtttacagtaccgaaaataaaatttaaacagttatttactacgcatataagaaacatcttcgcgagtgcaacaaaatgtataaatcttattttcggtattgtaaactactcaaaaaattttataaattcacaaatggtgctaaataactataataatatatataaaaaaattagactaaataattattttgtatgacgaaatagatagaaggtttgtcaaaatattttatttgggtaaata

SEQ ID NO: 2897 - DNA, 1103 bp, Cannabis sativa
atggttggatagcatcaaagtgttgatttgttggaaattgttaccatgttgcatgatatgtatggcacaacttccctcaagtgcaagatgtctcaatgaacctaagatatgtgttgatgcaacaaaattgtaaagtttggagcatttttcttcaagtgcaagatatctcagtgaacctgggacttctttgaatgatttggatattatatattgatgttgatctaatgctgaactttaaattatctactagatgtatgataggttgactacattgagtgatttttagtttgcttttaccctcccaaagcactcttattatgggtcggataatttttatattgtctttatattttaatgattagttcttagtgaatgagtttagttgttttgcttttaaatgagatgcgaatatatgtactagatgtatggtaggctgactacataatgattgtttttgcttttaaaagggatgtgaatatatctactagatgtatggtaggttgactacagtatgtggttgtgtttctcatagctagtaattgtgttctttctccatacatggttggaattgaattgcatcaaatgtgtttatgttttgaaattgtgaccatgttacatggtagattcaagatctgagagtcttcattcaagtgcgagaaagatgtgtttgttcatacttgaagttccagttgatagttttgttagttcagagatgcctttgattgggtcctgtttacttgtacatttaatagaattgttaacttagggtccattgtatgggagttccttttgcgcttgtgtatgaatatgtggttgtacctacaccaccttgtcgtgaaattatgcatgggctctcttgacacattcatacacaagcattgatgaaattgcacagattttagttgtgctctcttgagtttgttgttttgcttctctacaacattgaaggttacccgcgcccttaatttagttgccgatctaatcgtatttacaagagatagatgtctaggaatttagtacatatattatgctgtagatacgttttttaatgtcaagtccattaggggttcttttgttgttggaaatgtttagctcactgatat

SEQ ID NO: 2898 - DNA, 1446 bp, Cannabis sativa
atatatattaaaatatagaatataatgaaagaaataggaaagtttatgaatggtatataaaaatttattgtaaaagaaataaaaatagaattttggtaatataatttaaatagtagagaagagatgctacctaaatgcatgacaatgtaaaaaatcttgatattctaatatatttttatttatcaattatatacaaattaaatatgataaaagtctaatataaaattaaatattatgagataatttcaatattaaaatattaggtatttattagtaaatattaaaattttaatattaattaggagagttttatttgcacccaaaatgattttatttattaatgtttattttatatagaaactatatctttaatttatattattttctcttattttttttcttcttatattcttaatatatataaaataaataaatatattttaaatattaaggaaaaaaatttaaaataaaaattatataaattttattaaataaataaaaataaatctaaatatttttaaaaaaacatgaaaattaaattaaaataataattgaatttagtacaaaataatgtggagagaaataagagtaattctttaaaattaatctaagttaatttttaaaaatactgaggtatacataataattttaatgggagtataaatataactctcttagggttcatttggtacatcatgatatattagtatatagtatagtattgtgttgaattgtattatattagtattatttaatacaatactaagtttgatattgacttgtactaataggttgtgtaaaattataaattctttacaataaacttgaccccaaccccaaccacgacttagactcggacttggacctagaccccgaacctagaacatgtcccggaccaagatcctaaacccagaccggaaactcagacagaaacccgatgtctggggtttgggtgccagtttatgtctgggtcgaggtcctatattcgggtcgctattctagtctggagtctgggacgcagtccgatttcggggtccagagtctagttttggggtctaagtccaggtctgggttcggggtttagggtcctgggtttggatccgagtttagggtccatggtccgagtctgcgtttgagttcatatctgggtctgggtttgaggtcagggtccggagtccgagtccgggttcatggtcagggtatgggtccgggagctccaaaatgagtatttggattttgcaaattttgtttccaagtcaccatcctttagtattctgaaccaacaagtaaagaagagtccaagtctgaagcctcaaaacaaagaaacgacgaatcgacatcccgaaagctagcctgggtgcctaaggtttctcccacactactaaaaaaaggactttaatctcgatttttagggcattttaatcctatttttgctaaaataagaac

SEQ ID NO: 2899 - DNA, 1807 bp, Cannabis sativa
agagggtccccttgtctcaaacccctctttggcaacaattttttcaacggaaccccattcaataggaccgaataagagactgtactcacacaggacatcagaagccgagtacttttttcattgaaaccatttgctttcaagaccttttcaagaaaaccccactccattctatcataagccttgtgcatgtctaatttgatcgccatcagacctccaatgccctttttacgctgaattttatgaatcaattcttgtgtgaggatggaagattctgcaatccatcttcctcttataaaggccgactgaaacggggcaattaagtcttccatgagagggctcaaacgattggacaatatctttgcaatgattttgtaagaaaaattgcaaaggcttatcggccggaactgatccatactcattggaaactccaccttgggaataaggcaaataaaggtattattgattctaggatcaatagtaccaaactgaaaagcttctttaactgtggcacaaagacaagcgcccactatatcccaatactttctgaagaaacaccccgagaaaccatcaggccccggggctttcaaaggatgaagattaaacaccacgcccttgatttcttcgtcagttgggatcttgactatgtcttcattcacttggcagggaactcgcttcattactaagttttcaagactaaattcttcaggggaaagggaagaagagaaaagatcgaaaaaatgagtatttacgacccttgcaatgttgcttctgtctttccaaattcttccttccttatcccgaattgcccaaatattatttctccttcttctcaccacagtagcagtgtgaaaatatctagtatttcgatcacccaaagcaagccaagtttccctcgatctttgtttccacatgctctcttgtttagcccaagagaccgacagctgggaatgaagtctcgcctcctcttctttaaaagtatcagaaattggttgagtttggatccattcaattcttttctccagtttcttaatatccgcttcatcgaccccttgtaactgtttcttccaaatttgtagagcccttctggtgttactaacatttttgatcagtgatgaagtggcgttaacaccagaagtacaccatgccttctctatttccgccttacaagtagtctcccaagtccatgcttcaaagaaacggaatggtatataaccttttgccgcaaaaagatgagtgtccaaaatgataggggcatgatccgagaacacgataggcaagttaataactcctgcattatcatattcagttaaccaattcgctgaacatactgctcgatccaaccgctctctgatcaaacctcccgagaatcttttgttttgccacgtaaacttatttccaatgaatctaagatccacgccacccgtattgtcaagaaagttactcagccactttgtatcatttgtggtgactttacagcctcccaatttctcctcctggttaaaaatgcagttcagatccccaattagcacccaaggaaaatcacaagctaccacctcttcttctagactgctccagaaagattctttgacactactataaggagttccatatacagcatacaatttccaaaaaagttgagtgtggaagtcccaaaccgtagcctcaaagaaaccatctaaggcataattaattaccagattaatacttcgattccacatcaaacacgacccacccgccaaaccattcgcactaaaacacactatctcagtaaatcccaaacttcgagccaaatcttccattcttcttt

SEQ ID NO: 2900 - DNA, 2648 bp, Cannabis sativa
ccactgagaccaccaaatggaggtcggggtgcaccaccttaagaaaatctcatagagttcgagggtgtggtaccccaagatgaccaaaatgcagtttcatgggtttgtgacgaattgtttcttgtctaatatttggggtcttacatatatacactttcatgtattatttttgcttcacaaagtaaaattttggatgtgtaattatcgtttttggcttctttcatttagctatatggatggttgtcccttcgttatgcatgtatcctttcttttttttcttgtactagtaggtgagtccatcatggatagcatactagcatcactcggcgcactaaccaccctgctcctccttttttgcaaatgccttagggtgattactggggaggtgaccatggaatagacaaagatcttattcaacttttgtttaaagattgttccaagttgcttccgcataagtcatttggggacaagaattctagtaccaagtctcagacactcatccatctctatcgggagacgataggcggcgaagcgtacactaggtgcatctgggagctgagaagagcgatacgctcttatttaccccatgagtggacatacattcatccttcaagtgaggttaccattttggtggggttacccgttgaaccatctagagagtaaacttttgctatgactactgtgactattgctcgatcatcaaacatgttgcccaccatgactcagaccaagaaaagtgctcgaggaggatccagctgatagttttggcctggttactctcaaagcaaaagaatttgctctgagagtcctcaaagaagctcctaaccgtccttgtacaatgactggctcctcctagtagcatcaataatactcaattccgacacttggaagaagtgattatgaatggcaaggactttcatttggtgccgaccaattagcacacaatctcagagaggggttgtgcgtttggtctcatcatcacatcttttatgggggagcgctccctcttcataattttttcaaagacgtggctgattattttcgcattactcttaggaaattctctctgatggccatgcagattcttacaacaatttttgtcctgtacaacttgatgagatggaaatgtcctacaggccacaaaatataataccttttcaatttgatgccaaaccatactcatcaacggtcagactactatggcttccaacatgcatacagaggtattaagtttttgaaaggtgtagatagggtgtcgaaggaaggtgactgtcgaaggaaggtgacttcaagatcctttatttccttataaaagacattcggtccaaatacactagtttcgaacaagtggaataatttgttagacccttgcctactgtgtccatgtatgagagagctttagcaatagctcaattgcctagctttaagaaggatattgcaatcttgacctctagttgtgccattggacgatgttgggttcaactttgttaccattccttccaccagaataagggaaaataaggaaaagttgcatccttcagaattcgaggaggaaaatatagatgttgtagggacggatactgtgtctaggcctccaaagaaaaggcctattaaggggagcgactcactcggtgattattgtcattcaactttattatcatattgctttgttaattcacatgccattaatcttttactaactgtcttttgtgtgttttgtagatatgagcaacgtgttgagacatgcgacttatttaaataagggggggctcttctttgtctacatgtcccagtgctcaccctaacaagttcaggagaataggatcttttttgagctcagatacacgggctgccagtgtgactgtgcccacttctttccaatcgcatctatttggaaaggcaacttctaatactttgatcaccactgttactctagacttggatgcggcttctactgctgaagactcagttgcagtattgccgttggtgggtcaatttttggccctatcctttggttttttcatgaactgtgacatgttcaagaccttattggcaagtggaaccagaccatgccaagacttgatgatgtttctcctaccaaggtaacagttgttgggtgtcggaaaatgaagaaagtaagtttccttatatccattgtatgtttggcttgtacttttttatacttctactaacttagataccatgatttgtggtaggcaatgatgattgcatactatggtcaatccataatcaacacttatgaagaggggcaagacaagcaaattgtgtctactctttagctcgatctaaacattctccaacaaagtacttccttggagattcaggagttaaaagactctgtcaaacgcctccagagtgagcttaatactaagaaatatgcccgcgcccaagagctacgatctcacaacaccgggactaagaaattgaaagacgacttacaagtaaagaccattgaatatgacgctttgtccgaagacatagcccaaggttacaatttttctaatgacatcttcttcaacttctggctacataataagaaggctgacttcaattacttgagtgattctataaaggctatgctaacctactatcatgaccgtgaagagaaagaagcacgccaaagggag

SEQ ID NO: 2901 - DNA, 1155 bp, Cannabis sativa
taaaatggaagagatcagccttagcagtgatggaatcggccggtacaggttagtcggcggcggcggtgggagccagccgactgaacatcaaatcgagaagaagcttaaatcgtcctcatccttgtcccttaggatccagcaagtgtcggaggagcttaacagacttaaatccatgaaaagttcaggcgcagcccgcgcgcgcccagtcatgagtgggctcaaattcattaccaagaagaaccatgggaaagaaggctgggctggggtcgaaaaacgattcgatacatatgccaaggatggactccttgatagatccaactttggcaaatgcattggtacataatacatatttttggaaaattcttagttagactgtaccaatattttctattttggggcactcaaatactaatttagtttttttcagattaaagcttattatattaagtactacttaaataatttatatttgccggaaatgatattcatattgcatatatgtaacatgcatatttttttttatcatttataacttaggaataaataaatcttcatttttccttaaaaaaagtcttcattttcaaccctattttttttaaataaatcacactaaatataacatttatccaacaattagtcatatataaatattataactataatatacaacaattataactaacctttttatgtacctcaactaaaaaatacacaactatattgcagcaaaagtaaccatctccctaactaataagaatattcccatttgtagttgatttttaattccaagttaaatttcggttttgattatttttttttttctgttggaataaggaaaaggaatgtttatgtaaacatttttgcaaaaaaaaaaaaaaaaaaaactttacaggaatggatgatgagaaacagaagaattcgagtaagtacgcgatggatttgttcgatgcagtggctgccaggagacatatcacacgattgtctataaacaaagctgaactatatgaattttgggagcaaatcacagatgaaaatttcgattctaggctgcaaactttctttgatatgtaagatttattataatgttttaatttagatacttatttcaaatcgtttctttaaaccaaatataattgctaaagggctttcaaatat

SEQ ID NO: 2902 - DNA, 2249 bp, Cannabis sativa
tcaaattaatttgatcattaatcagataggcaaacttagagattttgagggagggctaaagcttactttgaaatttaaaaatatattaatacacaatttttattttcatatatatagtagttaaatagaataattaattaagatggtttaaatttacatggaagaccatgttttgaatctattgtccattttttctatgtgtatttactttttgtttattagaaacaacaaatgaagtacaaggttcaaattagattcaaatttatgaccactataatatgaagatgttgctaaaccatcgtcccacttaaatttagatagttatttattgttttaaattatattaaatatataactaagcccaccttaaaattcaatcttggatccgccactttaatcatattatccaaatgctaaacggagatgatctaaattaacattagacaacaccacaaatgaaaaacattgatattttgctaaatgagtaataatatgtgcacaaatattactcaaatagtattctttagataattatacatatcgggtttagatgagatctacaacttaaaataattatgtcactagattatcatttgctaaagaaatataagaaaaatctcatgtcaaaatattacttttatctctattctctttcaacattaaggaaaattataactcacatatatatatgaatagttaccctaattcttgtttcatgatcatgtttacatatagtctctcctaaccataagaagaacacatacaatgactttgttccctctctctttacaattttcacaacatgcatgtaaataagatgtatatacatatacatatacatatagtgctcatatcaatcaacatattaaactagtgaagattttgaatatcttaagaagttatacaaacatttattgcgaagaaatatataaacttataaatattatacaaaataaaatagaaatcacacctttattttgagtttcatgagcactgaaaaagtgatcatatcatatctatatatatatatatatgcctaaagtagtattaattaaagatgtctaaagtagacattcttaagtgttgcagagacagtaaaaagcagaacaaagagtccaacaacagtggaactaccagtccaaagatccttaaagtaaacctttttcagtgttgcccttgtaacattccatctattctcataaaaagtattcagatcattataaaaacaagcatagtaagacttctcccttggaatctgattacaaagactgttgatcaacttagctgcttccttgttactcccaagcaagtttgtcaaaatcttcttatcaacaagaaaatcaacatcttcacctgtgtttatgagctgatccattagagcaacataaccacaaatgtaatctttatcagggtaaagacattgctccaaagccataacatttctaagcagagactctgtatcattctcaatcttcaactcaggaagctttaacctcataccctttatagctggtatgaatttcagaacaaccttcttcttagagatcttcacatcagttaggcatatttttttccgagcaggctcgaaagtcacaccggctttatcaagcttagtggcagagtaaagatacttcctttctgttatgctctctgatttcatcttttttctacttataaacttcctatctattgtgctttctgatgaactttgacttatgaactttcttggaagccaaaactctctaagcaaatcagtaaagtgtttgatttccttgatgtctttaggcttaacccttttgcaagtttcagtcaaataatgttcttcaaagaaataaagagtgagtttcaaaagggtatcatcttcttgatcatgatcatcatcatcatcctcatcagctgatttcttatggcttgatttttcttcaacttggtaacaatcaatcaaagaccccttatgatgattatgatgatgaggatcagaagaagaagaagagttcaaacaaacagagttgggaattttgacaggactaagaagatgtttttcaacagcttcataaacttttctaagaacaaaaaaaggaagctgattctcaagcaaaatcaaatcaagcttaacagctttcctcaaccatggagttctcaagatacaatccctcttaccctcttgctccttatcaacattcctcaagaaaagctcaagaataaagcaacaatctctaagaataatttcatcaaacagattggagtca

SEQ ID NO: 2903 - DNA, 1808 bp, Cannabis sativa
ctaaaagaaataatttattctctcttcaagaaaacaagtactcgtctttatatacttaaaaaatgacgacacctatatacatcacgtaaaataaattttgtagtcaaaatctttcaattcagttaatatatattcaccatttaaaattgatatatagtttgaaaaggaattgagaataatcacttttacaaaacaatagtaagagcacttgctataattaactaaaaggcatatgcatgttattatatatagctttaattatatcaagagaaaaaggtgatctagctagctagctatagctatatatagatgaagaattatagtactttaagttgcataataatgaagactattgttgtttttttattcattttttatttatgaagcgatcaagaagatcttgaattcagtgaatgtgatgatgtcgatcatgaagagaataaaattcttcatcaaaaaagaattttcacatttgaataatcacgatgagatggaaagatgattaattttgagtctctaatttataataagtctagttctattgctgcattcatgttctagctatatataatgtagcacaaactgtactaattttaaatttagccttaattagattattgtacttataagctagctagcttataattgtgagacattggtttatgtataattgtatatatgctgtttttgattgcttaaataaggttgtaggaaaattatatgactaaatgtgtagaaccaaatcaattaaactttaaacaataataatcgacaagaggagcaaacaaaatattaaaactataaaacattaaatgcagaaataaaaaaaacaaccaacatatatattggttcaactccgatagattaatattatggctctactccgattccgaacaatgtttaaaattgtgtttttgaggcgcgcctcattgcacgcacctcagaataaaggagagaggcagccgcgcctcatatggctgaggcactttgaaattttgtgaggcgtaaaattcagtgaggggtaggcctcaattagaaaacaagaatttttcttagcctatttttattcagcaattaaaaaagaaaagccaataatattttaacctaattaaaagaaggcccaataaaatacaataaaactcaataaaatttaaataaaaaacttaagaaaaaaatccaactaaactaaacatacacaattttagaaataaatgctctttgttttatgagatattttatggtatttttggtatttataagatattatttatttttgttatttttagttactgtaaaaatattattttaattaataattgaggtttatttaaatccacaattttaaatattagttctggaacaccatcgtaatccttctttattgattgagcaagaataagtacaatacagccgagacgagactttttgttgactccacaaagtgtttcaactttcacactttacacccaagaatattcatctccatctcttttctctgcacctctctctacctctcaatgttttctctctcaaactcttaatctcttctctaaagtgtgtcacctaaaataactagacaaggtggtatttataggcttaaaatcaagatcctaaagtcgatcgttacaagaaatgaggttgttaagttagttaaaaataactaactgttgttaagttagttaaaaataactaacttaactaactcctctttaagcgaagtctccccgtcagcttaagtacgagggcctccgagaacatgaacaagcttctagactcgtgaaccaagggtactcgctgaagacactttc

SEQ ID NO: 2904 - DNA, 1051 bp, Cannabis sativa
caagtggggataacaagcacaaccaaaaactctaagaaaggtataatcgggtggagaggcaaacaagcactgaaaaggacttttcccacttaaaacaggtgtaggcattcggttgagaagataagtggccgtgagaaaggcttcccaccaaaaatgtaatggcatggaagcttgggctaagagggttagaccactttcaacaatatgccgatgtttacgctcaattctaccattttgttggtgaatatgaggacaaggtttacgatgaagaatgccttgagaggacaaataggtggaaaaaggtctatactcaccaccccaatcactctgaaaaagtttgatagggtgaccaaagtatttttccacttgtgttttaaacttttcaaacacagagatggtttcagatttggttcttaaagggaatatccaagtatatctagtaaagtcatcaagaaaggtgacataatatctgtaaccagcagtggaagtaattggggatggtccccataagtcagagtgaattagatgtaaagaatgagtagttttggttgttgctaatttaaaaggttgaacatgacttttgccataggcacaagaggcaccgaattcagctttattagatgcagaaagtttagtacaaccaggtaaaatagaggctaactgagacacaatcttattactagggtgacccaaccgttggtgccacttacaaaatgtagtacgaacagtagaatgacattgatgactagctgaattacaactgaacagtctagacttagtggaatgaggaatagaagaagtattgttgaagctagacacaagagaatagagcccatccttaagctgtccttccagaaggagttgacatgttgtctcatccttaataagacaattattggcatgaaattcaacaaaaacatcattatcggcagtgagcttagaaatactgattaaactctttttgatattaggaacacaaagaacattgtgaagattaacagttttaagatgagaagaagtaggaaaagaagttgaaccagtatgagtaata

SEQ ID NO: 2905 - DNA, 1582 bp, Cannabis sativa
aacatcattcataccttgagtcatggtctgcatagatcttttgactttgaagatcctaggggcatttttctgatgaaaacgatcctgcaattcggtccaaatgcaagctgcatcctccatatacatgatactatcagcgatcgtaggtgaaacggaatgcagaatccaagaaatcaccaaaccattgcatcgactccaggcatcgtaatcatcgtcctcctcatcaggagctggcaactttccattaatgaatttgactttgtttctcgccagaagagcaaccatcattgatcttctccatgaactataattttcagctcccgtgagaatctttggtactaaagtagctgatggattatctgcattagagagaaaatatggacttcgaggatcagtattaggaggtaatctttcttcttgatcgagagcggagaaacgattttcatgatcaatagttccttgagttcaagtgcttcctccccttgccatgggagaacagagtaacaaaaaacgatcgagaagaagaagatgaagcggaagaatctagaaaacgaagagctcacgaatcgtgtggctctgatactataacagaaaatgaactagagaatagagtgaaatgaatgaattctcattagctcaataatgaggagcttaacagtgtttatatacacgagaaagaacaaaaacaaggaaagaacagagaagaaaaatacaatagaattctaacaactttggacagctcactaactaactctaataacatacacaacaccttagacaatctttaatagatctcatccattgagtatgtttgccgatcataacactacaatatagaagtcaatataaaattttatatatactaatttttttatgattcaaaagttaaattttattataaaaatatgatagcttaagcacttacatgcttctgaagataatctcttaaaccattcgacatagttaggtctctcattagtcgcatgatgtaaaaactacagattttgtcgttaggttgtttaggatcttgaaaatatgtatatatatgtcgtaattcttaaaaacaaaaataactcaaatagagaaagttttcaagttcaatttaagtactcatacttgaactgtataccaagttacgacatacaattcagagaatctctaagattcttttctaatagtatgatggtacaactggtatctcgtgccttggtattgcttcattctccaacaaacttgcagagccataaagaccaaattacccctatgcattttatcctgtaacaccgaacacatgagcaaagtagtttggttgtctagataaggacacatagttttctttattgtttaagagctcagttacctaagccatacactaacaacaaaacacagtaaaacttactctttagccagtaaaatgatacaaatctatactatgacaaatgatatcctaagaaccaaagtaatactttccacatttatttacaaacgctttataaagctagagcggttatcagtttctgaataaaagcttacatgactggtaaatatttagtaataaatccagtgtttgattaaaatcatt

SEQ ID NO: 2906 - DNA, 2197 bp, Cannabis sativa
ttttttttttttttttgtaaagggatacttttttattggttaatgttgaactaagactaataaagtaatttataatctatcaatttaaagatttatatatagctcaattatgcaatagtctagggtttgttgagggtcaaattggtgtacaaaaataaacataataatagagtgtcattgctttacatgcatcctatgattcataatatgaaacaaaagaaaaatgacaagtatatcaaacgttttgcttcaaatgagttggtgtgactttgatgggtctttaaaaagttttatgattatccaaaacattttggatttatgaaaatcttcaaataattatccattttataaatatatgattacttcttacacaatgatatgcaattttacaatacgaatactttcaaatttgatcatcctaccaaataatattatcgcactcaaacatacttaactgtagagttttgataaaatctaatttgatgaaattcaataccatagtagcgcaaaatatatctatgattacatcatcaaatacatagtataacaataatcaattttcatttttcgtgagtagatttttaacttgataatagtttctactggaagcaatacatttttattataattttaaagagaacaactatcaaatctcgtcatagttaaagaaaataattatacgaacgtcactaatattgttctgagtaccaactattgagctcgagagaacaatttgtatgttttttgataattaaatagaaatgtgtcaattatcaaagaaaacaacctctctatctatttatttttattttttttttttcaatatttgagtaggtattcttcttatcttgtttgtgttccaataatgtatagaagtaattatttggatacatgattcatcattctttcatttctatattttatggctccaattggcatcaatttatgcaatttactctatttgaattattttgaaataaatttccaaatgattatcaatgaggtggcaatataataaatttaaatttattttttaaaaaattaaataataaataaaactattgaactccaataatttcttcatttaaaagttaaaataaaaaaaaatatattaggtggcaatataataaatttaaaatctattttttatttatcttaaaaaaaattaaataataaataaaactattgaactccaataatttcttcatttaaaaattaaaataaataaaatttgaatttcaaaaaaattgattaggtggcaaaatactgttgcgagtcgctgtaatataattgctttccgtttgatacacgattacacatataaacatcccaaccaatcatattccgccacgtcatcctccctttgcttcacggaacaaggggtaattcggtaaaggaaatgaccaaacacaccctacgccggttgccacgtggcgatggttctcctctcctagaatatggcggaaacaatccaattttagaatgccacgtggaagcgcgtccgcatctggctacagtagtcggtgtcacagttgatttttttgaaatatggaatattggaatgtaaaaattggagggcgcctgctgcgcgtccctttcacgctccataaagtgtgtgtacgcgtcaatatcaaaaaagacagtcaaattgaattttaataaattgtgtttttttttgtaattttaattttaaataataataataataattttattaaatcattgaagacgtcgtcaattttactcatcaaaagacaaaaatgtcttttacgagatgaccacattggtaactttgttggattttgctaatatacccttatgcttctcctaattttttacttggccacttcatgtatttttagtcaaatgatattaagtgaaatttttacacatgtaacatgcttttgaaaaattgtttagtcaaatgtagaattttgtagttaatttttatgtttgaaattatatatcgggatattttttttcatagcagtatttgttatagttacattattatctttgtaaatttttgaaaaaatctgaatagtttacaatgccaaaaacagagttcctgatattcgagcttaccgcgcgcgttcaaaaaaacttcaaacgtatttttagcactataaactattcaaaaaatttttaaaaattacatgaataatgttgtaaacataacaaacaccgccatgaaaaa

SEQ ID NO: 2907 - DNA, 845 bp, Cannabis sativa
aaactttcactttaaattccaagtattgaaacataaaatataaccaaagagaagatagaaaaatgtggcaaaccagataaagagcatagcagcgtaagaacacagatttcttcccgctttgatcccgaagcacatgagcagcccttttatattctcgacagtcaaaataggacttagccaataggtaaaagtcaccatccacaatctcatcttcctccattacaggagtggatacataggacacactagctgctggagttgaggtgatatcgtcggtgcggaatctgcgccgaatgctagagcttccacgatggaacctggtgtttgcaggcgtgaactttgccgggtccaactcaatacccacaagttgttctgctgccctgcaaaaagtaacaaaagaacactacccacataaaaaacaaagataacaaaattgcctatccatggaagatccatacttcactttccacttcctcttgatttaaaagatcaactttcacaagaggaatcaaccaaaataactgaatccgtatgatcaaagtgtgaaatttcccacacaaatttattaaaaccccagtttctaaaacttcatcttattaaaaaactaaaactgagaagttcatggtggaaacaaaaggctctacctccttagccttaaaaaaccgaaattgattaacagaacaagtccaggaggcaatgccagttaagagatctcggaatccagaagaaacacagattctcgacctcatcagcaacagaaacaaagctataaaaaatgtccttaactctccaaactatagacctactcctttgaatgcaaaggacaaggacacggaaactcatat

SEQ ID NO: 2908 - DNA, 1232 bp, Cannabis sativa
cttaaattaaaattaattataatattggataatattatagtaatagtttctcagaaattggtgccactatttatgtcataactttgtttactattataatttatgatttaataataatggtccagagattcattttcaacattcattagctggcacatccatatttattaaaattcatttttattttacttattgaatactattattctttattttggataagttttcagtgacatgcatgatttaccaattaaccattctagttttttattatcttattatagaatattaccgttttaatgtttcagagcatgtggacatgattcaccatatattacatttttctttttatagacattcttgttttgtttcaattaatttgatcaactttttaggaaattaatttattacctttccaagaattgattattttcctgcttttagcaataaaaattatccttaaattaatcaaataatggctcaattatccaatttttatttggattggatttgaaacatatagtggaattttattttgtttgatattatatttacttaaaatgattggcccaaatcattgaaattagtagcgcatagacttactttttttttttttgaaatgataacagtttgtaataattttgtaacaatttaaaatttagaaaatttagttgcaaacttgtaatcgttaattaaaaaaagaaaactatactatgctcttttgtaattttgtaattttgtttagatttcatatttttaatatttttttttcaaagctgtattttttattttgaaacttcctcttttttaaaaattattgataaaagttgaaaaaatgttattgattttcataatatacatcattgacttagaaccaccacatatttgggaacaaaacatgtgatatcaaatcactttgactaaactaaaaagtcaccagcacaccaaaccaaaagtgtctcttagcatcattcaattttgaattaaaacaattgagtttttagtttttactattatttgtcaaagaactaattaaacaaagtgttatgaataataggatgatgaaaaaataaggaggcagaaagccatagacgattggctaccaatcacatcttcaaggaatgcaaaatggtggtactctgctttccacaatgtcactgccatggttggagctggtgttctcagtctcccttatgctatggcacatctaggctggtctgtttcaacttcaa

SEQ ID NO: 2909 - DNA, 1610 bp, Cannabis sativa
taaggagaaattttattgtaaaataaatgtacacatatcattatttccagtccagggatcactttgcatagagagccaagactggttgtgtcctaatttttcttctttgaatttctcttaagacataaaaagagaaaaaaagaaaaagtacaccaattaagctactagattaataaatacttgatttaatattccattttgaaactgacaaagtcataacattaaaatggcaaaattgaagaacccaacaaaattgaactaaaaaatacaacaatatataacaagcttcacccatagaatcaaataattatttacaaaagaaaatgaagaaaacttttatatttgttattatacataaaaaccccattttcatttcttttcttctattccataagcatggaattcttggatatttctcttaactgagtggtccagaaaattcagaggcatacccagatggagaagaaactggggtcagagaacctgccctctcttcttcatcatctttcccccatttcgtaaagctttttataacatttttcagcacttcccctctctttggagggattctactcttgggtttcgacttgggtttagaaattgaagcttggtttcccatttccattacagagatcttaagaaatcagaattgggtatcagagaatgaaacagaatttgggaatcggagagtggagcagagtgcaggagtgaccttcaacgagggctaatggcggtggtttttatagagagagaatctaagctcttacatcttggtgtggaaggggggaaagttttctttaatctgaaccgttcatttaatgcgagagtctcacaatgaagggctgagataaaaaatgtgcgaatttgcattttttgtatcttggagagcaagctttaaatccacgtggcacatcgtaacggtcccacacactactcattcattccatcttactgtagtgtacagctgttgttactatttcatacttgcaatttttatactgttcacgtggcttaaataaatattgccacgtatatcaggggcggactcagcctaaaactagagtggcctatacgctatagccactttgaaaattttttatttacaatttaatctaattttcattttttttttttacattggagtgttatccccttattcttctctcattacaatacaaattagtttgtgattggaaaatttatatggtatattaattttgagtattttttataaaaatattgtcatgcagtattttttatttttttattgtatttttaataagttttatactgttgtatactgtgttaagttttaactggtgttttttagttgttctactattgttttgagttgttctgttttgtgttttattggtgttttataaaaacacagtacttttgaaaacttttccgtgtgacagtatttttgtaaaaattaacttaaattctaatatttttataaatttcccttgtgattctatttggaatttggccttagttgggagcttgctaattggagtgatagtttgtttgtgggaggttggttatgttgatgcagatagtttggcaaagtgggctgggttgaatgatacagaattggatttggattt

SEQ ID NO: 2910 - DNA, 2192 bp, Cannabis sativa
atgttagatcagataacaaaggataaataggttgacttttgctcaagttatggtggaagtgcaagtattccaagaatttcctgaagaaatttctttcactaatgaaatccatcaagaggtaacaattcaggtgaagtatgaatggctcttcattgtttatggcaattgtaatgaaatggggcataatttaactatttgctgaaaaaaagaagaagtaaagaaggtgtgggttcgtaaaaaatcggacacgggtaaagcaccaatagtagaagaggcagagaaagatgagttgggttttcaacgagtcaagaattgatgaatgtggcttgaacatagatgaaatttaatgaaattactaatactttttaaattcttgaatatcatggagagttttctagggtggcctaggatggtatagtttttataggagacaatacagaaggagggggagtaccttctaaatatcatggatagaatcttaagttggaatgttaggtgtctcaacagtcacaataaacaactaaaagtcaagaatttgatatacaaattaaaagtgaatttagttgggctccttgaaacgagagtgaaggttaagaatgtggggtaagtttatgtgaatatgtttaatgattggtatttcttaacaaataattcttggcaccaagagaataatgattagttggaatctgactatgttctcaatcaatattttacagtgctcgagtcaatttatgcatcttcaagtatgtccattgggacataaggattattttgatatcacattttttatgctttgaataatgaagctaggagaagtttaatgtggcaggacttaacaaaagtacctttaagaatagtagagccacggttaattttaggtgattttaatgatattttgaagccagaagaaagaattggaaggtcagtcaaacttagtaggtctattgcttttatagaatgtgtgggaaagtttaaagtagaggatgtcaaatttttggattctttgcataccaagaataataaacgggggtgaaagatcatattcactctaaaattgatctggtcatggcaaatcaagcttggcaagtgtaattcgagagtgttgaggtagttttgttagctaaaggaaatttaatcaatgctctgtagtgtgacaatctatccataattacaagttgggaagatgcacctagaagagtatcaggcaactaaattcaaggagcccataaacttaaccaattatttattaggaactaagatggatgattgaaaaccaattatttgaagattaataactcatggatcaatactatcagcgagtaggaaaggtgaattttaaaaagaatttaccccataagaggttaaatatgcactattcagtatccctaaaagtaggtctccaagtcctgagtgctatagcagttacttcttctaggataattggtcttaatccaaaaaattagcaaggctaatttctcataagtacttgatctagttcgaagtcaactatgctgtgcagatcccgtagtagttgactatgtctcagaagtacgagtgaagagacaagatagccccctgctcaactgggactagaccataccatccaattcttaaaaagggcatgggccaggtattcttcacctggaaggtcagtgtcaagacttcgaccaactttttggcctcgaggttcttgaacctttcaggagttagtgtagatgggggagacactcaagcaacctctagctcgcctctttggggcaaaggctctgggttgtcagttcctcctcaacatgaccagtccctgcacgggatggcatcccatctttcttcagaggctccctaccctcattataccccctaaggggttgtctatgagcacgtcacagtctctgactaacctttgggcaagttatgctctttctttaggcttagcatgctagggtaaaaacacctcttataggccagccatggttcgtaatagatttaaagttacatattctacaaaaataaaccatgaaaccctggttctttgtgttcttcaagactcataatccaaaaatataagaaatagagccaagattcaacctttttttttaggtaaaatccctacattcatctatcctaacacacccgtgcaaccattgaggatgagttttctaaagttcacgatagggaggttctttcacctccaa

SEQ ID NO: 2911 - DNA, 3789 bp, Cannabis sativa
  modified_base (1136)..(1139): a, c, t, g, unknown or other
agaagagatatagagaaatgcagatgagcgtgaaaagagttcaacaacattttttgtggcatggtactaagcctgtggattatgatatgtttcatatggtacttcattctatttggtataatagactccaccaaattgagtgaaataccgtatgaaaataagtagtctttcttaagcctttcttattttttactctaataagtttattttcactatttattattaattatttgccctttataaattaataaatctaagaaattttgatgaaaattattaaaaaaaaatgtagtatatcttattaaaaagttatttctcgttttagcatttagaagaacttttttcgttttttttttcatgattgtgtacctcactttactgtgaaagttatatttcgtgaaatattattaatggctggtatacaagggatataatttagtaatgtaaaaaatttaagggcaaaaatacaaattatttgtcaagataaagaaaggtttttttaaagaaaaaagtcttagagagcatctccaataggaatgatttaaatcatacttgataacatagatatattttgtacattttttaatggatgcttaccatttgattgaaaaaaaatgtagagaaagaatgttcatattcatacgataacttttttttttttgcatcttatttaatatatagtatgatggaattcaagaaaaaaaacaaaaaaattatataaaatatattttcaacttttaaaaaactaatatataattgtattaaaaataataaaatagtcattttaatatttattttactcataatctttccacattatatatactcttaatacaacaacacaaaagagaacaaatataaaatattctctatccattctactctccatcttcatgatcactttttatctttcttaccaaacatagcctgcaaccaatgttataacaaaaaaataaaattttaaaaggccaattaggatttttacctctcaaattttgacatgtacgaaataaggtcggctctaggcgcaggcctagcctgtctatgtacgcacctagggcccactcattttaagggcccaaataaaaaaaatactttaaaaaatatacacattctttaataatttttaaaaatannnnttatctttatagtaagggtccaattttttttttttttggtttatgactcatttcaactcagggtcggccctgttacgaaatcatgtctcctgaatttttaacaccgttaaaatttctcctgaattattaagaatgttggatttaagtacttttgtccaattttagtaaagaaagtctaatatgaatcaaagttcaaagtgtattatttggtacatattaaagtttaagaaacataatttactagatatcaaaatcaattaccaaattaataaaattaaataaaattagataaaaaaatttaaattaaataatatcaataatttaagaatttttaacgcaaaaataattcaaaaaacataattaattacatgtgagagttgaaacacaacagatcttaatatgacattgcaaaaagttgaaagcatcaagtatcacgtgacttataaagttttggagacgtcattttctttatgaatatgataggagaaggcagacattatttatgactagtttatttgtagtctgactcagagttggcagcgcgtgatgccacctgcctttgcaaataataatttcaatctttttaatttttggcatatcattattattagataagagattacttgtaatttgaaaacaaacaaaattcaactactcttcttccaaatattaaatatcattaatgtaattcttacgacacgtaaattaatatatttttatggattataccatttatttaatatatattttttaataaccacattaatcaagcaccgaagcctaagaatattaattattttatatcctatttacttttgatgaggtggtcggtcgtttttttttattgtatacataattttttttgttatattttatttatttattacaagtgaggctaacaataataaatgatgtttataaaaaaaaaaaataataataatcaatgaagggtatctaaatttaagacgaagtacattttgaaagaggtgagattatttattgctatatcgactagtgaaacattattattgttccatcaaataattttagctttattgattttttttttagagaaggatgcccttaaaggaagagaagatctttaagattgtaagggttattctcaatccaaaatagaagcttcttataaccccaaaaccaattttaccaatttgttaataaaaatattaacggattacttaagataagtgatggagacattaggaaagtgagctaaagcaaacttgatttgcataatgagatctctgaagatagaaatgtcctccttggtggcagcaagagcatctgtgatggtcttgcagtcagttttaacctggtgaatataaaaattctcttcgatgtaccaatgaattgaatagaggagagatttttcttcgaaaatggccgcattttcacctcctgtatgtggagaagcaactgtaacaaccactttaccttcactattgcgaaggactccaccaaaactcttaaaaaaattgaattttagtactattaattaaagattttctattctctcttggcgtgccattttttctcttctcgctccatgaaaaggcaaaaaaaaaaagaatttcaaaaacttgcaatccaaaccattataattgtctcaaactaactggagctctctctaattcaagaagaagcaaatcaaaatgagaatttccgtaattctcactctaatttggggttggatgtggagttaccgattgagtttgaagaaccaaagaaagttgtgattcattcatgggctatggaattagaggtgaaggcagaagttaacaatttctaatattctactatggatgtttgcgccaaattcaaggcaaaccaagggcacaatgttagtgcttgtgataaggacaaaggccatgtttgggctaggaaaacgaaaatagggcagagcaagactaagatcgttgacagtaacttggtaaaagaagtggcagaacactcattgattgatatcccaaaagtatctattgatcctcttgttgaaaaaacctattgcaaataatcataatattttccctctttgtatgtcaaaaataagatacttatcaaacaccaaaaataagaaacataatatcaaccaaaacactacaaacaatataacatacacaaaccaatcataaaagtaaaacaccaagatttttacgtaaaaatctaaagcaaaaaaaaactatgggatcgtagtctactcaaatcattcactatcactaaagttcaataatgagattacaaagttcttttctagtaaaactagagactcacaataacatcaagattaaacaatattgaatcatcaatacaatcatcatcattatcttctcaaaatatggatacacaaagaaaaatttttggtctcaccaagtgaaaactgtagaagagcaccttagagagaacaatcgtcaaatcagaacggtagattgatagagcatcttgaaagaattcaccacccattactcaaaatttgagctaaagtagatgaaaaatcaacaatttgatcttcaatgcaaaataacaaaacccttttttcttttctttccctttctctttctttttcttctactgctacttgttctccacaacacacagtctacattctactttttttttttcctttctttct

SEQ ID NO: 2912 - DNA, 711 bp, Cannabis sativa
atattatttattctaatcaaaatgcattagacctaacaataaattataagtgatatgtcaccctaaaaaaattatttatttagttaattatttttgagaattaaggtttaaatgtaactaaaagaaatagctagttaaataaaaaagctcaaattccacatttctaaaaagtgttgcagacaagggaagcagagagagaaagctttgcagagagagagagagcaatggctgatgacctctttgagggtctgcctccaccttctgcaaacccacctccttctacggagcaacaagaaccgctactcaactcaaaacctgctgtggttgagtgcgacgctccgattccagtccttaaaagcgccctcaagcgccccaagcccaacgaatcaaacccagaaggtatttccctgttctctatccgaaacaagtaatgttgtttctaaattcttgttaggtttctgaactctttagataaaattaggtgaaccctttagcggaatgggagagatttagcatgaggataactgtataattgtttagagactcgaacagataaaaggaaatattgggacagaagtcttcaatggataatatcactcaattgggttacaggatgaaactctgacttagctcaagcacactgttaaatggtttcaaatgggatttaaattctgggttttactattcgatcttgaaatgtgtagaaatttt

SEQ ID NO: 2913 - DNA, 837 bp, Cannabis sativa
ttcaaaggagacaaggatgttatccgagattagacgaccggggatgaacacgctttgattatctgcaattatttcgtccatgaaagattttatacggttcaccatgactttagtaataattttctatgagacattacatagcgcaattggtcgaagttgagtcatatctgaagggctctttgtttttggaattagaacaatattggcatcaccacacttggattcgaattccccagtggtaaagaaattctgaaccatcttcacaatatcattgccaataatggaccaacacttctggtaaaatgcaggtgtcatgccatccggacccggacttttgtctgggtgcattgaaaagacaaccttttttacttcttcctcggttacttgctgttggagttcagcattttcaaaaacagagactttatggttaacacaatcaactacctcacggcaagaaactccagatgcttggaacaaagaattgaaatagttagttaccaccattggtaaaccattatcccaatccacccattcaccatcattattcctcagtttctcaatttgattatggcgtctccttgaagtagcaactttatgaaagtagctgttattttggtctccctcctttagccagagttgtttggatcgttgtttccaaaatgcttctctttgatccaagactttgaataaattcttcttcacttcgctatatctttgaacagagagagagagtctcttttgttttttaaagccttcagctcttgtttgcaccttctaattctgagtttaaagtttcccatcactttttttccccattcacttaaattttcagcacac

SEQ ID NO: 2914 - DNA, 1700 bp, Cannabis sativa
tggttaaaaatctccttatcatttcagcaaaacaaatgaaacatggttagttttaatttgtcattaggagtgaggtgtatggtaagatgtacagtgttttatctcaaaattaattggttaggggtgaaatagactatacatcttttatatttgttgaacccgttgtgaatgtgagtctaacattatttgatagacttcatatagttcatcatttcatttttgaaatattccgctatgagtgtccaggtacaacttcattgttttctgtatgaaatgattcaaatgaagacagagcagtaacatttattgtggaaacataaaacccataaagtgattggtataatattaatgaatcaggaaaaaggaaggtgtgtcaaggaaaagggaagataataaataagaaatggagatagataagagatggtctaacgaaattattggagagctcttttaatgggaaagagttaaattataactctaaaatactaacagatttagagattacgaactatttgccaaaaaaataaatatatttaacgagttttattttttattgaaaagacaatttaataagatatttattttttttgctaattgtcaatctttactagtgactattaaataaaaagcaagcaaagaagttgagacaaacgattttgtcatttgtcaagatactaaatatgacgtaccaaaagaagaaaaaaaaagtacactgttacattaaataaatatatatgagttgtaaactgctgaggtatatatggatgataatattcatattaaatatatatgtatgtaggtggttactttcgtctccaattacattaaagtccagaaaaatagcaaatgtggcgggtgaggagtttggtaaaaaattaactacttagccctgccacatagtaattagtataaagagtagatagatacaataccatcaaagtgtcagatatacgaaacgcaacacaagccatatttccttataataaacaaactccttcatataagaagactcttaatcacaactaaatatacatatatatatttaggatccttaaattacaacattccactctttttgtgtgaacataatttttcattttcttctaatatctctattatcagctacactgcatggctaataaatataacagtcacaccaatccaactctcatattataaaatatttaaaagggaaaaactttcttcctctctactgttgattaagctatcccttcattaatcaatggaggtttcttccatagcttctcctccttgcacatggttctcggttcagtctcagaatagactgagcccacgagctcaaagaaacaatcttactattattctagcatgttgcaacaatggcaaaggtgcttttgatcaatataaaaaagagtactacagctccaggggacttaatgcacctttagctgtcattggtgaaaatatttcattccccatttgtggatcaaagagtaattccttcataactagaagaaggaaaagtaggctcatgaattgtgaagctcattctgcaggtaatttctttatacagagagtatatatatcataccatatagtgctttatgtatgtttaagttttatatttgtattgtttcgacaactttgtatagacaaagctacttgtgctactgtggaagctgattctaagaaagaaacaaggaaaagaagagtagttg

SEQ ID NO: 2915 - DNA, 1966 bp, Cannabis sativa
ggcccactaagcccaacaaataaatacctatctcctcttcttagttgtctctttcctcaccgtcacagtccccgccggcaagggagcaattactctgctcactcttctctccggcaaggcagttgaacccttaatctccctacttggtaataacattgaatccaactccagtttctcggtctatatcaactgattatatgctctaaataatgttttttttgttgttataatatatatacaccaagtgagaaacaatatagcaaatatatttaccagaaatctcacagtttttttattgtcgttagcttagttgatcgttcttgacgaattaaaaacccacaaccgagaaatctcactatacacagttcagcatggcaaattttgataattatgtgtcaagaaaaggcgggaaattaagttccgtgttcactctagcagaggtaattttgtttgtttcatcttgtatttagcaatgggtacttttgtatgttattctttttaattactttaggtttttctgtttgggttatcttatttgttagcaattggtgcatgaatcttttagtttgtttgggtttttttttttttaatttttaatagtttttttgtgagggttttgactgaaacttttgcttgccaattattctacttgggatcaggatataatgatcttgaatgttaattttcttgcaaatggaatagtttttttgccattaattttgcttagtgacatgttgatgtgatcatttgaggctaagctcaatcatggttatggttaggttatgttagagagtttcacatttacaattattagtctactcgtgtcgttgcagattgattttgagatggaataccgtgtatcttacaatacacctcaacatatctttctcaaccacatttccgcactcttagcatagtattagagccaaaaaaaaaaaaactgtaacgagtatttaagatgttagagagtcctacattgataatgtgtaggagcttaagttgccatacacctcatcggatcttagtttctcaactgcacttctgcattctaacatagacgggaacatgtgagttgtgcagatttcaaacaaaatgtcttaattggttttattttgattcattttgatgcagattgctgaaatggacaatttataccaagagatagaagatcaatcacttggtcagcagttttgtcaagaccttgcaatgagtttcaggtgaacaactatttcaattatattgtatgttgtagccataatttgtacaacaaattaaagtcttttctcttaccataaatttcttagcttttcagtggtgcagctagtcgttctgggaaatctgcaataacatgggaacaggtttatgttttatactgataattatttcaatcttcttttctcctaattacaattacattgttttggatttaattgaacttttagtgctgttatgttaatttctgtatcataggtacagaaatggttttgggataagcataagacattgcacccagaaagtgtttcctcacctgttggcctcgaattagttgttgatcttgattcatcaactccaaacaatccgcctgatcttaattcatcaactccaaacaatccgcctgatcttaatacatctactctaagcaatccgcctgatcttaattcatctactccaaacaatccgcctgatcttaattcgtctactccaaacaatctgccagatctcaattcatctactccaaacaatctgcttgaaagctctaaaaaaacttttcaaggtcttcatttctcctaccactgttgaaatttgattcagttctcattcatgattttgtttaaataaggaaaaaacatggttttgaaaataggtgacagcgtcatgagttttcacgagttggcatttgaagctagatcagctaaagatcaggcatggtaagaatcctttaaatcaagtgatacagaggttcatt

SEQ ID NO: 2916 - DNA, 1439 bp, Cannabis sativa
attaataatgggagtcaaatttgatatatgaggtgttttatcatgcattgtgaacttcccgaataataatgaaatataaagaaaaatctaaaattcgtcggcaggaattgagccacaagataagtagtggttcagattgtgtcccgtctgtccatgttaattatgataccataaatatctaagaaaaattaacacgtgaacaataataactgaaagcaatgctccatacatacctatctaacattgctacgtggagatttgtcttttcaccagaaatcgccacctccaataactcttaaatccaatccaacgtagtattattaattaacattatcctatgttattttcttttttatattattgttgatggataaataggatatctaatacagatatgtctctacataaatggaacatttttataggacaccaacgtatgtaggtggtcatagtgattttttatattttttattaaattaaaattagtgagactcaaaatattatatattggagcgataacgatattatacctccaaataagctaggcaccataccctttatcatttctcatataaatatcaccaaatcaacgagtcattttagacacacttatatccacacttccaatattcattatctttactagctactatacagtaccctaaacactactattaccaccacaactctctctctctctctctctcagttatttcatggaccacctactttccaacatctccggtggccccggcaaggatcattccaccggcgatcagcaccaagcccagcaacagcaccagaaccagcaacatccatcatcgaaggagcttctgtcgagcgccaagctgatggcagaggccgctcaaactgctgccagccatgggttcggccaggtcgacaagggcaagacggctggcgctgcagccgaccttctggacgccggatctaagtacggaaaactggaggagaagagcttcggaaagcacgtggagaaggcagaggactatctccgccagtacgagaccaagaacagcactggccaaggtcacccgctgcagtcggctgaacatcatcagcagcaggccggccatggtgttggtgatcatcacgagaagaagcagtcagatcaagaaggtggaattgggggttacatgaagatggcccagggtttcatgaaatagagtaatatgtattattaaattatttatgtttatggtatgggtctaggtttatcagttcatggtcacggggtctctctatgtacttatatatgtataagccatgccttctcctttcttctttctactaagttataacatgtttctatatatatataaaaaaaattaataataaaagtatcatgattttattatttatttatttatttatatttatatattagaatatttacattgaaaatacttattaaatctttt

SEQ ID NO: 2917 - DNA, 1360 bp, Cannabis sativa
ctaacactataaaacttgggaaccttgaaactataacaagaaaacttttagaccaattgaagaactccgtgcaattacatgtaattaagcctgccatgctctaaggtctatcctcttaaaatttcatttctagtattaacaatcaagtcaacaaatttaaagcgcacatttttgtaaaccaggctctcccagtcccacctaacactataaaacttgggaaccatgaaactataacaattgttatgcagctacctaggaaggattcaaacatgagaccttatggaagaaaaccacatgcttgtctattttgaactacctcttttgggaaaattcataatgtatattaggtttagcaagtagcttgtgaaataacttagtgacttccatagccttcttcaactcttcatataacatcataccactttccttagagtacaggaattttgtttcttccattatctctcaaagctcttgtcataatccgtcaaatggacttattgtttaccaagaaaagtaaaggtgcagtacactttaagcactctccaaagagagatgcaaattcataattcataagcttctaaaatcatatcatcagcaaaaaattgaatcttgcacacatagcaaaattaaatttcatgtacaataccaaaaaagtaagaagttacaatgacatatattttaactcattagtaagagaataaaacacatccagtatctggtctccaacatatgtaaacttcagaagttgaaacaacctaaagagaggaagtgcatatagggacccacctcaagtatggcaactactgcatgaccacttgtaggactgtaggacatacggacaacaggagatcctatattgatagaagacaacttgcttcctgttatcgcatcgaattctgtgcacaaaacataaagaggagaaaactatggtaagatactaagattcacaaatgaaacaggaagaataagtagatgctcatataatttcaaataaaaccgtcacagcacacacttgagctatcctataacacagatacagctacaagcaacaaactgctagaacaatctatgccccatcacattttgattttgtttatcatttctttgtcatgttgcgaccaagatagcactgcccggaatcttggatattgtcctccaagtacaatagattcaatacattgtatttttggcctactataacatcaatgggtgtttaatgcatctgagatttacagaaaacaaatctgaaaaggtgaagaatcttctcacaagctcatatgtccgaacacacaacctattgtctgaaactatgttctaaaagaaaagaatttgaatgaaactattaactatgggctcgttt

SEQ ID NO: 2918 - DNA, 1104 bp, Cannabis sativa
aattttaataattttacaagtaatttggtatgtaaaaatatgaaattgcatgagaaaagggtgtgaatattagataggaagaaaaaaaaaggctagtattggacatgttaattatattactataaataaatgcaactaatattattctttattaaggtgactctctctaattcgttctaattatcaacggcttataatttttttttttatacaaacctgttagttattagtatgcaaattatgcgatattatcttaatgagcactataatttcgttcataatttataaatgttggtagattataatgtttaagtgataataataaatgtaaatttaaattaatttgttggttgattattcattatttgataattttaaaatattgaggaaacaatgatacactacctttttaaatagagcataataaacaaacctaaaatgacaatctatctaaatcatcatcaactatatatatatacttatccatttgggttgttttgttttctttcacccttttttcttttttaaaataaaaatataattcactcttttctcttcaatcgaaaagaatatgtatgtgttatgatttttgtatatatataaaaaaggtataatgttatgatttgccaaattgcattgacagtgaaatttgaaaccgtcatccaaatatctaatgacaagttaaaaggttgtcaatgaaaaaaattaaagtaaaatatgttcatttcaaaattaaaaaaaaaaataaagctttgattccattccccaaatattagaccaaaatggtataataaatacatataagaagaacaaaatctaaaagagtaattactattgaaatccatatcccccaagaaactaaaatatcaacaaaattcctattattattattattattattattattattatgattaagttattaaccttacaaaattccatagtcaagaagactcaagagtttgaattgagccttagttcttttagaaccatatcttcatttgggtgtcaaccttagttttcttaattacaaaatgttttatgtaaaaaaaaatagaaaaaattctttcttcaatcgacatattttaagtaataaaaacaata

SEQ ID NO: 2919 - DNA, 553 bp, Cannabis sativa
ttggttcttttcaaaataattaaaataatcgttataaaaaaaaaaggataaaaaatcaaaaataatagtaatggaataatggtttttgaaaataacatctcacctactaacttagcaatattccagaaaaaaaaaattgagggtaaaatggggaagttaataaaaatataaaaacgacaaaaaacagaatgatgtttccaaagtattaatagtttggatatatattatattttgaaaacgactatcgattttttttttttttgataagtcaacgactatcaaattagataccgtaatttgaaagattgtgtaactctttcttctgttttttttcttgggacatgattgtgtaattcttcaataatacaaatacaattttaaaagctaaatgccaaattttctgatctaaattctacactacataaaatttactatgtaagtaatgtcagaacctatttaaatggtttaaaaaatcaatgaccaacataatataatgataaattgtttaaactttgacaactgaataaatatttattaagcaaaaaaaaaaaaa

SEQ ID NO: 2920 - DNA, 988 bp, Cannabis sativa
agaagaatgatctgcatggtttatgatttgagcctccttgtaatcctgtaaataattaatgaataactcttccacattgttagaacatcagatttattaaataagattgaatttctagtattccagatgtgccaaattagactaacaaaaagagggatatccttttttgaaaaagttgcattgcttgaaggtaaaactccataatatcaatccttcggtgatcactgtgaaattttttaaatcttgaatgcttccaaatgtgtcgtgctccggtacaatcaacaagggcatgagtaacagattccatattactaccacaaaaatgacaaaagggctgagggagcacttttttatgaaataggtttagagcacaaggcaaaatatgattgaaagctttccatgtaaaatgtttgatttttaggggaatgggaagtgtccaaagagttttccaccatttctcaaaagggtttgggttagaggaggaaggagagatgctattggcagcagcagaggccaaatggtatgcagacttaacggtaagaataccagaatggtgaaatccccatatgagagagtcaaccgatgtagggtctaaaggaatttggagaatattattcacctgatacaaagggaaatattgttttaatttagaaacattccaagtaatatcagggttgatgaaaaaagaaacgttagaaagaggggaatcaatgggatgaaggatggtaggatgtgagattccaggtacccaattaggggcagataaaggaatgctattgccagaacctatcttccacacaagacctttcttgagcagttggccaccccaaagaagacttttccaggtaaaagaagaattgtaaccattaggggcaagcaaaaaatcagaatttttaaaataactagctttaagaattgaatgaaggaaagagtctggatttgaccaaactcttcaagcctgcttggcaagaatggcttgattatgatg

SEQ ID NO: 2921 - DNA, 3251 bp, Cannabis sativa
gccaaaaatggaattaacaaataaaaattacaaaaaattgaattggaggtgaattcaattccaatttgatagctggattaaaggtgcttgggtaggaaaattgaaataaaaaataatatatttttttttcaagaattaaaaaaaggaagagattttggtttggtgttgtgtatataaaaatgcccaaagaaaaaaaagaaaatggtaggagagaccgagaaggtgggtggtgagtttttggtggcttgttgacaagatccaagctgagagtgggggtcaggttgggatgaatcggggctagaattgtagaagaagaacagaaaaaaaagtaatttttaagattttcaaataatttatttattttttattttttaaaattaaaattatcatttagactaataatacttcgatatgtggcaataaatcaattaaattttaggctaatagacttacgaaaaattcctcgaaattaaggactaatttatattaaagtaaattttttttgagacttttgctgcaaattaccttcaatggtagagaaattaccccatatactattttttaatttttttttaaatttatggtttgagtttcttggtttctcggtaatttttatatgggtcgctttgtaatttaggttgcttcgttagttgcaatataaatttttatgtaaaattccgtaaaaataaaaaaaatttattttgaagtgtaaaaataaaaaaaagtccattaatttattatgtttttttttttttatatatatttttaaatttatataaataaacaaataattatcccaaaatgaatagaaaacttaaaaaggttaatttgtttgaaaaaggaaaataaaaaaaggcggttaattattcctcgtgacgaagagaagaagctagcggaacaaatggggtaagagagagaaagaagagagagagagaaagaaacgatatcagatgaccacggaagaagaaggaagaaagagatgcaagatccacaatccgactcctcaaccccaaaccccattttccccaaatcttcttcttctactacttctccttctacccataacaacaacaatggcgtttttaccttcaaaaatagcttagcaccgttaccggcattccccgccacaccctcctccacaaccacaatgcaacctaatcttaaccccaatcacaattccggtggaggaggacataggagggctcactcggaagtcacttttcggatgccggaggatatgatggatctgtcgtcgtctgatccgttcaacgccggtggatcgtcaacggctagttttgaggagatcgggtccgaggacgaccttttttccacctacattgacgttgaaaagcttggcgggaatgctaccggaggaaactgtgcagatcagagcagtggtggtggtgccgaggttaaagcggaaggtaataatggtggtgagggagagaagagttggagtgggagaccaaggcatcggcatagcagctcggttgatgggtcttcgacgtcgactagtgtgtttggggagattatggatgccaagaaggctatgccgcctgataagcttgctgaactttggacaatagatcccaagcgtgccaaaaggtatacgacatgcttttgatttttatcaattggaattgggaaagttttgtttttgtatgttttgatgccgagaaacacagacattgagtgattctttgtttgtttattgttagtattttcgagtggaatgtgatgatttggaatattgaatgttttaattcaaatgaatttgttttatttttgatcttgtaacaatataagtttgcttcatcatagatctcatagttatgtttcctttattcacaaagtgcctttgagatttggctttaaacttgtgtaattttacgtcattactatgaattgcctgacttttatctttgaatttgagaacaagaaaggtaatcatgtgttattaactgttgaattagggcagataatgttgaaaatgtgaaaataataatatttagcatcctatgcttgaggatgtaagaatgcagtatttgctttatattgatatttgattaccagaacggctgcaggtagcaattggggctttgaaaaggtagtcatcatcatggaaatttgttagcttttagtaaaacgaatataacactagttagaagatgagactaggaaggtcaatgaaattatcatgctatataaccttatatatgataagggcaggcaattaattaatgtattcttttgtaaaagattttggatactaaaactgagagcaaaatatgattcttttgagaatttgacgctaactaaattcctgcattatattttaagttctatatattgtattacttttttccatttcctagtatgctctcttcccctgacatgtttattatatgtcaaaggatactggctaatcggcagtctgctgctcgctcaaaggagaggaaagcccgctatatacaagaacttgagcgcaaagttcagactcttcaaacagaagctacaactctatctgctcaactcacactcttccaggtttgtgttggtgactggtgagcttttagcatggcatttattcacaatttgtttaaagattccacacacaggacacgaggaacctttaggctggaaagttaaactattcacacaattttcttaatgaaaaaaattgattatatgagattgatgttagaatattttcaaccttttgtttgttcttgctgcattatttgaattttatctgtcttattctttgaggatcccctctgtatgcttaggtacatcttactattagtcacatcatatagccacgagcttatcagttcttgttatcttatgtagagggacactacaggtctgagtacagagaacacagagcttaagcttcggttacaagctatggagcaacaagctcagttacgtgatggtaagtatgtaatgtactgtatctttttcttagtcctcaggtacgtaaaataatgtttctcttttagtgccataccttattgatatcatcttaaatgttgtagctttgaatgaagcacttaagaaggaagttgagaggctaaagattgctacaggagagatgattaaccattctgagtcatttaacatgggaatgcaccagatgtcatataattcctcaaattatttttctgttccacaacaagccggacattctagccaccaaaacatgcagttgccgtttagtcatgcccaggctaccatgtcagctcacc

SEQ ID NO: 2922 - DNA, 932 bp, Cannabis sativa
ctaacttaaacacaagtttttgagtaagtttaaagactacataataaggttttaagtttacaagagccttactgaagcaaattacttatggtgttatcgggtcagtgatgaacatgatgatggcatctgaatctacaaaaactcgatctgtggtgaatcgaaatgttattcgccagatctcgctgcacaagtcacatttagtttgagattttgatcaagcttgcttaagggaaaaatctttaccaagctgcatagccataagaatagaaggagatgatgagtaatcaaaccttcctagccgaaatgaattgtattggttaaatattctttacctcacatgttttttcttcaacaacaaacttgttgatgctggagcttgtatttgcagggtactattactaagaaccactaccggagacatgactgaatgtgttactagtatttaacagcgctagaactctgagtcttgccgaaaactgactctatgctatcatgacacaagtcaaatgcatttgacacagcaaaacctgcacacatgccatccactgctgcacttacaatccctccagcatagcctgctccttcaccaatagggtacaatcctttcagtgatgtgctctcataagtgtcggtgttacggggaatctgaataggggagctcgttctagtctggagcagaagagaatattttggcagttaatacagctaaacttttccagagaacataacttaacatgtgaaagtgaagaaaagaaatggtttgttcatcaatatatatagcagatcttttatagaaaactttaatgataaaatcagaaactgaaggggaaataaattaattactattattacctctacaccatgaagaaggccctctttggagattattcctggtaactgaatgaaagaagttggaagtaagttatgcagta

SEQ ID NO: 2923 - DNA, 854 bp, Cannabis sativa
atagtggcatcaaccatcgaggatgagtggaatgttcctgaattcattgaaagcggcatagaagaatacagagtttgaattattggtacagtaggaggatatgtagcataaaaaccttgagtcattccagtattagtagcagtaacttttatgggcattgagaaagcattgctattattgctcagtttaacaccatggacttcatctagatctccagtctttttattaaaggaagcattactgagaattggaggagaaaaaaccagtgatggggcagccatttgaggagaattcaagccacttgataatgcactaggattgctatatgagggtctggaattatgtgacaaagtattaccatgttgttgctggtgtagtggcctcatggaagcagaggaaagagtaacaccagaaacttgttctttgttggacgattctccaactagaagtgttgatggatgtggttgcattggtgactttaattcaggaattgtatcaatcaaggatctgcgggcgagtctcgtgattaatggccaagcatttgctttagagaagtcagtcctatatcgatcataagatgatgtggggagtcttgcaccttgcattgcaggaccatacgccaattcaggttcaacaccagagtccaatttttctaagaacacagggcatttttgatacaaatggcctataattccacactccatacagtaattgggtaagcgttcatatcgaaattcaacccagaactcgtctttaactttaggcagagaaatcattcgaccacgaagaagtggtttagtaacatctagtcgtactctgaaacgaagaagaggaccccatccctcatttaacga

SEQ ID NO: 2924 - DNA, 1558 bp, Cannabis sativa
aaaaaaaaaaaaaaacatgcaatactaaattaccaaagttgagtgaaccagtgcagtatatggaacatgattatcgaattgaagtgccaatatcatgtgaaaattgttataagaactatttttttttttttttgaaacaagtagcattatgtttctgatattaagaatattaagttttaaaaaaataaatgtaatgcatctgaatcctccacgcgtttatatttatgagataacggaaatagtaacggaaatagtagtaacggtgtaagagaattgtaacattaggtatttttgcctccaaaaataaacattaaatatttaagtgtataaaatttgaaacattacatatttatgtcccaatttactcattcaaatattacacaatttcacctatccagttgcggatgttctaataactattacttttgaaaaaaaaaaacaaaaaagggattgaattgaatttaaaaatttaattcatcgtaattattggtcacgtgtattagttggtgaagttagaaataatggcatgagactctgccgccttggcagccggagatggctccacttctggcgacggcttcacggggcactttccgaggagttccgtgggcaaatcaggtatgccctttaggtaaaacgtgtaaaaaagtttaaagggatacacaacctgctggagcttgacctgtccgtacgccccctcgaagacgccggagccgccagtgatggccaagtaagagtcctcgtaggacaagtaggagccctgtacggacaaatggccgtaatcgccgaagtaaaagctgtagatggcctcgtacctgtccccgcgtttctcgggcacgtgttggacgaggacgcagagtccggaggttatgccgagacgtttctccaagtcgccggagtagatcttgtttgagaagggtaccagatcgccgagagagttgaccggtttttgactcagtttaagaaggattggacttcccctgtctcgctcgttgatctcgtacacgtggaactcttgaacttttgctgtgattacaatcaaagttagaaaaaggaaaataagagaatgagatctaattatttatataataaatcccagtgtagttatgtaaacaaataaaatgtaaaggtcatgaaaatcttctttaacttactgggtctagaagagttgggtgatggtgaaggtgatgtttttttcttttgaaagaaaaaggctttggtagtgaagttggttgatgagttatattttgttaagtttgatgatggtgagagtttaagaatgggaaaggagtaagaccagttgaaacccaattgtgtttgagtttgggatggtgaacgacggctgatttggcttgaaattctgagtggtgatgtcgttttgaaagtgcttgtggacgccatagatcttaattacgtcgaaggcaaggtagtagctagtattagtaatggagattagagatgaaaaacaacagaaagcaaatggggacttatacaagagaatggccggggtgatataacaacttatatagaatataggtggtggggttttgggcacatg

SEQ ID NO: 2925 - DNA, 3566 bp, Cannabis sativa
  modified_base (2114)..(2116): a, c, t, g, unknown or other
agagagagagagagagaaaatagggagtgaaaaattaattcatttttcttctcacttatctcagtttattttcttgttaattggcttggttatttatgagttataaataagctatttttaatcattcatttaaaataaaaggaaaaaaaattaatttgatttgaattagaattaaaattcaaataaatcgaataattaaataacaaatatctgttagatcttttattttaattattatccttttaattaaataattatctaataatttatttaattaataattaaaagatagctagcttaatttaatttaaattattttaaccaattaaaataattaaactaaattaatcgtgggcctttatatgtgaccctacatgtgtagactgggcctacacgtgtgggtcatattttatggccaaaaactaatttctcaattttatcataaataagatttattatttattctaccaataaataataaataattaattctcatcaatttcttatttcacaaggattaaaataaatataattttctctaaaataatatatttcatttttaatattatttaagaataatattatatttaactaattaatatagttttatctaataaaactaaatagttaaatactattaattatacaattcataatttccattattaatcaaaataataatttcacaaattactcttttgcttttaagaatttatttcccacaaaaattaattctcactcaaaatttattcatcaagtaaaatattcccatgtacagtgttgtatagagatgactcagggatcatggacttatattcgaagctccaataaacacttcattattatcgatctcatcaatagaataatctggtttattaattctatgattactacactataaatatagaactatactctttgacaatatagaattatatttacagaattcttacttgtaatccattgacataatcaatataaacagtttgtcctccaattatcagtcataattagagttggtcaaaataccgttttaccctctaattatctcttgattctttatgtaccaaaaatttaatgtgaacagttaatctataacttattatagatttgcatctaactattagcactctaagaattaacactataaggaaattaatattcaatccgttaggaaagcttagattccactattgtataacatgttcttagccactcatgttattaagctttcaaaataaaagttgtaagaattatcttctataagaaactttaaagagtgaatcaaagaagtcaataaatacaaataggagttcatgtatactcagaattcaggctaatctactaatgatcatcattgtgatatgaatcactctttcatggtaaaaggcacgttaatgaaagatgtttattacatatcagtttattcatgcataatcgaattatacacaacacctttactacatgtatatccacatatgtgattcgaattaaaatcacacacacacacactaaaagtatagtgtatagtaaaccgtacttagcagttctatattaaagattttgagtacttcaatacactaccaacttattttctgtataaatgggtggactgttaattgatattacccatgaatgggtaatattaaaaaaattgagtttttatacttaattttttttatttgattagaaaaatgtctcatttttttattatatgggctgaggttgttccatcggctgaaaagaaaataataataaaaaaaaatcggcaaaaaaatgataaaaaaatattgagttttatttaaatatttttcatgtaaacttatttttgatatagtataaaaagatgtatttttttttatattttctttaattaagtagctaatttaagtgtagaaattcaaatttctcttttattattcgccatcgtatcaaaatctaatgacttaatatttttaaaattaatatttatagtttaatttatttagtacccatcaatgggtaatacccattaagaagtgttctatgtatatatcgtataatcttatactcttataattaatgtatcatttattttataattgtatttcatatattctctaatatattacccnnnaattacttacttttagggcataaatccctacaaatgtcacacaaactatgtgaatactctcgtttcacatcaaaacccatgtttcttcaattagagtattcctactattcacttttccgatttcatttaaggaccatgaatcatgcaaaaggtgatcaatcttaatcatgtattaaaacaaatatgaacaaatcacaagaacaagaaataagaaatagtcaaatcacattaactcatggaataaaatcactcaacattcatcatatccctaaattggaaaattagttcataatctctacaatcaaatccataattaaactagagacagataaaacgtaaagaaattaaaaggaaaagaaagaaactaggtggagaactcaatcggatcgccacgctcgctccaagagtcttctttttatgtttctagggttcttttttgaccacatcctttgaaattcgtgagctcctttaattaaaatccagttttatagcccaaaaatcaagaaaagagaaaatttctcacttctcgtacggaggcggcgctgcgaccaccaatagtgttgccgcggcacctggaaagtaaaaaaaatgattctgtctactcctctcgatgcggccacacatgggtgacaattcactacaaccaccgatcgcctcgctggggtgagccttcacaaatgaagctcaatttttcgttctttcctgtcccattttgtccttttgatagttgacgaattttgcaatttaaaatatcgatcgggaaccagaaaccaagaaaaacaagcgtaaaaatgtattttaaaacctttttacaaaaatatggcataagttaatccataaaaatgtaaagattgctaaaaaaccatattctaaatgcattaaaaaatatgccatcactactacaaaaagttcatttcccgtcagtatttaaatgacatttaaagttttgtcatcagttcctccaatcgacgtgtatactacagacgaaaaaagcgtgtgtaattgtgccagttaccaaatgttagttcaaattatttcaatcgatttttgacactcacaaataaatataaaaataatttttgcacttatcttgtctatttataacagacacacaaaaaaaaaacctcacatctgaactcataggaacccagatttaagcacaatcaaaaataaaaataaataaaaatctcacatattacacaaagaaaaactatttatattgtaatctcaactcaaataaaaaatagcacaaatcaaatatataatgggtaaatacaaattaaatacaagtattacacaatatatattacataaaaattatcagatatatattgtgtaatgcacaaatcaaacatttgtagagaggtcgccaccaaccattgttgctcggaccgcgctgcaccaaccacctgcaaaaatggagaggcgctgagagagagagagagagaga

SEQ ID NO: 2926 - DNA, 1079 bp, Cannabis sativa
gtctttctgcagccatggtggataacttgataaacagaactttgtcatgggaagatgaaaggaaaaaattatttctttatgacggggtgagttttttttccccctattgtttttttcagccggagttgtcattggcaagtttgtgatttttgctaaaagttttcaatgaacaacttttgtaggcaaggttggtatcaatactggaggattacaaactcagcagacaacagaaagaagaagagaagaagagatacagggtaatttatccttacctcatcgcttttagttttatcgagcataagaatttaacaagtaataattgtgcagattttaaattacgaaaacaaagtagaatcctctcaactattgctttgtgtttacattttttttaatctcattttataggaccaaaagaagctccaagatctgctccttacagaaaaggaatcaatatatggatctaaaccaagtcctaggaaaactaacagctttcggaagccaaatgggtaccgtgcaaatggtaatggctcaatgacaactacacctcgtcgaagctcagttggcagtgcaactcctgaactcatgacaccccggtcctattctggtcgccaaaatggttacttcaaggaaatgagaagattgtctacagcgccattgaactatgtggccataactaaagaggacacaatgtcttttgcatctgtatgtgggtctgagctaggatctcctccccatggttgaactttaaatttaaaatcggtttgtcactctaacttgaatgcatttctgtgcttgcacacattaaccttctttcgatattttcatgtcgggaaattgaaaaatgatggtacttctatgcaggaacaggcagctgtttacacgctagaggatagtacacgcaattaaagcagcagaaactttgtgaatatggatggaactgtacactatgattgtaatttgttaggattacacgggggagacgaagacgaggatggtagctaacaattcgagcacataaaaatttcgatcttggctggttggaagaaatttactctggaaaaagatggtgtcattggtag

SEQ ID NO: 2927 - DNA, 2428 bp, Cannabis sativa
tgaccattatttctgttagtaatcgtgtacacaagagagttcatgcaagaagactcatgcaaactaaggatcagatcctatccctccataaattactcggtaaatagaaacaatatagactttctttaggatcaagtggtttagtatgctgcatctttagtgcactttatacattgataatgatccatatcttgtcataaatgcatcaagagattggcatatttgacgacatagtgtccttgtttgatgttgacaatttttatattaggatgttgactcatagaagtgtcactaatttatagaagcataggattccagtttgaatacataaacatgaaatcttcttcttatgatttctcaaactacatctcccctttttggttcagtattgagatggcttaattttcctttattttctcaaactacttgaattatcatttattcatttattattcagcttgcttgcagctaagtgttctgtagtctctcatgtggttttaacatgttcttagattgcgcagtttaactaagaaaatgaaaaagtatttccttaacaaaaagtactatattaggatatagatgaaatattccttgtattctaactgtatacataacaataaagaagagaataaggtattatgtatcaagtataggattactttaggcaaattaaactctaaattaatcattttgagtgaatgaagcaaagcttgatcactgtagaacagtgaagacttgactactgaagatgtggcctccttgggttgagagtaaatgtccatacttgatagtttgggaatttgaatgtcatttgtgagagttttgaattttgtaagaagaaaaaagccaatacatttcaacttgcaacttctatttgtagtacctaacttgtgccttctttgcaggatgtaattggtagcacatgcctttttattgctttgcacagatccatgttgcggcttgagcggttagtgctagtaacatagctcttttgaaagcttgacgattatttgcaataatgtgttttgcgggtttctctctcttttttttcttttacatcgaaaataatcatgatataggattttagatcatacaaagcttctttctttacttggtataattgtgtttcttttttcagtgttaaataagaaatgagaatgcaatctcttttgtaaatttatagaaatttggtatctttcactactgatggaaccttatatacatttataaatataaaatatctctaaaatatatatatgtaaatatttaccataatagttgaaaataccctattataagcaatggtaaaccattactctctgtttaattagatagagagataatatgaagaggcacattcctcaggaaatgaatatagagaggaaggatattatatcctttgttgaagatagagagatagtgttaagattttcatcatttgtttgttaggagcagaaattggaaggaagtttattttcacaaaaactataatatccttagttgttatttagtgataaaatatttagaagtgagatcctggaaaaataatttgaaacttttttcagattctttcatttcttgacagctggtaaacacagctgtaccaaatgtcttggttaataatcacttaaaatgaaaacaaagaaatgagaatgtgaatgtgaactggaatagaatgaaataaaattttctatgcataatttttttttttttttataaaagaattatttttatttttaaccaaattcttttaatacaactttaacaatacatacaatacaactaactaagcatatcttaaagttagttgtattgtatgtattgtttcctcatttattggattaggtttaattctgcaattaatgtaatttaatattgtttagcctatatatactgtgtatatcaataataaaattacagagaaaaaattgatctcaccaaaagccttttatgacagtcattatccttgctctccccagtctatggagtttttccctcaacaatattcctgctaagataccatggacataaacttggagaaaaaaaatatatatatgaaacactacaaagcttttattgattatatatcttataaaggcttagaacataagagggcataaaaagagagggatactaataaaagggaaaagaaaaggaaaggaaactcaaatcagctcatttctaatctgcacaggtgtaccagattttatcacctaatgtcttagtcgataatcaactgcgatatcctaaatcttgatacatttttaactgaagttttctttctttttcttccagatttgctgttgcattttatggcgttccatctcgtcctcaattagttgctcttgttgctcaggtataatattggtttaccaagggttcatttgattttccatcaaataaggctaaaaaataaaataaaaagaaa

SEQ ID NO: 2928 - DNA, 2211 bp, Cannabis sativa
gttgaacatgaaaatttgtaagatatttttattgcttttaactcaatatgttttcaaaccctcaccaagccaaacgtcaattgtggtgccctttattttttaattatattggtcggtttcttattatatttaagcaatagaaatttcatcaattgagatggcatgtaagagaactacttgactgagatagtagaattcatatttcatcataattggctttttgcaatattgcttcgtccatacgggaactactcgttgtggatcactagaaaaataagaaataataccagatatttttattaatcaaattatcaaattctcttttgtgttcttagttgctgtttttttttttttcttaactaagttattttaagcagattatagaattgcatataaaatgaaaaaaaaaaaaaaggtaaaacttttattctaaagtaaaaaagaaaattaaaaaatatcactataggtgctccttattacttgaagaaaattccagtgtcttcatcttcatcgttctcatattataggacataagaatgtccttatatgccatcatcaagagctcttcatcatgattccaaaaacccaaacattgaattatatcaacagtgagagaaatggttagatgcttattccaatgataagtattatcattttctactaccataatccacatttcaaccattcttgtttggttaaagtctctgtaataatttgctgcaaaaaaagagtctccgtgataatccagtataaccaacataactaattcctctttctagcagtatccgaagatttggtgtcaaatggtaattgtataataccaaatttctcatcactcatatcgaatgaaagaattcgaaacttgttgacccctttatagagccaataacaaactgatttcatatacactacatcatgatagtcaaaactaatgtctggatgtagctttatcatatatttgatctccctccattgtctactaaccccacaaccacggctactactctgaatgttattggactagaacatttaggtttggatttaaagatcttgacatacttgtaaaattttgatctttcatcgtacccaaatccatgtaaaatagattcgaagttgggtaaaggtttggtgtataaaattttggattattgttttagtgttggattgataaagacaactttagtatcatggaaggtgatgatgccattacaatgaaggactcttgcaccatggtatgtatcgagattggtcaacagaaggaatgagttggttgttatcatcatcatgatcattataagagatagtgtcaagtgaaataaattctggataaagatatttttggcggaagaaaaggaaacatgtattaatatactagaatttggagtgaagataaaagtgatcgattaggaatgacttattatttttaataatattgcaccataattacacacaagcttaaatgttaccacacactcatggggcaacataaataggattttcactactatttcttctggtagatatggacaaacaacttctgcaaacaaaaaaagaaaataaaaagtaaaatgcagttacatatatacatatatccagtacccttaatataatttctttcaaatttattaaaatttatgtacagattcttaaatacctaatctaatatatattcatggggtattttaactcattttgggtgtgtaatacatgttgcttctatattctaatttccaaacaaaactcttagcattacaatatatatatatacgcacatcaaaaaaaaatatatattatatatatgaccatctaaaaaaaacttgatggactaataagtataacctctaataccacgatcttttttcttcttcttctttttgttgttctttttctttctgtaaaacatggcttctaatttttctttttctttgtcagccatggttttgagattttgagcaaccctaataatataatatatatacatatagagagaagactgcagagaaatgcaaccctaaatttttttaggagattatatttacacttctaaaaataataattacaccttattgctaaatttatccaattaaatatcattttttttatatatataactacattactttattctatagttaccaaaataatattatttagtacaccattggccggaagcaaaacttcacaatggaattataggcaaatatatgccat

SEQ ID NO: 2929 - DNA, 2664 bp, Cannabis sativa
attcactgagcgtgggacccgtaacaatccaataggaacattgcctgaatcgttcttatatgtagaattgtaccatatggtcacgttaaagttgttctcatttgagttcaagaaatcgtaggctgtgagaatacactgtcaatattcaatactacaattcacaatatgattctgtatacaaccagctaaagttaagacacatcaagtagattaacctgctacaatctcattaatcttcctctctgaatttcccttcctgtaacctttatatagctcatcattgatctcagaagaggtattgcgccacaattgcaaaccttgaacacatttaatctctggaatttgcagggtaattgagttcatagcaatttagcacagaaagaaaagaaaaaaaattacagatcacatttttaacagattaatatccatttgaagtgtagtatcaatttataagattatcaatgtttacaccaaatgaatttcaatcaatgtcttagactacaaacaatgaagatgagacatgcaaaatgtcagattcacaagatttgatcaagtaataaatagattagtcatcaacatacgatagctacatgaaaagaaattaaaagtgtgtggttgtacaaaccaaaccataactggaaaaaatctactattcacccctttttttttcgtgataaagtgattggaatcactcaagaattcacaatgaagacatcaacaatcggtgcgggaactcttcaaaccaggatagctcattgtctaaccaaagggtatgctttgcctaaccatgagctgcagagttattttcacgagctctatttggtttaccccataaaggttgtaatatatgaacattgagcaactcttattttatactccgttgcactacacgggatattcttatggtaattctggcacattaatacgttaaaacattaatttgttattccttctttcttaaataattaataataactaattaactatatagcctaaaagcaatttagaaactagtacacatcaaggaaactggtttccatacatattatcaccttcttgttttatttttctctgcattaggtagtttctacccctacctctatgtgtcacttatttaaaattcacaactcatgcagcataaatggggaccaaactgcaatacaacaaaatcatgaatagaagggtaacagtatctttaccttgttctttcccaaaggacgttatttgaacatcagcataaaaagtagagttcggtgtgcactgacgttgcaaattatatatgggtaagcctgaataaaatgcaggatcaaggaaattggtgaattggggcattgattcagaaccctgcataaagaggaacagagagacatgttaaagcagacagagttatcaatatcataaagataacttacataagcaaggaatttgctagataatgatactgcttataaaaaatttgtataaagaagacttgaatacaaagagaacaatatgtcttacgccaacaatattggctaagctatccagggaacgtgaggaatttaaacttgcagaacttgtgaacatactcccagccaaagctaccatagagcacaagataatgttgattttcaaataaatattaatctcaaattcttcagaaacataatacattaaaaggcatgaaagataaaatcttactttgtccaagagattgattattgccagtaaaaagtagagtaacaggacaggaaccagtccttctgcatgactcatttggcaaatcagaaaatggaataacattagatgccacagcacgatattcaggagccggaacttgcaacaatggaggccattgtggcgggttaggaatgggacaccaggccccttgatccaaagacgagtgttccaaagagcaaacttcctcgcatcgaccatctccatttgtatcaatacaagcacagccacatttgttttcaggtttatcaagttcatgattgaccaaattttggatgagcacaagcaaaaggcagagaataaaaggaaacgaaatcaaccgaatatttgtcctgacatttcttttctgcaaaacaaacaaaaaatattgtcatcagatatttgttttgagactgtttttaatgattcagaactagagaatgcttgtaattttcaaaccagatcctacagttctaaaaaccaagtaagacattcgttataaaaatatagatttaatttcttgtcacagtaaaaagactcaactttcacatgtctcttcatccctagttgtctttcattttgtaaaaagaaaagttcgtaaaactatataagctagaaataataactaaaatgtatcagtgatattgaatggaaaattaaatccatgcgttctgttgaaccatatcttaatataaaggttaatcacaacaccttgaattaaacaaatattaacacattccaacaatatagtataaaatcatctgacaaacttaaagaaaaaaaatcaatgaataaaacaaatgtaaaggctaaaaattggaagaagtgggagtacctttaccaaaatgattatttctaataaagctaacacatgcatcaaaatgtaaaatgaagagaaaaaaaaaaggaatacaagtatataatctggaacttagttcttgtgtgtattgtatatacatcgatattaaa

SEQ ID NO: 2930 - DNA, 1288 bp, Cannabis sativa
catcgcagtaggagtactcgccattatttgtgtcattgcagtactcagtaccaaggcctcttctcgcctaaactatgtagcttcaatagttcacatcatagtcatcatcttcatcatcattgctggccttgccaacgccaacacctctaactacaccccattcgcgcctcatgggccgagaggtatttttcaagcctcggctgtactcttctttgcttacgttggattcgatgctgtttcaaccatggctgaggagaccaaaaatcctggtcgtgacatccccatcgggctagttggctcaatggttgttacaactattttgtactgtttgttagccttgactttgtgccttatgcaaccctactatcaaattgataaggaagcacccttttcggttgcgtttgaggctgtaggaatgggttgggccaagtatgtggttgctgctggagccttaaagggaatgactagtgtgttgttagttggggcagttggtcaagctcgttacttaacacacattgctaggacccatatgatgccaccatggttggctcaagtcaacgaaaagactgggacacctgtcaatgcaactattgtcatgttggtagctacagctgtctttgcacttttttctgaccttgatatcctttctaagcttctctcaatatccactcttttcatttttagtcttgtggccttggctcttatcataagacggtactatgtgagtggtgtcactagtaatgttaatagaagtaagcttattttttgtttggtcataattttgggctcttcaatagctacatctgtatattgggccaatagtgatagtaagattgggtatatgattacattacccatttggtttttaggtacttttggcctttgggcttcactccctcaagcccgaacacccaaaatatggggtgtcccattggtcccttggttgccctcagcttctattggcataaatatgttccttcttgggtctattgatagagcttcctttaaaaggtttggattgtggactggggctattttggtctactacttcttgtttggattgcatgcttcttatgacactgctaaagaatttgagaaaaaacagtcagaagatgggactaagttgagaaaagttgaagaaggggatgtgtcttcagcagttaaagatgagtctagtggtgccattggttctactgttcctaaaagttaagttagttaggtctatacaatgttttttttttttttttgaaacatatagaatttgcttttaatgttgtgatttatataa

SEQ ID NO: 2931 - DNA, 1421 bp, Cannabis sativa
aacatttatagaagattgcatgttgaatgaaagaaccaaagtagaagaaaagccccagctattaagttggctctttcctatattattattcatttatagtttttatctttaaccttaaaaccagattgtccgattacccattaaagcaactaaaaagaagagctgaaaacaatgaagaaatactgatctcccaatggaatgattcatcaagtttcattgttacttctgggtcctctactcactgtagggtgccttgtaaacttgatttccttgtttcactgtccttataaaatgaaacttaacatgttcaccttaccaaattgaatatgatattcgcatgaacagtactgaaaaccatggaaattacacgtacaggcaggtttttctatttcttcgctgctgcgctctccaaattcatgctctgaagattcaacaacaaatcttccgaattcaagaaaactttgttgccggagttggagatggtatgtgcaatttctctagcagcttctatcttccttagtgtgataaatgctggattgtttgaaatggcttcaccaatcagcttggcactcgtggcttcaccctggtagaataatcgtgacaaagaaatgaaagagtcaagcacattgcttttggagaaaagtaagtgttctataaacaaagaaatcggagagaagaatgcccatattcagaaacgctctagaaagctgaaagcccttgaccaatatatccaagtaggaaaagaaaagtgggtatcagttaagatgtgataaactgacctctgctctgataatagcacttttcttgtcttgttcagctttttctacaacaaatttagctctctcagcttcttgtgcagctacttgtttagcttcaattgcagcagtaaattcctttccaaaagttaggccagtgattgaaacatcatccaacgccatgttgaaattggctgccctttcagttaaaaccttccgtatttcccggctaacagcctatacaatcaacaaaatatgcatttaaccatatatcagagcactctaaaagcctcaaagcttagcttccatgaatcaattggctgataggagctattatcaagtaacacaatgttttgcaccggatcaatgtcatgatcgttttatcatctttattaataaactgatgcgtacctctctctgagtaatgagctggctagcattatattgtgcaacaacagttttcaaagtttcatgaatgattgaaggcagcactcgctcattgtagttttctccaagagttcgatacactgtaggcaatcggtctgcgataggacgcgtaagaacacgaagaccaatttttacctgtacgaaattaatcaaaaagccttattttcttgcacacaaaaaataacataagaaaaaaaaattacaacaattgtcattaat

SEQ ID NO: 2932 - DNA, 891 bp, Cannabis sativa
gagttccccttggcaagatgcaaaagtgctcttgctgccatagctttcatgttggccttagttgcagggtcttccagttctcttcccttaatgctagtacctgaaagtgaaagattctgctgatgattttgctttgtgttgccattgttgttcttcacctgattgttctggtttgcactattattaatctgttggagaggtttggaccctgtcttcaaggcaatggtattggtaacaacattatacatctgactcgggcttcgattacccaaaggatgagcaatttgattctgattctgcttgtcatccccaccattagccttgctaccgttgttggtgttggaattattgctggctaccacaatggcatgaatggatgttgttttgttaacagcaacggtgtacttgatatgttcttgaacagtttcgaaagctagatggctaacaagcaagcgaataatattgttctgagcaaaaagatcttggcatttcgggtaattagcggctagctcagatacagcccatgctaccatggcctgaaccttcatcggaccgtctttaaggattttcgcaaacacagaacaaacaccagcatgaatcatatgctccacactttcagggtcacgaccaagcagtccaattgctctagcagcgttctcttggccctcagcttgaccatctttgatcaatttcaacaagggtccaaccccaccttcctctatgatcagcttcccataccgatcattatcccgagcaagcgaaaccagtgaagccgcagcatcggatcggccttcaagcgaacccgtgtaaagaattgctatctgttcccatatgaagcatagaattggctcgttagccgcgatgggaggcaatcctaaatacccatcgtct

SEQ ID NO: 2933 - DNA, 6528 bp, Cannabis sativa
tttttttttttttttggaagaagggattgtgttgattacatgaagaatcttagtattaattgttagtaatattaatctcaaacttaatcatataatattccactaacagtagtgtgtggattcaaactaaaatcatacatgtttactattaatttatggtatgtatgttcatcatcttttacttgaacattattagcctatttttcattatgatggagagcactataggtttgaaataatgcattcattattgaggatgaataaatgttatctatttacacatggattatagagttgaatatatatcatcaagataattataacatttatttatcaaaaaagataattatgacatttgataaaattagggattcatttattaagagagatatgtctaaagaaacgttattattttcattctgatcatacagtgatactttttcttttagtacgtaacattagacatagtgttacatatattaatggtaaggacccaagactaaattgtactgataaaataaggaaaatttacataatatattaacttttgttatttttttataaaaatattgtcagacggtattttttacttttagactatgtttttttataagtttcatatagatttattactatacttaataaatagagatgtgctttgggcggagaattctatcctgttcatattcatgttaaccattttgattcgtatagatacatgcatatttcctattagggatagggaatccgagaatctttgatgttttaaaaaaaattattttaaaattttaaatataaaatacataattcatataataaattttcgagattttttctataataaacaaatatggacagtattttacatttatgccctagaaagtaaaaataaacataaataaaaaactaaagtttcaatttacaaaattactggcctaaccacaaaaaatagagaaaactcctccttcttcgtgacctagccgaaacaccctagtcctccaaatctccaacatcttcttttaaaatctagggaaatcagctcaaatcaagatgtaaatcttaaagaaaaagcaattaattaaattccaaaaaatccaaaatacagaaagcaaatacaaaaaaaaaaaaaggagagattccaacctccattgttataaaaaatccaaaaacaacctacaaacaaaaactgaaatcgtacagggcagagaatttgaagagaaggagattagataaacttcgaatcttacccataaacaaaacagagaagaaatcgaaagtacaaaaatttctaattatcctcttagtaattattttttcttcatagttaaaataattttttagattgaggaaatcaactaaataattaatgatatagaaatttagttgatctagaaaaataattaagaatggatcaaatctcaaaaaatactaatgcataaaattagaatctacagatttttatctagaaacagttgtatatatatattgttttccagtattataattgttgtttgggtataaatgaacaagaaccgttgaattaaatcttattcaagattgtatgccagaaaatagttgttttgacagataaaaatagtcgtttagattaaaatgttatttacaactattgatactaaaaacagttgtttataagttttttttagattgaaatagttatttgcaactattgatactaaaaaaatcataataaataaacaaatttcaggatatggaacttttacaaattttgatacagagcaatggccattgggatgacaacaaaactatattgattacgaatcaagtggagaattactatcaacagattgcacttttgatgaactagtgaaaataataatggaagaactacaatgcaatcctgatacaacacaaatacaactgaaatactaactaaaagaaggatgccgaccactacaaataaaagatgacaaaagtcagttgttctacataaagctattaagcaaagagattgatttcacatggtacccattgtgtgtgaacaaaatcagcaacacagagagacatacctttttggtacctgacctaacaatgatgtgcaacaacatgatgatgacagcatatggcaacacctcaacacaggcaggtgtgcaaaaacctggaaacaatccaacaacaacaaacaagcaacaactatctgcagcaacaattggatcagttcaggatgatgcttttttgctcaatactgtgactgtaacatcagagtcaactatacaacaaccagaaaataacaacaaaaaaactcctgcagtagatgaatattttgacttcaccgactacacaaagctcgtggctgcaaaaatggtacaacaacttgaaaacaaccagaaagaagaagaagaagaagtcgacaatatagaaataattatcatcactgatagacgacataaaacaatagaaaagggacaaatttacaaggacaaagatacattgataagtgccctatgctactttgtaatcaagaaaatattttaatacaaagtagtaaaatcttgcactaaagaatacaatattgtttgtttagactcaacctgcaaatggagtttaaaggcttcaaaaaatagaaatacagaaacattcataataaggagttatcaagaacaacacacatgtgtggtttcaataagatttggagatcaacaacaagcaactgcaaagttgatagcaaatttcgtaaaaccaaagttcttgaacctgaaaacaaagtgcagtcatgcagatataaaggcagaaatgaaagacaaatacggaataaagatgaattacatgaaagcatggcgtagtaaagagcgagcacgaagccagctacatgtaaatgctaaagaatcatacaatctcttgccaaaatacctgtacatgctacaaaaaaaaataaatccaggtaccaaaaaataaattttttggaatatgtttattaaactggaaatattgtttttgcgttgctaaatggttaaataacagttgctaaatattactgataccaataaatgatgcttaaattacgagaacaaaaattgacatagagaaacaagaagatgatagtttccaatatgcatttgttgcattaaatgctactattaaaggttggccaaactgcaagccaatcatagttgttgacgacacatttctaaaggttgtgtatggaggcacgctgctcactgccaacacacaagatgcagaataaaaaatatttccacttgcatactgtattgttgattctgagaataattaagcctatgagtggttcttcaaaaaaataaaggaaacattcgggattcaagaagaacaatgcctaatctttaacagacatgaaagcatcatcaaagcaacaagaaaagtgttcctagaaataacacatggctattgcatcttccacctcttgtcaaacctaaaagcaaaattcaaaaaaaaaaatgcaaaacatttcagaggtccattctttgcagcagcaaaagcttatacagaaatagagttaaaatttcatatgagggagctagacaacttggataagcgcataagactgtatctagaaaaattggccatgagaaatggtcaagatatcattcaaaaaataacaggtaaaataataacaattaattataaaaaaagaaaaatatatgatagagtatctgttattgaaaacgttgtttttggggtttttttagagttgcatattagttgtataaaacttttattgaggataaaaaactgtttaaaatacaggtactcaactatgacatctaacatagttgaagcacttaactcaacaaatttagcagacaaggaaacaccagtcacaacattaatggagtgcttgagggcacaaatgcaagagtggacatacaataatagaaaagatgcataaaagtgcacaacaaggctaacaccatcataagaaaaaaaacttataaggaactacgtacactcattgtgattaactgtaagttgatattatacgttgcatactctaaactggaaaagttgtttttatatagttttttgattgtattaaagttgctttgaaaaacatgcaggtcaagccagcaaatgaaaacctatttgaggtgatagatgaacacagaacaagaatagtaaacttgaaagacaaaacatgcacatgccatagatttcaaaaagatgaaatgccatgtaaccatgcagttgccgtcatgaaggacttgaacataaacacatacaactattgtgcacactactacacatcaaaagcattaatgtaaacatatgaagaaacagtatacccagttgaaaaccttaaagaatgggatctgccaaaatttttcgaacacatcatagtgttgcctcccaaagaaataatcaaatttggaaggccaaggaaaagaagaatgacgatatcttgggaaacaaaaaaatagaacaagtgtggcaagtgtggacaaaagggacacaacaaaaaaacgtgttgaaaaattacaatagagagctaaaaaaacaactattcagcaactagaaaactactatagtgaaacatttagataagcatacattttttttcattggttgtttcattatttttagatggaactttttatttgctaaaactttttcaaacatattgttgagagaaaatagatattatgatcattaatatagaaatgacataaatattatagttaagagataaacaattgcttgattcatcaaaagcaggttgtaaataggttgttattaagatgtttttctgggtaaaaaagaatatatcgagtaaaaaataaaatgtaattataaaataaatacaataaccatataaaattacttacagaaataaaaaaatttctatgactatcaacataatttaattataaaaataacaccaactgggagttaagtctccattatatacaaaagggttgggcaaaactgcttaactaaaagggagagagaacaaaatgctcgtttactccctaatccacgagcattccaactaataatgctcatgactccaggcgagtacgttgagcgtcacctgcctcttcaacttgcccttcgttaagagcttttgctaaattctgcgtgcgtttgagcattttccgaaattcctttgcattaagacagtttggccgcttcagtttcaccttacgtgtggtagtggaagtgggagctggagtcgtggtagacccaatagcgaaatagaggggctgagtggaggtgagatctgtcaaaatggtggaaaaagcttgagagacaggaacaatatggtgattcacacctgttgtggccataacagtagcagccgtacgtagtggatgtaggcttagggagtggttgctcggcagtggtgacgggcgaagaagggacagtgttattctttgtagtttggggatgatgaagggatgtgggaatgtcaagggatggagctaccactgtaggaggggctgaagtgaaatgatgagcccagagagaggttggtatggcagggtgattcaggtcttgggagtgaggaggcaaagcattatgagaagagctagccatgtagaaaccaatagatgtggtttgtgggtggcccaagtgttgcacaccataatcagaggtaggttcattgaaggggccttctgagatgataaagggttggtgcaaacgatattgatgtgtggaacccaaagaagttgggctagcaatgtgtggcctaagccaagtacgtgtactagcaatataaaagggattggaggtgatgcggatcttggcttttaaagaatgatataccgaaacattggtggagccgaagaggagtcgcatgtagcaaggaagtcatggcagtgattcacaatgttgctcaggcagccgcaatagtgacaaaaattggaaagattttcgaaacgaaatttgagccaaaccgggactgccattccatggaaatgaaagcgagtgccacggggtaggggttaggttatatcgagctcaatgcggacacggaggtaagggccccaagtctccttaagagaagctgtatccacttcaatgtatcgcccaaagacttcactaagtcgttgtgcaagtgcacaagatcgtttaagaaacagtataccaaaaacggtatacgcctctcaacttacatgtatatataaaaaattctgatataggctcatctatcactaaatctatctattatataaatatatatatatatatacaatatatataggcttaattgtttgtagatttatctatgtttcgtttttttttaatcttttaattgtactttaaattactaacattattaatcttttattttctatcatgtttgaagatatctcttcatcttcattttccacatctagtattgtatattgaatttgctattgatttattttttttctttcttttggctagctattctttatataactttctcactttctttttttgtgcctggcttgctggctgttgttgtttctgtgtttgtttggttatggatttaatcttgtgttgattctgttaatttgtttcaat

SEQ ID NO: 2934 - DNA, 795 bp, Cannabis sativa
tcaaaaactaacagaaaagtataaccaaaacacccaaagtaaagaagatttcagccatcaatgaaagaagaaacctttcctctccttcctaccaattactaaaacttttaccaacaaaaggatactgcgctttataaaagtataggttggaaatagccttgttttgtataagtaatctgggagtctaaaatcaacagggcttcctatgtccttgagcaacttgttgaacacattctcaatgtgattgccttcagaattctgataacaaacgtataaaagacttagaagaagaaagaaagaaagaaaacccacacaataaatggcgcgaatagaaagaagctacaaaatttaaattaaacaacaaccttcatcatagcaggcatggagtaagatccacaattgggtacttacgcagataaacaaaatgtgttcaccgaaacatggttacctgccaaaaagaaaaaggcacaatttcatgaccgttgactcatttctgaactacatagggagtgagttctgagaaagtgaaagaattccgacattcaaattcaaataataaagaagatggaagcagtacccgatggagatctatgagagagagagtgaaacccaatcagagagagagagttccctcccaaactctgtttactagacaagtaactgaaatttggatcagatttacccaaaccctaaaatccgccacttgccctttccccttccccttcccccagccatatgggccaaaatatggttccttgtgggctaccaaatccgctttctacgcttgattttggg

SEQ ID NO: 2935 - DNA, 1447 bp, Cannabis sativa
tatatatcaatatttatcttttgatttgaatgctcgaaggaaatttaaataagttatttacaaattatcttttgaatgcaatatttttctttcgaattcaatatttagaaggtctgccccccagaaacacccaaggctggttctgccaatgggtgcctgcctgagcttttgctaaaacttcttaatgagataaataaacttgattatgagtgcctattcagtgagtgggttggggttgcagtctgtctcctgggactcctcgatcatttgggggtatgaaatgacttaaatgaacttggcgtgcgactgcactttcatgccttgtaggtaccatcttatatagagtgccatttctgtgtatttgatggtgtgaagtcagcatggcctctttaaatagtaatcaacccatccacaggctactaacatgtcaatctgacctaacgaataatcacaataatctgtgttttgaatctggtgctcaattcttgcagttttgatccatccttgagttacgaagagcgtgaaaaaaggatgaaacaagctaccgggagagctggttttgtgcaagatctgttcctcacaacactgttaggagactaattgaggcagaaaatgctcttgaataataggaagaaagttatttaaagtcctccttataagggataatttctgggtggggattgaaatggttgtatgtaccatgtaagacaacccaaggtgtggttgggtacgagtaaatgcagcatctagacactaaaatcaatgccaccccattgatataaccccatccatccccttttaccatccttaacctgaagaacacatggtcttttttaaaattctagggaagacctaataattctgtgatattgttaagttactacctaaatggtgaaagaagaaaaagaaagagaaacttgatatgttatttatgtaattgtattgttttactagttgacaagtgtgaaatttgagttgtgtcttttacctttgttatagttgaaaaactacaagtattgtagggcaaatatcgaaaatagcagatgtttatgctttgggatggccgatggttggaacatttaaccaacgacaataattaattaaatctgatgcttttgattgaccatcattatttatgaaaataattttgtatgtctcagtcggtgggcaatgtaggtggtgcctgccacacaagttggataatatagaccaaaattgtggtccatcatctcgtaagaattcagccattcattgacagcttaacttaaaaagtaacacaacctgtctttcctattatttgagctagttaataatgacacatttttttcttccatagatttagtcagaaacattgcttttttaacattatagcttttatctaaataagaaaacattgataaatattgctatacatttttatttatgattattaaatatatactataat

SEQ ID NO: 2936 - DNA, 1543 bp, Cannabis sativa
taaagctcccactaaacttcgataagttgtagcatcatgaagtgattcaccatcataacgagagagtggagtgagagccattggagtggtgactggcttagcatccagcagttgtgttttagtgagtagatctcgaatgtattttgtttgagagagatgtaaaccagccgaagagcgatgaacctggatgccgagaaaatagtgaaggtggccgaggtccttgacagcaaacttggtgttgagaaaggttaaaagagcatcaatcatggcagtggaggagctggctatgataatgtcatccacataaatgagcaagactatcacagcggtaggagatcgataaataaacaaagatgcatcagcttgtgaagcaacaaagccccactccaaaacagcagtactcaacttgagaaaccaagcctgaggtgattgtttaaggccataaagggatttggtgagtttacatacatgattaggatgttgcgagtcaatgaaaccttcaggttgagacatataaacagtctcggtgagatcaccatgaaaaaaacattttgtatgtcaagttgtttgatgacccaattgtaagagatggctaaagagaggaccaaccgaatggagttcggtttaacaaccgggctgaaagtttcatggtaatcaaggccctgtgtttgatgaaatcccttagctaccaagcgagccttgtagcgttcaacagtcccatcagcaagaagtttaattcggtacacccatttacagccaatgatacgaaagccaggtggaggaggaaccaaaacccaagtgccttgagacttcaaagcaacaatttcagtattcatagcttgatgccatttggggtcagcaatagcttctttaaaagaagatggctcaatcggtgtacctgcagcaacactataaaacaaacgaggtttatgaattccggatttagcacgagtaaccatgggatgctcattagtaggggcaatggaaagttcacgagggccctgcaaatcaaccaagggtgggatagtaggaggagagacagttgaagagaatgaagtagaagcatgagtgtgtggagtaggaggaaaaggtgagtgatgagaatcgggtgaaggaggagtggaggtgataactgctgctggttggacgggttgagtagtgtgagatggagtttgatgagagtgatatgtgttgggaatatgggcagtagaaggaaccgagaagggaagggatgaaataatagaatgttgtttttgtgatggtggagacggggaagtggcagcagcaaaaggaaaacaagattcattaaaaataacatggcgagtgacaaaaaggcgcccagaatttgattgaagacatagatatcctttgtgtttactgctgtaaccaagaaaagtgcatggagaagagcaaaattcaagtttgtgatggttgtagggacgaagcaaagggaagcattgacaaccaaaaacacgaaggagatcataatttggcgctttgtgatagagaagttggtaagggttggtgtaccgaagaacgcgag

SEQ ID NO: 2937 - DNA, 1722 bp, Cannabis sativa
ttatatgcaatgtcccaacaatttgaactataatcatgttattgatctgtgcagctctttctgaagcatccgtcatagtgagggagcatacgccaatgaccaatctgcttatgtgtttgtggttcaacgaggtggtgcgtttcacttctcgcgatcagctgagcttcccatacgtattatggcggctaaaagtgcttaagaatataaatatgttcccagtttgcacacgtaaggatcttgttaatagcatgggccatttgcgcaaggctaagcctttgattcattgaatcttagttctgcagtagtgtttctactggtgtaaagctaagggagaaactttgagggagttagtcattatttgttagtatttgttttggtaaatttcatttatcattgatttctttcatttattggaatttctcataattgattaagagggattcatattggccttttgaaagacacgaaaaaaaattcctgtacaatggtaaatgactgtgaatcaaattacaaaagacattagctataggaaaaacgacagaatattgtagtgggatatcaaattcaaaatctgaccaaaaaatagaatattcaatttataataaaatcggaaaaggacagtcaacaagtaaacgaagtgatggtgattgtggaattatacgttgaagtagttggctcgtcatgacacttcctaacaactctgtactgattcgatgagtggagttgtttatgatatgctatggcattcgacaaaagcgggtttaggaacagccttgtgaaatcattctggggtggttatagagatcttaagtggattagttgtcccaaaacactaaatggtagctctaaatctaataaagaaaccaaaaaccaaaactcaggtaacatctctcggcaaagatctttccaattcaaattcatgatgtggcctaggatcattttctgctcttcagtcctattggccgtattggttgtcattctcttagccatgttttcaccaataccagacagtactctatcaaaaaaccacacaaagccgccttggctagccttgtccttgtacattcagcagccaaaagtcggtggaatcgacacgccacctgttgtgcaatccgacgctcaaggagctttcatttttcaccgaatactgactgaagggcctgaaaacacgtctcgcgtggtaggaaaagcgcagggcatcataattccaacagagcagtttgcacactcaaatttcaacatattgtatcttagctttgatacggctgagtactctggtagtcttagtgttgaggccaaacatgtggcacacaaagacgttgaagagctcactgttcttgggggaacgggctcttttgcttttgcgcgtggactcgctgtttttggtcagagcacttccagacaagataaaacatcatcatcttcagatgatcttgatgccactacttatcatgtgaagcttcagcttaggcttcctaatcaatctagaagttttactattccaggtccaggatgaagccactcattagatttatatatttattcttcaaagtcttattgcgtactataatttttgcttcattgaggattatgatcgaaagccagttgttttctcttcttcttctcagtattacaacgtttgagatcaaatgatgtaattacaattatatattaacatgagtagtcttcgacgtatcgttatataatttataaactaacact

SEQ ID NO: 2938 - DNA, 3076 bp, Cannabis sativa
tagttaatatattcaagataattgacattaaaacctcaagagggaaaagagtgtgagataatatcattaatcataagagttttttgcaaaacagcactaatacaatctgagtggccagaccaccaaacataatgatcattacctaaatgacatttttcatatacccttacattataacccaattaataagtccttttgattttaacatacatgttgttgacattagtggataagactaagtattgcaagtttattgataatcgggttgtagacactggacatgatggattgatttcgagcatgtgtattaagtttcaatggtttttgtcatttgcaagttatatttttcttttcgagtttgaatactaaagttgagtattgggagtaatcagattgaaaatttggtcttataacaattgaatcatgtgagtattggtggtgtggtgtaaattgaagtaaggcttgctttgtgttcgtttgtttttagtttagtgttgatttttactcgagggcgagtaaatgttaagttttgaggagtttgatagactagttttagatgcattttataaagtattttagaggtgtgttttaattgattatcttaattttgtgcaaaattacgcttgttttctatttgtttcaggtttgaatggtaaaattcataatatgaattaaaaatgagaagaagcgtgttaaatgatatgaatatgacaaattatcaaggaatttggagttctattatataagtggtaaaaaattctaagttttggatgcttaacatgttccgtttgtgatcgaaaatttaagtctgaagcttcaagccaatttttgactatgatgcattcattttgaggaaaaataatgtgaataaaagttctagatctctctttcagcttttcaatatattttaaatcgtctaatttcgagaaatattgaaagagttatggtcaaaatattattagtcgtggaaccaagaagcttgctgccaaaaatcaagcttaaggcccacctattctaaactgcgaaaaattagattttttattttttttagctatataaaagccctttttcaacacttttcaacaaacgactttgggagtacgaaaattagaagcgagaagcagccctgcagacatttatcaatatttctcgacaagttcttctcttctacttttttttaaaaaaatattcttaattaattgtttttagttatttacaatgattatgagtatctagacttttttattagggtgttaatggagattgtttgatactttattttagttttaatgtgatttaattctttcccaattttcaatgtttcgatataagacgagtatatagtttatgtagcatttaaaattttatgcttaaagcctccaatgtgtttaatttatcacgagagtagaaaatttacatatatgttgagatttataggtcctagcccgaatataaatttctttagtaaattcgctatcacataaaaattagaatttgagaattaaattatgttaaaccatataaagtagatacaattaaaattaatcaccctaatctttaattattgttaattttaccttaattatttgtttctttatgtttttagtagaaattaaacatattttcttatttttattgccaccaaatagaattaggaatttaaatatttggtaattaactatagtccttatgggatcgacgtcactcttgtgagtctattacatgttgcatgttagaaaatcaataacaaaaagctcgactactaaggagattaatctggagtgtttgaatcagggtaatcatctaattttggagtaacaagtcagtttattaaggccttttagtaagaatgatgtgaagaatacccttttcagcattcactcttctaaaagtcttaggttggatggatttggatctggttctttcaaagggttatgggaaaacattgtaaataaaatctctcattctgtgttagagtttttccaggatgggtttttgcctaagtctttgaatgaaacggtaatctcccttcttcctaaggttgatgacccgaaaacagctagtgattacaggcctataactacagcatgttgtaatacactttataagtgtatttcgaaggtgctctatacaaggctttcaaaagagcttccctttcttgatcacagtaaccaaggggctttcataaagaatagacttcttgctcataatattttgattttccaggatctcctcaaaggatacactaggaagaatatttcagcgagatgtataatgaaaatcaacctaagcaaagcttacgacacagtagattgtcactttgtggaggagctgcttaaacatctttatttccccttgatatatattaattggattataatctatttgaaaggaatgagctacaatctccttatgaatagaagaatttagggtactttcaaaggggaaaaatgtcttcgtaaaggagacctcatgtctcccctcctgtttgtgctaataatggagtatcttaccaaattattggcccaaagtttcagtaaaaaaagagtttgggttccatcctcagtgtaaacatcctaaggttaactaacctatgctttgcagatgacttggttatcttttgtaagggcaacaccaattcaatgagaggagttcaagaagatttcaagaagtattgtgattctacaggtctatttgcgaacaaaataaatctcatatctactttggaggagttaaagaggacatctatattaagattattgatatgatgcaaataaaagaaggatcttttcctttaaaatacttaggggttcatcttcgttctaaatagaaagcttcagactgtggggtgatcttgaacaagctgaacaagaatctcaattattgggcgagtaggaatttatcttttgttggtcgtgctcaattaatccactcgattttgcttggaatcagaaatttctagatgagtatattcattcttccttataaaattacagctgtcatagataaaagctgccgtgacttcctctggggtgctaaggggaataggagtaagcttcatctcccttcttgggag

SEQ ID NO: 2939 - DNA, 1583 bp, Cannabis sativa
ctagatttgattagattagatgtagagttaacagttcaaatctgttgactttcccactcaaaccgagaattagctatacagtttgagttttattttgcttcaaaattctctttttctttgtaaagaatctgtggaaattagttgtaagtgttcgatcgagcttagtcttgattactatggtgtgtattgatcataaccattgtgtgtgtgtgtgtgtataggccagtgataggttcaatatcaattcccagcttgaacatctacaagctaaatatgttggtactggccatgctgacttgaacagattgtaagtgttcttttcatttcttttgtggccatttttgtatcattatgagatgaaatgagatgagatgattgatttttcaatgggattttgtagtgaatgggctgtgaacattcaacgtgatagctatgcatcctatgttggacattacccacttctgtcctactttgctattgctgaaaatgaatccattggaagggaacgctacaactttatgcaggttcttctctttctctttctcttgtttttatccgttacttagctaaatagtggtgatcacatggggattcaccttccagaagttaagaaagccactagaagaaaacttaagcccccactgagccaaagaatgagctgcgatgtttgaggctctaggagtccaacagaggtgaaaattgttaacattaagaaaagtgcaagcattagaccactcaggtggtctcctctccctaaccgactgaacaagcacagaacaatccgagtgaaagactccctcctcgagtcccaaatcagttaccagctattaagctttaaatgccaaaatttcactcaaccactaccgaactagcaacaatattttttagcataaagagccttgacaaaaccagagctatctttgttcctctcttgttaggttacaagaaagcaatttagctaaattgaactcacacaacaaaagaacctatctcatttgttaattgtgatgttgccacttctataaggaattccataccattgctattgctatgttttaatgaataatcatgttcatttcattctaaccctatgtgtgtgtgtgtgtgtgtttttgagtcatggcaatatttaatatacctactagtggacttaaaattatgtctccttctctttaacttttgtcaagtgacaacatcagcttatatctgctcaacctttaattaactgaactccataaagagatatcaacacacttccttccttccttctggttctggtgcttatgctttggtaatccattggtgatatttggaacttggaactttatattgtgatctaaagcaaaaattaaatgtatataacttatcataactgcatggtgattcttctcaatttatggattgtaatgaaaatcttactgacccttctttcttattttctatgcagaaaatgcttttgccatgtgggcttccacccgaaagagaggacgactgagattctgtaatgagagatcaagttaaacagtttaatctccgatcatctttaatctgcactttccatttcaatttgggaaatctgttgc

SEQ ID NO: 2940 - DNA, 1906 bp, Cannabis sativa
aaataagccattgttgacaactaccaaaaccaccagctccaccaactccgtaagccattgccgctttctcttccaatacccaatacctttctctttcggccaaaaaccttcatctgggtcttctcaaaatgcctccttttgaaggtttagcttctcctccgtacagttcagagtctaacatagtcaccattgatgtgggtggccagctctttcagacaacaaagcaaacccttgctctcgccggacccaactccctcttcggtagaatctccgattcatcttctcggcaaggtgttccgttcgttgatcgagaccccgacttgttttccgttctactttcgcttctccgaactggcaatcttccgtccaaagccaaagctttcgatgtccaagacctaatattcgaatcccaattctatggtatcgataaccttttggtcaattcagtatcgaacccgtctcagtttgaagcctttaatctcgagaaatccatggttttggccttgaacggccgtgattctccctcagtcatcgcctcaacaccgttcggatcgctccacgtggctcacggcagcaagatcacgtctttcgattggtctctgaggaagaaaaataccatcctgactcaattcacggcagtcgattctatgctggcgatttctccgtcggtggtggccgccggagctacggatttctcagggctccagattctcgatctcgaaaatgggttagtgaaacatagtttgaattgggagaatgtgactcggtctagctcaacggttcaagcaattggttcttctcctgagttacttttcgttagtttcgaatcgggtcgtaggaactcgaattcaattatggtttatgatttgaataccttgagtccagttactgagattggtcactgtgagatttatggggcggagctcaactcagctattccatcgacaaagttgagttgggttcagggtaggaatttgttaatggcttctgggtctcatagtggcccttcaggagtttcaggggacataaagttttgggatattcgttctggtaatgtgatttgggatctgaaagagagcgttgattgcttctcagatgtcacagtttcagatgacttgtctgctatgttcaaggtgggtgttaattcaggtgaagttttcttttctgatttgagaaacttaggagctgagaatccatgggtttgtcttggggacaagagaagaggatttattcatgggaagaaggaaggcgttggttgcaagattgaaagccatggaagtcaagtgttttgcagcaaaggaggagatattgagctctggtcagaaatagctatgagctctaaaaagagaagtgaagaagatgggttggaagagagagtgtttaggaagaatttgatggggaaagtgaaggacatgggtggtaacaagataaccaatttgggatttggagggaacaaaatgtttgtcaccagaaaagaccaacaaactgttgaggtttggcaaagttcatctagaggattttgatcgtataaataaagcttaattttattaattttttttttatcaaacaatttgtaaatacacttcttttgtttgacaatgatattgtgatacgattcattataaattaatttttttaatataaattttgagtaattaataactctgttctagttggttctgcaattttcataccctatctatcttactctatactgatagtgataaacaaaattatcaaagtaatattataacttaaaagcatgtctgggatattgctgtcactcgacctttattgagctttaccttctcttcagactcggcatattgttgtctttgctgggactttcatgcttagccaagccagccaaattatctgctttacctgcttgttttgctaaagatcc

SEQ ID NO: 2941 - DNA, 940 bp, Cannabis sativa
aatttaataaaattattaattttcaaatcatttgttagcaaattaattgaaaaatatatataattataaacaaatgtcaaaattataatacaagagacaaatgtcacttttaaaatttatgggacaattcacattaaaggagacatttaaaattaatactttattattatttaaatttattgtattacattgtagtggtagcaggtggttgatgttttattaaactatatcaaatcataaagagattaacaaattttgtaaattcacatgtaaatctgatatggtcatgtggacaataatgacaattacatttttttagtttcagattttaaatgagatatacataatttaataaaagaatgagacacatatagataacccactaaacttaaaaagatatactattttctctttacttaataaaatagaaagtccaatacagagtataaaaacatctattacttttgataagatacactttacaatctcatgatcttatgactttaatacaactcataccctcatcttattttctttttatttgggatctttttgttattatcgtaaatatttcagaagtggcttaaattggtttcaaaataatgatagtgttacaaattgtagtggcaggtggtgatgacttattattataataattctatcagtcaatagtggctgtggaacatgtgtaaaataaataattttgagacaagacagggcaggtcatatcaacttggaagtgggtctcatgctcttatatttatctgttttttttttcttcttttttctcatttcctttttataaatttctttatccaccgtctcaacattctcgtctaaactcaaataaaaattatgacctgtttcattacaactctgcccctacaaaagaatcctattctcatataagtaggggtaaaagcaataccaatctattcag

SEQ ID NO: 2942 - DNA, 815 bp, Cannabis sativa
gtaggatcaactatagaacttcaaaaaaaaaaaagttttttctctctccttgttctagcagctcctcgacctggtgctatggcaaaaaccaaggctaaggcgcaaggaaaactgaagatctcggcgaagaagacaaagaaatgtggaccttgctccacctgtgatgctcgaaaaacgaagactatggaggaagtgctgggtgtagaaccattggagttctcggaggaggaggaagcgcatcatatggagttgcaacctgatatagaggacgcaacaatatatgatgtatttcctgctccattaactctgagatcgtcaatgaagagcattctacaacaagaagatatttgaatagactttaatatgtttatggctgctctacttaatcagctcgaggtaataatgttactccccctgtactcagatctggaaacattgttaaaaattcaaatgcctattttacgaaatctcaagcaagcagcaaggtgaaaataaatatggaagatatacaagaggaggtttccttctggaaatcttcaattgtttgttctgtactgggtgccaatcctcatctagctatgttagaaggatttgcaagaaggttttggaaggataaagtggataaagttgggatgcttgcctatggagtcttcattattaggttcttctctgctattgaaagagatgccatccttaaagatggattcattttcttcaactaaagaccagtcataaggacaccttggggccctgattgcaacttcaagaaggaggatatttgcatggtgccaatctggatccatttggatgacctt

SEQ ID NO: 2943 - DNA, 2849 bp, Cannabis sativa
aaataacttgatgcttgttcactctcccaggggaatttgccatcacaaggaggcgtacgtgaggaaggctgctctttttgcagcttcttgcgtactgtcatcacttcatccgtcctacattgcttcttctttgactgaaggaagtcttgaaatttccaaagggcttgattgggttcgcacatgggcccttcacgtggccgaatcagatacagatagagaatgctatatggtatgccattatatctcctttgatccctcataatcttaagtacttatatcttcaccttcatgatcacatgtatcttttgttatcagatggctatgacatgtctccaactccatgctgagatggctctccaagcttcacgggcaatggagtctattgaaagtacatccaaagtggaaaatattggtcttctctccagtttgtctaaggacactataaaaatcccttactccagtgtaaaatttcattaatttttttttatctaatacttgaaatcaaaattactaatctcttttgtatagttaaaaatacgtgttaactttcttttgaacaatacccaagtgttatataaacttttatgtggttttctaaaaaatgaaaaaacagaggagaacatggcccacagtagagtctataatgcaactaaaacttaattataagactcatcataacacattgtttaggaagatcaaattgcatttcgttttatttgttattttatgtttgttatatgtgctgtaaaaaataaaactgtaaaggagatacttattgttaagataaaacacaggaaaactgaaataaaagaaagaaaaaaaaaatgatatgtttctttttgtcaagtgtgttatgttttcgttaactttgctattaactagtggccaaggttacaaacaagaaattataataataattaataacttatatatttattaccacaccttaagcaccttcagttgataaatgatcaattaataaaggaccaagtgtcatttcctagctgtcccaatactatttcggtataatgccaaaaaccaacttttaaggaaataagttggcatacataacatgcataaaaatccccaaaagtgtatatataaatattgacaaaagacacaaaaggattagatttagatacaatagaagagagatggtcaacactaaggtcacctctttggtatcaataattacttttgttttcatcttctttgttgagttatctgaatctcaaaagttagcaccagcattgtacgtgtttggagattctaatgttgatgttggcaacaacaacaagcttgatattagtgctaaaacaaactatttaccttatggcatagattttcctggtgcaaccccaggcaggcccactaatggttacaacatagctgatttctttggtaaggaacattttcattttggttttaattttttttcttctttcttttaaaccaaatgattttcaaacacgaccttttatattttttattaaaaaattataaagaagaaagaaaaataaatatcgttttgagaacattatggtgtataatattaaattttcttaaaatatacataaaaaaaaattataaaaatatagtatttgtaacaattttttacaaatttgtaaacatttacaatacaatttatatttacgaataattatttaccaaaaaaaattgcatttaggtgatgtttggttgggagaaataaaaacataagaatgtgaatgtgaatgagaataggaatgaaatggaataaaatttaaaatgcataacaaaattgataaaaaaattattaaattttttcttatcatgaattggaatagtctttccttcaattttaaaatgaaataaccattctaccaaaatagtagaaaggtcattccactggaatgacattctaacactttaataggcaaccaaacaaattagtaatggaatagagactacaaattagtaatggaatagagactgtttcctttcttttccattctattttatcacaccgtatatttttcagtatcattctaaattgttatgcattttgatagttccccttccccatgtttttttttttttttccatttatttaacatttttttattattaaaaaataagaatattgtttataataaattatataagtttaattaatttataaagataatatgttaataatggtgcagctgaagcacttggattaagtgtaccacctccattcaattccattaacattagcagttacaccaatactgaaggtctcaactatgcctcttctatgtctggaattcttgacgatacaggcactgctatgtttgtaagaataaattaattaacattatcttccttatataatattgtataaataaataattattatttctaactattaataataatatattatttgtttaatgtgataattaatcagccaggtattacaaccttaaggggacaaattgagatgttcaaaaagacagtgagagaacagttaagaaaagttttaaagaagaagaatggagaagaagtgaagagacacttgtccaaatccatagttttagtagtctcaggtgtcaatgactttgctctcaatcttcttaggaacgaaagaatggatcgtcgttccatcgatcatgatgccttttcacaagatcttgttcaaaaatatgctcatcttttaatggtaattaattaacaaaatttgattacttaattaaactccaatatatttaactacaagaaatgtcatttttcccagcgcacatttgtagtggttaacatttaatttttaccagtacatttacgcgatggtaaaaatcatttttgtcagttcttttcattttgtgctg

SEQ ID NO: 2944 - DNA, 1217 bp, Cannabis sativa
tggtttctcataaaatttccgatgtcttcacggccatgtagccaagtaccatcgctctccacactttcaatcttgtttctacgcctcctaattaccgttgaggcgtggaaaaattttgtgttcccatcccctttccgagtccagagctcccgcgacttttgtttccaaactctttccaaatttgcttccatttccatgatactcaactgcaccgaggcttccctttccaaattttccttagttggtgccttattttgaatttccactagctcccttttaaagtttctcaaattctggtcacagaagccgaaagactcttgattccatttcttcaaatcacattttgtcttgcccagtttctgtaaaaggactttatccttcctccccttataatcacatttccaagcccgatcaaccaccttctcacaaccaggactcgaagtccagacttccagaaaccgaaagggatagttaagtcttcggtgttcttcaatggtcgatagcacaataggagaatgatccgaagctagaattggtaaatttgtcacttttgcattgggaaaatgagtacaccaagatgcctccgccagcccccggtcaagtcgcttccgaacatttttcattccctttctagcattgtgccaagtacaccggaccccatgaaaacccaaatcaacacctcccgtttcatccaaaaattccctcagaaacgccccctcccgtctatggaattcccttcccccagatttttctgaaccttccaaaattacattcagatcacccaagacaacccatgactccctcaaacctgaaacaatttcagtagcccacttccaaaactcaactttctcctcagcatagggagtcccatataaacacatcaagtgccagcccacatttccatgacttgcaggaacataagcatgaaacccagccgcaaacacttcttttatttcaattaaaccaacttgtctccacgccagacaaaatcctccaccaatacccaccgaaggaatgccaaccacattaggaaatcccaatcgattcataaccatcctcacatcctcttctcctaccttagtctccgctaaaaaaatcacatccacattgttttcaaggattaaactccgaagagttctctccgtcgtgggtctacgaatcccacgacaattccacgataggcacctcatagggatggtgggggcatgcttgaggcc

SEQ ID NO: 2945 - DNA, 1791 bp, Cannabis sativa
gttgagaagcctaaattcaaggccagattggtgggaagaggttccacacaaaaggaggggattgattataatgaaatctttctcccctgtagtgaaacatacctcaataaggctactgctcagcatagttgcaactgaagacctagagctagaacaactggatgtaaaaacagcttttcttcatggagatcttgaagaacagatctatataaagcaacctagaggctttgaggtcaagggaaaggaggaccatgtgtgcttactttaaagatcactctatggactcaagcaaagtccaaggcaatggtacaaaaggtttgatgactttgttctaaaatctggctttaaaagaagtgcctatgacagttgtgtctatgtcaagaactctaaagcagatgtgtatattcttctatatgtggatgacatgcttattgcaagtaagaatatggaagagataacaaggtgaagaaggttttgaacaaagaattcgaaatggaccttggaccagcaaagaaaattttgggaattgaaatcattacagacaggaagctgagaagcatcaaaccggctcagagtggatacatctcaaagattctgaatagatttggttttagcaatgtgaaaccagtttctacacccttcacacagacatttaaactcaccaaaagtcaagctccaacaatagatgaagacctcagttatatggagaagataccctacaccagcatagttggaagcatcatgcatatgatggtgtgcaccaagccagacctatgctgtggggtaagtttgatgagcagatttatgagccaaccaggaagagagcactgggcggcaactaaatgaatcctgggatatctaaaaggtacctcagaagttggactaatatatggagcaacaaaaggaagaaccaatgtaattggatatgcagactcagattttccaggtgaccttaatacaaggagatcacaatttggatttacattccaattaaatggctgcactattagctggaagtccaatttacagcccattgtagctctctcaacgactcaggccgagtacatagcatgtacagaggcagtgaaagaagcagtatggctcaaaggtatcactggtgaaatgggaattaatcagaagtgcattactgtactttgtgatagtcagcagaaaccaaatgtttcatgagagaaccaagcacatagatgtcagactacattgcattagagatatcatctcaagtggcaaggttcaactgtcaaaagtctccacaaaggacaatgcaattgatgctctaactaaagccttacctacaacaaagttctctcacagcctcaagatcttaaatgtagctaccaattgacttaagattgcaatgtacagaacactagttcaggtggagaattgttaaatctatatgcctaggttctatacacatgtccatatgtctttagtcaattagttaggtagttagttgttaacaggttcagcagttaagtctgtaacttctcagtcttaactcgagtcttaacttgagtatttaagtattctgttagtagaggtatttagtctataaatacctctaacttctaaactgtaaagcggttgattctttattgtaaatactcaatacaataaagatataatttcaccagaaaggttttgccttgtgtgtgtgtgcgtgtgcttatgttctatgagttgtgagtgttctcgaattgttcttggagccattcctagcatgtgagattgagctcgaattacaacaatagaaataggaatgggaatggg

SEQ ID NO: 2946 - DNA, 1518 bp, Cannabis sativa
ggataccatttcttttaaaataaaatatttttcaggcctgacgattgtgggaacttggcggtgtggtcagaaatatcatgacagcaaaggatgaattattttggaagtattccggactagtttagagttttagagtgtcggattggcgggattagttagaattaccaaattacccctaggtatgttttatgtttaagggcttcttaagggtaaattggtcatttgaggatgttagtagttttttgtgctatttgaattagtgctgatttttattaatgatattatttaaaaaaagaagagtaaggaaataaaagtgaaattgggaaaaattggagtcatttatctagcgcattctccttccctctttgagcagccaagaacaagcctagaaccaggggatttctttttaaattcttcttgatttctagcagaatttattccctagctcaacctaaaagccttgaggtaagttctccccatgtgtatttagattttttcaagttttaaagctagatttggggttagggtttggaatttcgaggctgtattggtagaacaagttaggatactgttttcaagttttattttaagtttgttagagtttgatttgattgaagtagatggttgtggtgttggaattagaaaattgggtttttaaaacttaatatcttggtttaacttggtgatttgtttaaactttgcctttcaccttaggtagtgagcttatgagttcgattccctaaacagcaaatggccagggtgtttgcatacttttgagttcatttggggaagctcttgtattttggacaagctatggaatttttcacactttctcacgtaatacattgaatattttgtcttttatggccaaaagtaaaattttctcgagatcttttttgggaggcttttcccactagcatggttgccacaaaagctctcatgtacctaaaccatgagaagttcagcttcttccttctcgacacacctcaatagtgccaatgagaagtttcttctgtatattactctatccatgatgatgaagtgagttacttttctcatcagtctcttagctttgttccggttagttggaagaataccttgttttaagtacgatgcaatcagggtcatccatgatggagtgttatcaataatcaggataggctttgagtcttcattaatgctccatttggcaaggtatttgatgagaactacactaagagtgtcaaaatatgtagtgctagccagtttggctagtgagtctccgttgacgttatgttcacgcaacacttgttggatggagtagagattgagctagactaatagatctttagcattgcttaagtatacaatcatatttgacccttaggcttgttacttgccaagaatcgaattaacaactagtagtgaatcactatagatctcaagttatttggctttgattgctagtgccatcttagtcccgctaggagtgcctcatactccgcttccttgttggttgcggtgaacttaaactataaa

SEQ ID NO: 2947 - DNA, 715 bp, Cannabis sativa
ggggctcataaagcgcagcgcttctgacacttctttggcagtaaaaggacacagcaggaagtggttcatttcgtctatcacagtggtggaaatagcttgtaaaacttgctacagagcttcgacattggtatctgaagccgtgaacagttcatcaaagaaagagcaaataatatatgtcattccttgcttggttcctactgctacaccatcattgttatgcaacagtttgattgaattattggacttccttgacgacgcataagcatgaaaaaacttcgtatttttatcaccacattgtaaccaatcaatccgagacttttgttgccaatatacttcctattgtgataataattcttccaaagtatcttccatttttttttcagattgagcattgtagcattgtatcttctttgaaaggcttggtctagaagtatggtctctgtagaaacccttgtgaacttcatgaatgatggcacttatttcggttttggctatgcacctcagataaggtacggataaccccatgtggtaaagctttccgtctagaatgaaaaattggggagcttgatactaaaccctctaggcagcaactctgtcagccggaagctctccaaaatttaagtgttggaagatcagaattatctaggagtttgagtggtcaattatggcttttacccccattttatcaatacttggggcttccaagtggtcatta

SEQ ID NO: 2948 - DNA, 2616 bp, Cannabis sativa
tcgcccttggcatttctaggaacaaaaacggagtttcgaggagtttccaatagccccccaatgtaaacataagccgtcgaatcatgttgagaagattggccagcatccgatttgttggcttcatcaagctttgtagccttactcctcgtgccttttcctcttttcttaggcgacttctccatgagcctctttcgacgggcagcagtctgagcctcttccgacgagcagcattctcagcctcaagctccttgatggataactaggatagtttcatttttgggagatgacgggggtaagtctctacaaggcgggaatggtctttagaaaattcaatcaaaactggctcagttgtttgttttaaatgctccaaagcacatcctatgaaatatggccaaataaaacaagagggataaagagtggggatacctaggaagattctaagcttgctaggccaagaaaacgatccaataagggcttcatccgacaaaagatattcgatagaccaaaacttcaattcgagggcagtcaccttacgaactttattggcaaagacttccccaatcacgacttcttcgttgtccataaaagctatacataaaagagaaagaaattaggcattcaaaattatgataagaagataaatataaaagtgtgacatgctacacttagaagaactcaaaagaaacaaaggaaagagcatacaaataatgatacagatataataaaaaaaaaaggggctacaagaagttgtaatactagctccccagcttcggttgataaaaggggcagaaggatcattagatacatattcgatgggtcccttggcgaaaaagaacttattcttctacccattatgagatgtctccagatcagtgataacagcacaattcttcccaggctggagacgataacgcccttgctcactctccattagggaataaaaatgaagaatatctgacacctcccacttaactgcagccttatctcccaaaagtattaaaccaagatggatagcccacacattaagaagtaattgagtaggagggcataatgcaaaaggaattcctttatcaactagggaatgggcaatcttaatttaatttttgattcaaaccagtaggaatacatgcacactgagggctgtcagccctctcgtgtgctttaggtagcctaacttccacccctaacgggaaatcacaaacggataccaaggaatcaagcttcgaccgagttaggactaatggactattcagtctatggtccaagtgagaacgtcccaaagtaagctgattatccttcattttcctctaagtaggcactgcaagggttactccctctgaagaaacagtttgcctactcacacatactccatccccagaacgggaacgagggacgatcgaaacactaccaaaatactcactttctaggtcagcaggtataacaccttcatcatcttccatggagggagaatttgaaactaataaagattcaacaaacccagaagcagtgctcgaggaaagggaatcaaaaactagggaagaagcgcttggatgatccacatttgccattataaaattaataaggaggaatataggggaaatatgcttggaactaaaccaagatacaaaaattcaagagcctaattgaagattcaacttttccccttcctaaaaagagtaatgataaagctaaaaaacaactaaaccggaaaagtgcaggaaataaagagtcagaaaaaacaaaaccaaaaacaagtattgtgcgcaaatagagaagggaaagaaaataaaaagtaaataataaaaataaaagagagctaaaataaaaaaagattagagagtggcaaataaatatatacttggaggagatgtgattcagtgtacataagttgaaacgaacatcaaagagaaagcacgcactagattttcgaaattggagatcttatatagagggatgcactatcaaaatttcaaaaagaagttaagaaattaatgatacattaataagaaaaacgattctcgatgtgccacgatcaaatcacataaactgccattttacaaaagctaataaacttgaaattaaaatagacaaaaactgaaacaataccataaaggcgatgatgaaaaattgacccaataattcggagcaattcctgattatgcacaagcataaacagaactggggagagtagtatttggggaaaagaaaagtaaacaattaagaacccaaccaaatatatttgcaaaaggggcgcaacaaatcaaaaatcctaaaattgcccatgaacaaataaaataaaaattaagcccacaaaataataaaaaaaaaagtataacgacaaaataataacaaaattgagaaataatcaaaatgaggagttacaccgccagagaaagagcagctcaaatataaacttactgagacaggccaaagatgacacatcccaaggcaggctaaggagcgcaagtcctagatagattaaagccataagctagctgagataactgaaaatatcatccggcagacgaaatataacttggaccaaaaagaatccaaaggactactcttctgagcaaaaaaatagaatcgcacaaaatcgagataggataagtgggg

SEQ ID NO: 2949 - DNA, 2025 bp, Cannabis sativa
  modified_base (1767)..(1768): a, c, t, g, unknown or other
cagagatagacaccttctctttaagcacgaatgcatcttttgtggcagaaaggaattgtgagggtttgggtggagtgatctgagatgctaatgtggttgttagggtggcttcggcgatggggagggggtcgtttccagttgttgtggtttgagcatcttgtgatcttcggtggggagtgtgattcttcaattgttgtctcttggattgcaaaatcttctagtaattttgtttttgcttgataatgttattaattcatttggtgcttagttgttgttagtggtagttctaattatgatattttacattctgcaaataatatagcccacacctaactcagccctgaaatttaatgggctataggaaaaaaatatttttaggcctttatttttttaaacaaaaatgtggtatttttcaaaatcagtaaaaaaatgtataattgtgtttgggatttgtgtgaagaatcttttgtagatgaagaagattcttgggtaagagtgtaagagataaacacttcgagagaatctaacttagaattgatttcgactgtaatgtattttgttttttctcaatcaataaagaagatttcggtggtgtttcaaaactgaagtagagctatagatcagatcgatctataggacttgaactagtatatatcttggtgttgattttattgttctattactttaatcgtttctggtttttggttttttgattgctttgtacttttctatttttatctccgattattatttgtatattgttaatcttgtcattgcatattagttgtcattttcccacaacatctatttcacccataaattgtcttactttgagtaaatagcccaaatatatttcacaatcacaattgtgttccatagcaatgaattttgaatccccaaacctccttcagattttgatttatacaactgcttccaagctttatatcccgggatgtatgattcagcaatgccttgacaataaaaatcgacaaatatcattaatctttttgagcacactctttggtatccataatttgttcttaataagagtgaattgagataagaattaatgtgatcctaccagttggttattttagttataggggttagttaattattagagttatagcttctctagctcaatgcttgtgtatataagctcgtatctccctttctaaaataataagacatttgtttttatctactctttcaatctctttctctttctttctctctacctttctttattctccagttcatcatggtaagatacaatactagatctaacacatacaaaatattttaaaccgcatgcaatgcatagacaagttattatgagagtcgacggtactttttgaatacccttatcaacaacaacaccaccaacaacaaattcttatcgatgtagtctacatactttgttcattgcacaatgcaaaaagttttctatgttaaacattcacatagattatgaactatccaaacacacattaaacattattgctcataattattaaatccaaaatcaatactttatttagaacatcacaaaaatatgaaaaacacatacctcccatatttggcattttccattgttgctatgacaccaaaaaccttcaatgtgaatgtgtctcggtagaagaagagcttatgaaagcaaacccttttcttatcacacacacactactcttagagaacatacatattaactcttatatattcaacacctaaccttaaggggttttattaggcttattgggctaatgnntataattagtggtggactataatttaatgggctaattatagtttttaagatgctctcatgtgcctctaataaatttattatttattaaccatcctattatggtagtgaatattaggtacatatatagttaataattgtgtttatggtattaagttcataattatattagtccataataataattctaacattctaaatattattattgttattattttcattatttgtatctcttccaatttattcttgttggcttg

SEQ ID NO: 2950 - DNA, 858 bp, Cannabis sativa
aaaaaaaaaaaactataataatatcctaggtgataattagtaaaaaaaaaccagaaaatcaaaattaggaacccagttggcgtatacattaattcctaattaaaattaaaaagcccattaatcccctacttcttcttcttcttcttcatcaccaaaaacgacaacaaacctaggagtcgttccacacagtgaatggagccatgttaatactggatgaccttggtccaagagatggaacagcagtaggaacccaattattgctgcaagccgagccctgttggtgatcataccctgtacctttaacaacgcccaccgtcacaggggactgctgtgttgacatgtagtacaagctcctagcatggctataaggatcgttactagaattaccaaacacattattattattttcatgctgctgctgatgatgatgatcaccaaaaccgttattattactactgttgtcgtttgttatgacggtagccataggaacgacattatatccactgccgtttccgtacccgttatgatgatcacctccattattattgttattactactactgtacataacagagttcgaacctgagctgtgttccattgaagaagagtccatccccattagattatgcaaaactgagttagaattgttgtttggctgaaagaaattgtgagtgttgctcagctgaatctgatcatgaaaggcatgagtattgctatgatcagaatcttcaacttcttgcttgcaccaaagtcctcggctctgtccattaccataagggtagttatgcatagtgaatggttgttggaaagctgccaaggctggccagccaccgccatggtggccatgagcaacggcag

SEQ ID NO: 2951 - DNA, 1403 bp, Cannabis sativa
attaaatggtattgtgcttatgaaatcatatgcttaggaggctaaagtaaactatattattgcaaatgctgatatcgaaacacacaagtcttgtttctataattttattcttggatgttagattttttttgttaaatcacttatcattcatatttttggagtttggaactcaatgtctatttactttatcttatttaatcaagtaaaatgtcaaaatactgaagtagttgatttcgtgttagttaagatcctacagtttcgattcatctgatagttactcatttgatgcagcttttcccagattgtgctcctcattctgtagcatacattctggagctcttgaaattgcggcattgtgcaggttgtgaattctatcgcgcagagagccgaggcgaatcctgggatttagaaggaaaccacatagacaaggttagacttaattagtcttcttactttgccaaaagttgatgtatggatggatcaccaccatggatatttgaacctgcgttgtacaatcttatgctatcgtcttatatcctctatgatctattccctcgtggtctgatctcatgtttcgaaaatgtggtcaattatgactggtgatctcacattgccctgccaataaaagtcttttatttgatttgatttgtttgcctctgaactttctttcgaatcatgtgaagttttaacagaccgggcaatgtgtttgtggatattttatgttcatgttctactcactttagttttctcttttgtttttgcaactgaacattttccctttttaattatcattaggctccatatggccctccatttgcactgatccaaggaacattagaagccgtgggaactacattcaataagatcccaactgaggtttgtccaacaattaaaaggggttcggtagcctggattggttctggccctgaattctttataagccttgcaaaccaccaagaatggaggaaggcatacactgtttttggttctgttcttcccgaggacatgaaaattgccgagaaaatcgctctcctccccactgtaccggatgtttggaaaaatatcaacgtctccatcttggaacaacctgtaccgttgtcgttgcaaaggttcgagaggagccatggagctcttggcacaagtgtaaaatcagattgagaagtccataatttttttgacatttttcgtataagttcgatcttttcctttctctgaaaaaagaaagaaaagaaagagaaagataaaggaaaagatttctgtggctttgaactagattcaatatttacttctttcttggagcaataacacacaatcttttggtctacttgtttgtctgatggggtagagtattacagaatcaatccaattttcttgttttaatttatctctaactaataaaagaa

SEQ ID NO: 2952 - DNA, 2232 bp, Cannabis sativa
taataagttgaatctacatgtgtgtaggtgtaagtggggctgaattaaaagttgcaaagtccaaatcaccagagtgtgggctgaccattgcctctgtaggttggctagccacctggtcaaagccttggctagccacctcctcatcaagtgggctagccatctcctcatcaaagttccccgtcgataacccctttggctagatagtggtttggactgcttcctacctcttctcaaacatcgctcttccttgggttagtgtgctctctagaaaattagcattgtccatgtatgaaagatcaacatcgtggttacgcagcttaaactcatagattagttcgaaagataagctgacgtactcatccttgatggcctgctagccatcaagggctaccgtcaacttctccatacacctagtgaggtcactctccaaccttgaaatgtcaacaacctacatggtgttctcctggtttcttgtgttgtgcaaggtctccaaacaagaaatcatgttccggttctgcaggccaacgatctccatgccagccaaagccttgcccttttctagaaggttagcctccaaggtctttatctactcccgaagagcactccaagaccccctagagttgccatgcgagaaactcggcttcacaaaggcttgaaaataaaagaaggtgaaaattagtgtcaagaaacaatactagccagccagcccttctaagaagttgccaaggtcggccaacccttcaaagacataacattcgccagccaacttcatgcaacagccactataaactgccagcctataataatgctagacaaatgagcaaagttaagtgtacaactcaccgtggcaatatccaagactagtagtagatagcctccttcgcttgctatcttaaacctcttgaagctcgtcatccatagaaggaaaggctctatctagacacctatgagtagcctccatggctctctaccccatgcagagacagctccctgacaaggccttcagacaccgctgcccgaaggtcattcctttcttgctggagggtcatccatcatgggctgcccaattggcataggcccttgaggaggaggaggaagaggtgatctcacagcatctccagcacagatggttgaagccacattaggcctcggatgacccaaaggctcatctaaaggtccattaaccagacctctcaacatggaagatatctataaaaagaaagtagcaaagtcataatgcatgttaccaatattcaatgtaagataagaatataaaagatggtgcaatcaactatcaaatgttgttatcctcaaaagagggatcatccaaatcctcaataataaccttgcccttgcttctagatcaaggtaaagggcgagtgggtcctgtagagctctagcctccaagcctagtctaaagagatgtgtctccaactgttcccccgtgagccaagcgttggcatagggccttctctctcctctttagagctcaggctatccaagacagaggcacatcatcatccatgttagggacttgtccatcaccagaacaggcctcctcagcagctggggctccatccacattaactgatgggccctgagcccccacaactccagaggcaggagggtacatgccatacctctaaaagttgaccatgctggccaaccttttatgttccttttctccacaaggagagacatgatgtgattcatcatatccctcatctgcaatgtattgatggagcgcttttaaaatgtcactcgctagaagcgacagtactagatcttatcggtgtcccaggtaatgaagtacttctaggcttacccaccaattttggacataggcatgctattggtgttgcccaacaactgatggctgacctaactaaagttgaagtatctagtctggttctactttggggtagactttaaataaaaataatatccaatctcatatggagtagattgaggccagcctaggtctgcatataaaacaaacatcacagaaagctactttatacttttttaggtgatttgtcttggacacatcccaaagtaagtagcgatgtttctaaagtaagggtgtagtggcagcattgcccttgctgtatatgatgctttgatcatgccatccaaccgatagcaagttggcgtgctctcacatctctagtgggtatctcacactgaacacccctcactagaccactggccagtatcctattgaaagtctca

SEQ ID NO: 2953 - DNA, 1427 bp, Cannabis sativa
tttttcgaggtgggatagccttgtagacttccaccaccatttacaccaccactgggatgtggcggcctctgttgttgattctgcaaatgtttctgagacgaggaagaaccactagaaatacttgggttctggtgaccttgttgactttgctgtgaatgagagagctgttgctgttgaagttgtgaaggatggaaggtagaataaaatgagccgttgaaaaaaggcattgcctgaggactccctctataagctggtggagctccaacatgtgcaggaataggaaacggataggcattgatagcaagatactgagtttcgtttccagacataggtgggtaattaaaggtcattgccggtgctgttgctgtagtaggattagatgcactcgaggtatttgcatttccaggagctggaggagacttcacagatccaggaggtctgacagaagcagcagcaaccgcctgctgctgactcaaagggaaaatgatagcagggccttgctgatataccaaaaaagacccaaacaagaataagaaaccattcccaaaaagaagaataagacgtcattttaaaaacaaagagacggaaaagaaagacgtaccaatatattactaggtgcaccagggggcagagcttgctggagcataatttgctttctctgggcagcatcaacaacgttggatgcctgggaagacttgtcttttccagtatggccagcaaacatagcaagaccctgacccttgtcctgaactgcgttcaatcctcggccagaaatgtttccatgcaaatctggcgacggcaaaacattgagattacaagccttggccccatatagagaaccagaacctgctgcagcggctgctgctggccagaaagagttcatccttgcaatttgttggtgacagcatatacttcttgcaatgtagcaatgggtagcacacctctttggccgtggttgagtaaagagataaggcggtgactgtcagaaacagaatgagaattctcatgaggaaagaatcaagaaaagaagctcagaatggtcagtaagaagatagaaatagttgaaccgaaaaattgacttacttgtatagcagcagaagaaacagatgttccatccatagataccactccctgtaaaggtgccatatatctgctaataacaaccaagttatttttccagaaaagaggtgaaaagaacctaaaaacaaagcaaaacaaaaccaacgtaccccattggtgaaagcccactcggccagccagccatggacattggcattggtagagggcctgattgagctggagaagaaagcggaaagtgaaaaaatcagcataccaggaggaaaacaataggcaaatagagctaaaaaacaaacagaacattcaaatttagctaccatttttgtcactggcgtgtaactgctgctgct

SEQ ID NO: 2954 - DNA, 1014 bp, Cannabis sativa
cctgtcacatgcgagtggcttgaggcttgcggatggcctggtgcatgtgagtggcctaacgtatgcaagtagcctggtgcatgcgagtggcctcatgcatgcgagtgacttgtcgtatgcgagtgtcctggtgcatgtgagtggcctagtacatgtgattggcatagatatagtttgagttaattatgtctaaattatatataaaaaaaatttatattgttgtctacttgatttctaattgaatattttttattaatcaattttgattttttaaaaattattatttttgtgtaattttaaatttttcttagtttatgtttttcacacttttttatatttattgcaaagaatttgtaaatattgttttatatgtcaattagtggttcttgtaggatgttattgtgttatttataaattttaattttgtgaatgcaatatgttaatatttaataaatttattttgaagtttgattcttgttaagttgtttttgtgttgctagctagttatttttgcataattgttgtattgagaaaaaacaaccctacacgtccaagctcacttcgttcaaattgccacatggtagccgcagagcccttgttgcattatgacgctatagttttggacgggtctttactttaccctccccactagcatgtgagtctcactcccttgtcttatccacaagtgtatctcactctctttttttgcatttagaaataaaatcttaattgtatttttgtaattaaaaaaaattataaatattacttttataattagtaaatagtataattttttttttgacataatataaatatctattttgaataattttattttagaaaaacgctatcaaatatactctttcatatgaagatcttaaacaaattacatactgtaaaaagaaagaaaaatcttctaatttataaaataaaatgtaaagaagttagttttcgggtatggtaaaaaggttctcaactaccgatgttaaagaaagatttaaaaaaaaaaaaaaa

SEQ ID NO: 2955 - DNA, 1807 bp, Cannabis sativa
tggagaaaaatcctaattatcctaacttttatgctcaagaaaaaaagacatgtaattaatttttgagaacataaactatttctctcatggcaaatattaaacctttacaaacaacgccacaaaatagtcaaaaatatttattttgacaacacaaaacagtcaaatttaatcaataacatacaaggaacaattccaactcacaaacatatattctaataaaaaagaaaaaaagaaaattaagaccttcattgttgccacgtcgtccttttccctacagtgacacgtcatcacatagcaatagcaaacccagcccatgtatattgttcggacgtgccactcatttctgaaacccagaatatataaagcccacccttcacaaaaccccttcatgtgaaaaaccaaatcactctctctctctctctctaaactccatttttacgagaactcagccgacaattcaacaccaaacccgataaccgaaactcgaacccccaaaccccagactgaactcgaaaatatttaaatttgtgatatatatatttatatatttatatgccgatggcggcaggtacagttgcctcccggaccgatcgagcaacaactactgtgccggccacgatggggcccgcaatgatgccaatgcaaacgccggggatgacggtcatgccggacgccttcgccaaagaggctatgctggcatggtttcggggcgaatttgcggccgccaacgctattatcgacgcgctctgcggtcacctggcccagctaggcggaggatccgattatgaggcggtgttcgccgctgtgcatcgacggaggcttaattggattccggttcttcagatgcagaagtaccactcgattgctgatgtcgcggtggagctccgccgtgtctcggtgaagaagacggaggataatagctggacatcatgtgatcgcgtcattgatgagagtggggagaagaagaagagcgaggaggagaaggtagttgcggtgaatccgtgtttggaaggcgagaaaattaatgagaaagtggtagaaagtaatgaaaatggctttcatgatgatcgtgagattggtgaagaggacgattcgcccaatagcgagattactgatacaggtaagtaccatttgctatatgtatgataattgttttgagaattgttctttttaatagtgaaatttgagtaagatcatttccgagactgaataatgctttcaaattttacgaattttctttcttggtttgatcaaataaatttacaaaagtcttctttccaaagtacttgaaattttcgatcctactgaaaaattactttcgtgaattaattagtccgatcaggaaaaagaaagcagtactgttctttcagaatctgaagtgacttttgctgtttgtttcccgagaaacaatatattctctgtattattaaatttattttcctctgcttatgacgtgatttcatttatagtattttattcaattttttatatttctctacagtttactatacccataaattggcttttccaaacttaagtaaaataataattacaaaaataaaaggctttttcatccattttcttaggagccaaatatgagacatgtttcctcaccagatccaatatttttaaaattcccatctccgatctccttctttgaattcaaagttagactatgatagttttgtaatttaaaaattcaaaaagaaaaaagaagtttctgttgcgtacaaacttctcacaaatccaattatttcttgtgataaaaggacaaaacatgtcaattaaattctgtaactcaagtttt

SEQ ID NO: 2956 - DNA, 1424 bp, Cannabis sativa
tggaattaaataagcaaggcccactattaactagaaccatcggcccacaaccatcatcacttccaaaaatcccatttttttcaaacttgtccttcggcccagccagcccagatgccaactcccctcccaatggacaaagtgtccgttacagtaccagtcataatcataggtggcttttccatatttgtagcattatttagacccactaggttttctcctttatatcccccagtcaacggtatcaaattaggcaaagaggcaggcaactttccttcacaattcaaaatttccataaccttattacccattacagctctacctcgaccaaacccaacactcttcttcttgggaagccattttttctgcacacctttcccacgcccggagaagtcacgatccatcatagtcaaagctcgtctcggacttcgatccccaaattttttcgaaggggctccggcaccggctaaccgaggcaccgtctccgtcccaacgcccaaactattgacttcaagagatccagtcatagaagccgtccccctcttcatcgcagcactggtaaatacgtcatgatacttcgaagccgtggaaagccacggtccgaacactggaaatggattaccgtcaaggttagccaccgtgggcggagaagacaaagtgcatccccttcgttgatgccccaggcgcccacagaagtaacaaaagatcccaactttctcatatttaaactggagccatcttttgactccggagtcgagatcaaagaaacagcccgaagaaagcgggttctcaatattaagctccacaagaactctgagaaagagatgccatgaatacggtttatcttcctcaagttccactttaagtaccttgccaattaatccaccaaggagcttaccattgtccaccgaaaagtactcatgtggcaaattatgaatctgcacccacaaattgattttatccatagagttattgccttcaccacccagcttccaagcatagagagcaaatgtgtatcctttaaaagaccagggactttgatccagagcccattgcctatcctcctcacaatcaaaacccagtttaaagctattgggttttgtcgatacatcagccatagcaaagacaacaaccttcttaagccaattcttggtaacaaattccttgacatcatccacatcaacagccattggagccaccactctcccaaccaaacacaaagatgacagtgccttaagagaagaggcactcggattgagagaaatagtagcttcaacacaggagacaactttacctcgagcattgacctcaggagcattaactatctccataaatgagagacagaaaacgacaaaccaacaaactaaatcccacagacctggacccaaccgacctaccacaccccacagacacacaagaccccacac

SEQ ID NO: 2957 - DNA, 1972 bp, Cannabis sativa
atttaattaaacagaaccaaaagggtcaaagatgttgatttatgagtatgttcccaatggttctctactcgagttcattacaggtatgagtaatgtatctttcttattggtcattataatattatggttgagagttgtgacaaattcttactatgtatccaatcagccgagattcacgtcaattaacggtcaccaaagtttatattatataggttaccaatatagtatagtagtgaatgtttacaatactatatatacacagaattattaaaaatacatactatttatatatacaaaaatattaaaaatacatagtgattgaaattctaaattatgcataataaattatctgaaattctctaaaaaaaactcttgttaatctaaattaatttataaaaacaaagttttcctaaaaaaaaaaacaggtgtcataaaaattaaaaaataaaattatgcacaaaaaaatttaaagaactttttaatagtgagtaaaaacaattactaaccaacacttttttttgtatatttatttggtagaccttaattttattgtttaatcactttataggaaaatcagggattagcttaagttggaagcagagagcgaatatagccattggagcagcaaaaggtacagtaaattttcacacacaatacaacccaacaaaactaattcttcatcatatcactatcacctcctaaaaatgatagagataattgccatagtataatttgctactgaaaaatatgtataattatattaaaatgaaacatctatgttaaattagaacatgttttattttgtaatactcaactgttagtgttccatactttactcaaaagtaggttatcaaacaattcacctaacatttgagtgttaatagtggagtaggtgttggttgttacagatgatttttcaacttagaaatgtgaataaaatacatgtaattaattaatggggtaaatgtttgatcaaatcatgacaggaattgcacatttgcatgaagggactaagccaagtataatccatagagacataaagccaagcaatatcttagtaggtgatgattttgaagcaaaggtttctgattttggactagtgaaatctgggccaactgatgaccaatcacatgttagcagcctagtcaaaggaacaccaggataccttgaccctgcatattgttcaagctttcacttgtctacattcagtgatgtctttagctttggtgttatccttttgcagcttatctctgcccgtcctgcaattgaatcaactaaaatgcattctaattatcatatcatagattgggtaagcaatcaatccaacactttcaccagtatgtaatcatcatcatctagcttagaaatttaacaaataaacaaaaagatcatatttttcaggcaaggtctagcttagaaagtggaaaagctgaggacattatagatgttaatctactctcagagccttgcaacatgaagatgatgctaatgatggggagacttggtctgagatgtgtaggacatgtaccgaaacaacggcctacaatgactcaagtttggcaagaactggaaaaagctctttacaaggctgaaaaccccatgaaaaaacagctttctttttcttggaattcaagaaaatccatggattatgagtactctcagagcagctttgtgagcataaatgagattggattccaaagatttcatgtagagatggagagcctctcctttcagagcactgtcttgaggtgtttggaggataatagtattagtatagatattgataacaacacttttgaaggtatatatgaggaacaaaagtaaagacagttgtttgctgatctagtggagtttgtgtcagtcattttttccatggattcttttctgtgggtggagaagaaaagggttttgtctgattgtggtggcactttgtcaattgaacaggccaagaaagatacttgattctcaagta

SEQ ID NO: 2958 - DNA, 678 bp, Cannabis sativa
aaaaaaacaaaaaaaacaaaaaaagaacaaactagaataatacttgtgtgataaatctttccaagaattaaaaaaacattgctcaagttatgttataaaaggtaaataagtatagtaccattactcatacatataatataactatataaggggatatacgtagtgaagtcactttcaactcattagaccaggtcgacctctacctaagctaagttattattcagatgaaagaaaatcactggctatgatatcacgagaaacataatccaaattaagctcacataagataagaatattaattaaaaaattaatataaataaatattatataaatacttacttttaaatacgtgtcaatggctcggtacaaaccatcatccatggcacgtgcgtgagtaggaagagcatcagccagtgccacaaactcagtcatagtgagattagaatccacggcggcttcagccaagtacgagtcgactagcttagccactttcacaaaagccgccgccccattagtcttcgttaattcatccaagctaacaaacctcttaaccaatctatacacaagttcaacatcgagtaaagtcccacacgtgtgactaaacgacggtatcattagctcttttaacgacgcctggtcaagctgccacgagattctcctctccagctcggcttgata

SEQ ID NO: 2959 - DNA, 997 bp, Cannabis sativa
ttcttcgatcgagtgcaggctgtcaaagaaagtttctgatctcactttcagctggttgggaaagcagttgtggcctttgaatttcaaaggctgaatttattggttatctgttgttggttcaagcaggtttcagaggctactggtacaatatttgggtaaatagaaacaaatgtacttttaaaggtttttcttgtacagttgaaacaattgttgatagtgtcaaaaatacagtcaaatataaattacaaagtgttaagaataggagaatgtctagagttgagagagcctttcttgtaaaaatgaaagtgtattaggttggctttgtggttgctggtgtctttaaggttctgttttggttccttattgattggtttgtacttggtggttgtttgattaatgaaggtattctccttcttgataaaaaaagagttaaaataataaatcaattttaaaatataataaaattacaaattaattattagaatcatagaaactctaactactattaaaaatgtgatataattatgtttctcttataaatttatgagaaaataattctatatcattatattttttaaataaaaagtaagggaaattatcttaaatattattttttttttttttaaatttacggtttaaattgttctagtggttttttcaatagtttctatgtggattgctatatggattttagttacaatttaagttattttattagtttctataaggatttctatgtgaaatttcgtaaaaataaaaaaaaaattatttttagtgtaaaaataaaaaaactcctaaaacaatgcactaacctatgaaaaagcatgtaatttctactgaaattacaaaatatgggccactttgtaaaggccaatttctcataccacacttctcacttcctacccaatgggccaagatgcacggcccatattgcgtgcctttttcttctccaaattgccagaatgaatcttcacgccttttaccttagcctctctgt

SEQ ID NO: 2960 - DNA, 2027 bp, Cannabis sativa
aaattgtcacaccatagaattggagtctgcaccaaaggaatggacaattcttgaagaatggattccaaccaaattaattcggatgtggcaagtgcaagagcacgatattcagactcggtgcttgaccgagcaacaacagactgctttttagagcaccagctgagaagattggagcctaagaacatgcagtatccagatgttgattttctatcatcgctacacccagcccagtcagcatcggagtatccttgaaggctgaaattggaggaggcagtgaagaacaagccgatgtttgacgtgcctgctaagtatcttaaaatgcgcttgcaagcaccccaatgatctgttgtaggagcttttaaatattggctcaatttgttgacagcaaaggcaatatctggccgtgtcatgaggagatattgaagggcaccaattacacttctatactgtgtagcatcagcaagaggttgacccgagtttaatgttaacttggcagtggcacacatgggagttgacatgggcttggcatcaagcatattggtcttggcaagtaaatcatggatatatttcctttgagtgagatagatggcattggtatcacgataaacttcgaagccaagaaagtaatgtacaggtccaaggattttaagagagaatatctgatgtagagcagatataagttgttgtatttgaatgggacatgcacctgtaaccaaaatgtcatccacatatatcaaaatcaagagcagcttgccttctttcttggtgaaaaagaggcttgtgtcagatgtagaattttgagatccccattgaagtagagtagcctttaaagtgtcaaaccaagctctaggagcttgtttaagcccatagattgctttgtttaacttgcatacatgtgttggataatcgggatcaacaaaaccttgaggttgatacataaaaacatcttctttgagttctccatttagaaaggcattgttaatgtcaatttgttgaatatcccatccgtaagtggcagcaagagaaaatattattctgatggttcatggtttaatcacagggctgaatgtctccacataatccaaaccaggtgtttgttgaaaaccacgggccactagtcttgcttttaatctgtccaccgagccatctgcattgtatttgattctaaacaaccatttgttagtgataattttcatttcaggtgtgggaggaacaaggacccaggttttctttttcttgagagcatagaactcttgattcattgcattattccagtgactgttggcaagggcctgcttaacagttgttggttctaacaagtcattgatttaagtgaaatagctttttggtttaaaaactccagctttagaccgagtgaccatggagtgagtattggtgttttggggaagaggagagtgagggatactggtgttggatgagtctgttcttgtatcattaatgggatatgggagagatgagtctgtggacataatgggactcgagttttgtgaactggcagaggggtagtgtggtgactgaggttcaggggtgttaatattggaggcttgaactgaggtggagggatcagactgagtggtgtgaggagtgataaagtgattactgtgagaagtgggaattgtgaaagaatctgagctaactatgacaggtgtggatttagggacagatgacacagaaaataattcatcatggggaaactcatgttcattaaatttgacactcctagcaacatagactcggccactggggtgcaagcatcagtaacctttttgagtattattctaccccaagaataagcatttgcttgatctgaaggcaaccttatgagtgttgtaaggggttaacagaggaaaacaagtacagccgaaaacctttaggagagagtaatcgggttttcttttgtacagtttttcaaaaggtgagacattgtttaatataggtgtggggagtctatttatggtatagacagcagaggtatatgcttcccaccagaagctcaaaggcatatg

SEQ ID NO: 2961 - DNA, 882 bp, Cannabis sativa
tattattattattattcaaactaaatactataattgttttaataaactgtgaatataattcaatttacccacaattatatatattatgatatcgatctatatctatatataatatgtatatttaaaacacagcgtgtatttgtagatagatatataaatatcgatccgatctactgtatgatctgtagggattatccattaatccttaaaaggaaacaatgtatgattggagtttatataaaacaattatatcctaattagattatagatatataatatatgaatatagaattataattttcattattaattagtagtactactatgtaccagctagtatatatggcttgatcttcaaattattgttatgtgtgcatgtgcgtgtgttgtgtgtaattgttaacaataacaatagcgaaagatgtagctagtactactgaactgacatgtggatgattctacattccaattaacagttgccacctggccttaaaatgtaaatgaattagtgtaggagtttttgaagtggtgagaatgagaagtatatatatgatatgaaataaatttgaattatttattttttaaaagcaaattttgaattattaaaataagaggaaagtatagggagaaacggggttgtccttttcttagtgggggatgaagagaaagcttcgcatgaaagaaattgacctttaaagtaattaattaaattgctttattattaatcataagaagctaccttacgtccttcggacataattccaattccaaattaagctcattgttttcgaagcaatattattaagttcctcaacacactataacttccatccatccccactatatataaataatataaattgagctattcaattctacatc

SEQ ID NO: 2962 - DNA, 1112 bp, Cannabis sativa
gaatctccagcaaaaggtagccagtctgtggttcccgttgaaattcctctacacaggatgactctagaaaatgtcccagaggatgaacctactatgaagaaaggaccctccgcaaaggccaaaggagaaaggagggccaagacacccgcagtcgcacaggcttacaccgaatccgtctgggagatggatctaaaagccaactgctttcggtcttatgggatgttgcaggcctatgctgacagcactggtcttcacaacgtttctggattgatgtggcatagactgtctgccacaatagaatcaacttacactagcatagagggattcaacgcttaaagcttgtcccacatttctaacggtgctcatcttcccttgagaacctacttcgtgcatctaattgccaaaattaggatagctcctttctagctaatcctttcattgcataggctcttggctgggtggtatgtcttttgtaagatgaacaagttggaggtaccttcccctgaagaggtccttaacttctacagtgtaaaggctaatcttatgagggcaaacaagaagaagttgggcttcttcaggttggacaagcacccagactcctactgcctagtcagccatatggattgtactcatgatcttcgggcatactagttcttttcctctaggttccccataaaagggtgcctttccttcaactgaacttccagctaccgcgtactattgtcactcaaccttaattttatttttcaaattttctttgttttaaatgacttgcagatgcttgtatatttactagaacttccctcccaaagtgctaaaactggaaaaatagccaagaaagaagtcaatacaaggtcttttctgggtagtagttaaaggtcgaggattggttacaattgaacttcgtaggtttatcttgattgtgattttcaagaatatcagtcctgtcaacctctatgggcaacgccggcttcaaaagaggtgaaaggagccatcgcgactaatcttgccgtcgttatccctaaggaagctaaagaagatgaactcttggagcttgactggctgatacgtcatcctaatcccctatttgaggaggaggaaatctctgagag

SEQ ID NO: 2963 - DNA, 1711 bp, Cannabis sativa
aactttttttgaagaaaaaaaaaacatgtttttgcacatattatataaaaatctaaaatatgtacctttcattaatttttattcaaatttcattcatcaaacataaccatagtgtacaaaatatgcactaaaaattacacaaaattgacataataataatatatttcaaaactatagcttccatcttaaataaatgtgtgttattttattaaatattttagtgcataatttatttcccataacacaatataacactccttatttaagtccatttctcaaagtaattatgttagacaaattcaatatttgatcttatgatatggggaccaaccaaattagatggttgagccatgtacgcacaagtgtatggccaaacaaaacgccacgaatgcaaaacacaattcaagagattatgctaaatcaaaacctattttcttagcacttagaagaaccatccacatgatcaccttacacatacatatacacacacacacatatatatatatatatgtgtgtgtgtaagttcccatgttactaagaatccatagccaacacctctccactcattgctaggttgtctcccccatcttccttagattcaacttcattttttggcctttttgtcttcttctcttatagagcctcaaaacactagacaagaatcttttggcttatttgatagtacagatagatcttttagtgctgtccatttgaccattttagttctttcttgactccttcttcacacacacaaaaaacattactctataaaaagaagagacctctaaactacctaaacatgcaggtgaacatttcttatatatagtttcacaaaacaaagcattattattaatattattcactctatcaaatctcatcatttttcacacaacacaatttgttaattgtgacagctttttcaatggctttttaacaagtcaacaacaagtgaggaaaagggaaaagaagagaaagacagagttattattggtatgacacttaataattataccctttttctctttttcactaattattacattaatttattttatgtaatttacaaagttttggttttgttttttcagatcaaaaacctaaacaaaaacatagcattgtgtttaaacaagatgatggggtttttgggaagtttaataataagaacatcaaatccaaaaaaattgaaggtaataataaaaagtttttaaagctttttttcctttgtagaaaggatatatcaacagcttgcttttacagcacaattaatttgaagagtcttagtagtaattgttgttgtgacattgatacaacaagagataattgggttaagtacaattactactactcaatgaagatgaagaaagaagatattggtaataaaggattaggaattgttataagtaaggcagatcaaacttctcatgcagggaacagagttttaccaattagtgaaacgacagcatcaacttttaccaacaagcaaaacgacacaaaaaatgactccaatgaaaagaaggttgacaccaacaccaacaccaacaccaagtccaaaaccatttctagaatgaaggagctcttgagatgggcttctaatgctaaatcagacaaaggagccaaattcatggccaggaaggtaacatttttctattttactaaacatttaagtatttatatattactcgaacccagaacttctaacatacacccagat

SEQ ID NO: 2964 - DNA, 1821 bp, Cannabis sativa
acgttctaaatgaactctaaatagtttaatttaaaaaaatactaaaaagtattatatggtaactaatatcttatattattatacattttatattgttattgatgtaaataaatatcgaatatatagaattcgggtctttaatttataaccataaccgaaaacatggtttacattgtagacattaaaacacattctcaaaatacacaatgaaaagtattaattgtaagctagtttatttccatgataagaaaatttgctaagaatgaatgagtgttaagattaagttaaaaggcgatttcgcaaactattaatggagctaagacgaaaagagctaaactatgaagaagtaaatttgtttcaacttccaatagtaacatatgcttaacattgtgttaaagaaaacataaccatgcaaagccattctcttacaaacacatatgcattagtcgattatgtaaaaatcaacttgaaattacctcactcttctaactaagttgtcaaaattcagaacccccaatcctactatactttaaccactgccaaaataaaatccaaaagattcttacgcgggtttgtctgaagcttggaaattctgttctgactcgataaccttagtctcggtggcaattgaagtctctactttagccatagcagtagaaatagaatcagttaaagccccattgaaagtcactggaggaggtagattattctcactattgctttgattggaatatgaaactgtcgacttcccattttcaagagcattgaccaaagaaccgccttcaccagcagaagctttttctgtttcactttgaaccatttgctgcatctcattttggggattcgaaacggtattagtatccaattgttcagaagctactaccgatgcatcatcagttcccacattcggattgccctttcctgcacgaaccttagagaattttttcttaaagtttttcttcctaaaccgtgccttctttggctttggctttggagatttcagaggctcctcaacattgggatttgattcgaggcttcgtttcttgctgggaagcacagtcaactgagcattttcaatttgtttactgtaggactcagaagcactggactggatagctaaaagtgcagttctagcagctttaatctcagcctctttttttgttcttgctgcagcaccaatatatcgaattcccccaatctcgatggaacatgaaaagagagctgctcggccaggggcttcatccttctgacattgatataaagggatagcatagttcattttctgagtgtactcctgcagcagattcttgcataatccagtttcatgctgggaaagcacacacacaaaacagtcatcatgaatgtgatcccgagggctcaatataaaccgcaataacacattggcaaagaagggaaaaaaaaatagaacatcaaaacagcttttttttctttgtaaggacaagaatacagccatcttatattatccgaaataattatagctagcagatgtagctgaaaactgaaagagtcactaacaagatctacattaatcaatcatttgcttgcagggtttactcagttctatttctttgcaacaccccataactaaattaatcatacaaggaattagaatattaaagaaacgatgtggtctgcttttcatgaactctgaggttaatctattaattctcattaaacaatcctacttgataagtaaattattaaaatactagaaaggctaaaatagaaaaaaacttacaactggttgagagatgcattgattgacatcacggctgccaccatcagatttagctaactccc

SEQ ID NO: 2965 - DNA, 2365 bp, Cannabis sativa
aaatattatgttatattttaaaatcccgttgggtttttgtcgaatgagattggggttggacagatcaaagatgaggagtataatcgctagaatggacgagaggctacaaaggttgaagacgaagtgaagtgtgcgaatcaatttggggttaaattagaaagagagtgagggggcaaagacgtttccaaatgaggaagaagatggtgtctgctagggttttgaaatgagggaagagatgaaatgaaatccttttggtgaaaatgggagtttcttataaaacttaaatcttttttgcttcggtggataatcgtgggaaattttttaaaacaattagtgtcacttttccactgaagcaaaatgcaaaagacaatttttaaaatttttacttttttcatcggttcttcttttagcgtcggaatataaactgacgccaattgatattttttatcttcagttatactctgaagcataaaatctccacttattttttgcctcggtcaactattttggtgagacgcgttgaccgacgcaaattaagctttttgtagtagtgttaaaatatttgatttatttattattattacaatagattttttttatcagtttgattacacagtaatttttaaaactttgtttattaaacataatattttctccttaccaaaaatatatataacataatatttattttattttttagataatgtactttttttaagaagaaaatcccaattcttctttatatatctatccctaaaatattatgttatattttaaaatattacattcttatcaaataaataaaataaataagtaaaccctacataatctctataaattttaaccaatacataaaactcttacaaaaattaaatatatatcccttaaaattttaaaacaaccaaaatgtgagggagataagaatcaacctagcacccacacatctgtataaaccatctcttaccaattgtcttgtaagacttttatgaaaattattgaaccaaaatgtatatatgtatatattatatttttatttttatatatataattttaattttttggggtcttcaaaattgtggagcttggggcctaggccccggctgccccacgtataatcttaatgtctatttcttgaaaataaagcccacagtatataataatcacataatcatataatataatcaattaatgttaattgtcttactaattcatattctaattatgcggtcattacaacttttatatgccacttgaatcacataatttggataaaaattgactgagttatggtcatttttactgagcaatgtgtgttttttaaagtgactgagtggttaggttgacatttgggcgcccatgatgagataaatgttccagatcttagtttcatgggctttaggcatattttgagatgcttgaatgatgttataactattcttagttcatttttcgacattggtgaagttctcttagcaatcttacttgatatgtgtggatgatgctcgataaatctttagtgacgactagatgatcacgtgcacatggatgtcggtggacttccacatgacacatgtgcataagatactgacttgaggaagcatccaaatcttatttgtcccaggagcaaaactgccattttgatggacagaacactaagtcccaagccaaatgtctagtgatgcttggacgctaaatcaccactcgggtgatatttctactgattccaagtttcatatcttgtttgggagaaaaaataaagaataattctcgagacaaaatcccaatcaaatcaacaaaactatgtgttcatgtagaacacatcaacctgggtgcccagtgttaggggagttgtcaccttaggcgcgtagcttttcatttgggctccacatggctttgtttgtttctcgaaagcatttgtatcttcattgtggatgagaataagggaaatgcccaagaaacatctctggaaaggtgttctggagtgccctaggttaaaatatgttaaccaggttgtcgaagatggcctgggggcctacactaggcacctagatggggggcaacatctccgattttcatcttgttgatatttaatcttctttttggtgataagtattccacagatttcaatttcatcaaatttttatgtgcgtcacccagtgaaacaaaattggtgcccaaattaaaatgtcaacctaagtgcccatacatagttgggaatgggctcatttggtgttaagactgactcgcaaaatgtgcatgtggtgggtcttaaaaatagactcaacctagtgctctcataccaacggtaacaacccaacttttaaacccaaacattacccataaaagccattaattttttttaaaa

SEQ ID NO: 2966 - DNA, 1566 bp, Cannabis sativa
cccttgttctacaatttttatagctgatgtccttttaattttccttttctttcttgtctttagagaattaagtgtacaataatgtgaggactgaggagctgttggtgtcgtttttcgacttgtgtgacttttgatgctgctggtgttgatgacttcactattcaatcttatcatgtctttggcctagtgtcgcgctgctccttcggtttctatcttgtattctgatactgatggatgtttgttgactgtttgaatgtaattaccatgaagactgcatatcgatttcgtttttctggttggccaatcctcttttgatgttgatgtggtctatgagagtagtttttttttatgtttctggtttgtgtgtggatttcctttgttgtgtgggatttgttaccacggtattgatcttcggccacaagtgaagttattcaataaattcaggaagagatcactcatggacatgtgatcctcttctcttcttaaaaaaaacaaaagaattgcttaattagtgataggcttttcctatcattcaatttagaattaaaaagaaaagagatgagaaaatggaaatctgatattgatagccccaggattttgagagcctggtttctccttacaatctttagcaaaaaaaatactcaataccctcacaaaacctcataatacattatttatatcccagccacatgacaaaaccgtgtgactcgcccatacccaaacaactctcacaaaacagaattatcccctatggcattcccacccttaggtcccctagtcctttttttcaagtgtaaaagttgtgttatttgtagtttttttttttgtctctggtttgtgtgtggatttcattgataaatgaatcagataaatacatacattcattaatgatcataaaacttggttggtacaatttgagatgacaaaatatgttatgtctttccaacttgcctattatgtctttgttccaatccaacttggtatggttatttagttgtttctacagctactgtggttggctgctataaaaaaaaaggggaatatacttgctataggcacctgtttgtttgatggatttgctgaaagtaattgtcagaggattgagctcattgctgaattagaactgaattagctcagttccttctaaataaataagcaataacagtaatgctataagctcagccttgtttaatttgatttgtatttctctctttaatttgatactgatgtgatgtgaatcatagtattttatgatatcacttcatttgttgttcctttaaacataggtgtcacatttaatctatatgcttcttaaacatgtaatagtaagtatacatataatattgtcaaaatgtaaagagattagagactagtaataaataaatagattttttacaatataaaacaaaaatgaatttaaaagaagcaacttttgccggaaccaaagcaaaaccatgtgcatatataattaattactctcactaaaagattcttagcataattaaaaatatatcttcttgttgatatctgtatctgaaataagaaaaggagagtgaacttcattca

SEQ ID NO: 2967 - DNA, 3437 bp, Cannabis sativa
aggaaaccgcccttgtttcaaagagaaccctcgtcattacggcgtcgtctgttttttgtttgcgtggcataggaaatggccaaaacgacaagacaagttcattaacgcttattgttcttaccgtcgttcatgagaaaacgacatgaattttatgaaaacgacaccatacttatacatctgtcgtaaaaagaggatcagttctttctagaatacgagattagtaatatagaacaatttcatgacattctttttttatatatataaaatatgaatagtgaatatttacttaaaagggtcaaagcttctagtcgatgaatgccatttacttagggtcaaactttttagtcgatgtcgtttaagtataatactgagttggtattttaagaagctttcgaaacttaaaaactccgttgatgaaaaagctctaaataatgttgggaaacatggtaagtttaaagctaaatctttctacttattctttgttcaagctggaaaaattgattatggtgcaaacgtttggcataagttgattgttcacaagcatagatttatctgttggtaagcaatgaacagtcaactactgactagagatcacatcagtaaaattcttcatattcccactaagcgaatcagtctcgataaaatgcacctaaaatgaacatcatctaaccattgcaaactcaggctcaaaatataactaaagcttccatcttctcgcatttaaaagttcttggaatcagtttagaaagagcaacaacaatgctacctaaactgttcattacaattgcaccaattccagcagctcctttcaataaagcagcatttttgttcaagcccacctgattgtggtcggattgatggtgaagaagtagcaaaatcaagaaaaattctagctagttttgcaactttattgtgaacctcagcattcctctcagactagatctataaaacagtaaagaaaacttcaaatcttgctttgagaggatttcagatacatcaatcaaataattcttgcagctcatttgtgatatattgccatagcagcaagcgcaagcctccatactctttttgccccattacaccagagaaaagcatgagttgtggtttcagaatggtattgacatatattttaaatgaagtcaacgatgaattaaagtaagaatcaatcactgatttgaattatatatttatttatttttattgacaataataaagacatcttagctcaacgaatttctattgaagcattgttatacgttccaaaatttaggttaaaagctattttattgtgaagatgtgaaattcaaagacaatcatacggttcctgacaaagcctcttggccttctgaagcttgaggctcagtttcaggctcttgcctctggaagactagcttgtgctgggggagctggccattggtgaaggccgtcacttctgtgtcgatagccacgcagtcttcttccttaaaatctcctctcagtatgcctttggcaagttcattctcaacatactgctgtatcacacgctttaccggcctggcaccatagttaggatcatagccaaggctaccgagaagctcgatagctgcatcgcttactgtgatcttcattttgcgatctgcaatcctcttttgcactcgtgccaactgcaataacaaccgtagtgaatcttagttagcagagggttcaagaatttccacagcataagataaaaatatagcaagtaaatttctggtctatgaggagaagatttacctgtaagcgcacaatgctgttgatctgttcgcggtccaggggttggaatactatgtactcatccacacggttcataaactcagggcgaaagactgatctcgcagcttccattacgcgttgctttatggtttcataggccaactcctttggtgaggtctcatcatctgtgttgagaatgtactgtgaaccaacattggatgtcatgatgatgacagtgtttgtgaaactcacggtgcgaccctgcgagtcagttactctgccatcatctaatatttgaaggaagacattgaagacatcagaatgtgccttctcaatctcatcaaacaaaataactgcgtaaggcctccggcgaacagtctctgtcagctgtcctccttcctcgtaccctacataaccaggtggcgcaccaatcaatcttgacacagcatgtttttccatgtattcactcatgtcaattctcacaagtgcttcttctgtattgaacatgtaagaagcaagggccttagctagctctgtcttcccaacaccagttggccccataaacatgaaactagcaattggcctgtgaggatctgatagacctgctcgtgatcgttggatggcctcagcaacggcagttactgcagggttctgaccaaccacacgtttatgcagctcttcctccaagtgaagcagcttttccctctcagactgttgaagcttggaaacaggaataccggtccatttactgactatttcagcaatatcatttccagtaacttcctctctgagcatagacttccctgatttcatatactcatccaactctttttctgcagctgcaagttggcgctgcagtgagttcagactcccatacttcagttcagctgcacggttaagatcatactcccgttcggcctgctggatttcaaggtttaccctgtcgatctgcacaagagaaaatggatggttaattcaaactccaaaactttgtatcttccaatttgaatagaaaaaacataatcactctgtactaatattaataatgaaatgtaaccaatggaacaaacttaagattcatgacagtaagaacatttaaatacctcttctttgattgactgaagcccggtcatcacagacttttcatgctcccattgctgagtcaactgagcttgtttctctttcaagagagacaactcagcatcaaggcgactcaacctgtctttagaagctttatctgtatcgttcgtaagagataaccgttccatctcaagtttcagcactgaacgattgatctcatcaagagcagtgggtttcgaagtaatctccattttcagtttagcagccgcttcatcaactaagtcaatagctgcaagcacaaatgtatattagcattccttgccatgtagatgtgaggcaataaatctttttgtaaaattaattcccgcctaacccaaccaagaaactataacaattgctatgtaagtacccatcagggacttgaacctcaaaccatatgggagcaaaccccatgcttgatgtttgagctatcactattggtgaagctataaatctcaaacaactaccaaaaaatcatataaatttaagtagctgaaagaacaaataaattttaagtgtcttctgcttaaagttctaaaatgagcaaatttgccatgtccccaaacacctcattttgttggtactct

SEQ ID NO: 2968 - DNA, 1131 bp, Cannabis sativa
aacttcctgctaactcaatttctcgcgtccgataaacacttctcttcaacaatggtttggaatctcctcgattgggccttagtgggggtctaatgttactttggaaagacgatgtcgatatcacactcttaaactttagtccaacatattttgattgttacttgaggatggatgactggccaactttccacctcacatgtttttatggtgcacctgaagctcacaacagatcagcctcatggattttgcttcaacgatttgcggatgttgctcctcacattccttggtttgtaattggcaacttcaacaaaattctttccaacagtaacaaattggatggagctctccgtagtgagtcacaaatggaagcatttagaggtgccattgacaaatgttgtcttcatgaagctccttttgatggtgatccatacacttggactaagaaccgaatgaaaacaaacactattaaggaacgccttgattggtgcttcgtcaactatcattggaagacttttttcctcacaccacaagttcagcatcttgacctttttcagtctgaccaccgtgccatttgtgctacatttgatcttcttacaacacaaaacaacactgccaaacgtaaaagcagatttcgcttcgaaaaatctggttgtccgaccctgacagcaaggaaattataacatcaaattggtctgtctctgctgcaaatgatcctatttcggctattctcaaaaatttgaattcctatgctgaaaaactccaattatggcacgaccgtaagtatggtaagatgaaaagaaatatcaaagattgccaaactaaagtggagaggctcaataactctcagcctcaatccagtagccactttgatgaagtaaagcatgctgaaaccattcttgatgagttattagaacaagaggaaatttactggcagcagcgatctcgggtcgattggttagcttgtggagataggaatactaaattttttcgtgctaaagctaatgccaggaaatccaacgaccaaataaaattcctcctcaacgatgctggtgttaaggtatactcaaaaaaagaaatctcctcagttgttcaaaattattatgctgacattttcacagctggtcatattga

SEQ ID NO: 2969 - DNA, 2019 bp, Cannabis sativa
gtggtcttgatgctgaatatctaaccattctttgtcaacttgaagcacaggcaaagatagggttaacctggcaggagctgcaggaaacactcctaagcttcgacagtaagcttgaacgattgaacctactaggttcaagtgcgaagaatgcatctggtgcaggaccatctgctgcagtagcaaacaaacagccccaatctcattatcctgcaggccgtggcaatttcaacagcaactatggtcgaggaggcagaggttcgaactatcacagcaataatagcaacaacaacagaggtggtggttcaaatcgtggtcgaggcaggggtggtagaaacccaaaaccaacctgtcaagtatgcggtcgatacgggcactctgctgccatatgttataacaggtatgatgagtcttttatgggtttcactcctggcaacaacaacaacaacaacaataccagtgagaagaaggatcctagtgcttatgttgctacaccagaagtagttgatcattaaaattggtatgctgattctggggccagcaaccatctcactgccaaccaagacaacatgtccaacaaatctgtctacaatggtaaggatcgtttgactgttggtgatggtaatcagctacatatctctcatgttggttcaagcactttgcaatctgacagtggtaacaagttacttttgaatgatgttttacatgttccaaagattgcaaagaatctaataagcatttccaaattaactgctgataataaagtgtttgttgagttcttttctgatgtttgttttgtgaaggacatggaaacaaagatggtggtgctgcgggggagacttaaagatggtttatatcaacttcaaggtgctaccaaacccttacacttagagaattcaagtcctggtttatccaacagtagacccgagtcactttatctttgttttagtcctttttctgcaattgttgagtctatgtctcagtctaagtcgtcttctagttcaagtaaagagtctgtgaaagattttatggcataggaggttgggtcatccttcctctaaggtcttaaatcaagttttaaataatgccaatgtaaaagcttctatgaatgagaatttactattttgtgaagcttgtcaatatgggaaatcccatgctttacctttcaagttatccaaaaatagagcaaccaaagctttggatttaatccataccgatttgtggggtccttctcccgttatgtccaacaccaatctaagatattatatccattttatagatgactttagtagatacacttggatttaccctctcaaagctaaatccgatgccttaggagccttcattcaatttaaaacaatggtggaaaatcaatttgagagaaagattaaaaagcttcaaactgactggggacgtgagtaccagtcatttagtaatttggttattgacaatggcattatctttcaacattcttgtccccatacctcagaacaaaatggccgtgctgagagaaagcacagacacatagttgaaatggggctaactctcttagcacaagccaatatgcctctaaaatactggtgtgatgccttctaaacatctgtctatcttataaatagactccccacacagttctaggaggaaagtcacctgttgaaactctgtttgacaaaaaaccagattacaagttcctgaaagtctttggtactgcctgctacccgtgtcttagaccctaccaaagccataaattccaatttcattccactaaatgtgtcaatctagggtatagtgaagtgcataaaggatacaaatgtctaagctcaactggaagactgtatatttctagacatgtccaattcaatgagagggattttccatttagtgcaggattcctgaataactatagacaagagtcagatgtaaccatttcatcacctgatgcttggtttgaacttcccatacaacaacccgattccactcagacttcccatacacctgaacctgatgacaagccagaagaca

SEQ ID NO: 2970 - DNA, 1773 bp, Cannabis sativa
aaaaaaaaaaaaaaagagcaataataaaaaacttcaacaaaagaaccagtacatcatatagttgaacatggcattcaagattaataatacataaggagtcaactgtacagtattggtactccaaatctttcaataccatgttttgaaaacattggcccttcacaccacttgaggctagctcaggtggcaaggagtgtgctcaaggctaataatacaggagtcaactgtagcgtattcatactccaaacctttcaacgccatgttttcaaatcattggcctttcacccaacttgagggctagctcaactggcagggtgtgtgttggggctgggattccaaccccatttgtagcaattaaaaaaaagtttattgaccctctaactatccccccaaagcttcagaaaaaatggcacagcggttgctaatggaattggatgttaccaaaaatttggtaggaatatggtttctgttacaggagtgtagagatttctacctgccataagactagagatgtccttggaggtcctaccccagcgataattagaggtgcatttctgggggagcaccttgaatacatctgaatatttgatgatgtgctaccccatttgaaaagcatagcggaggggacggaattggcctgaaaattcaacttagcttatatggattgatagatgtttccagttttccccactatcaacttaaactaagtttagttcaactcttggccactaccaattccttctctttaattcattcctgagggtgataacagtagtattcttaactcaatatcgttggtattactgtataaatgaagcaagctgtaaactaaaatctattgctagctagctatttcccaaaatcagattctctagaaagtcgcaaactttcagagcaaataaaataaagtacgcattgtgcaaacgactgaccagctaaacataatgaaaaaactatctctaaccaaattagaaaattaagagtaatttcataaaagaactacagttctcgttatacaaccagattcagatctcagttatatctaagcataactccactgccaaacaatgacagttttatttcatttcttgtactcatagtacaccatctacgcgtaagtaaattatgtaatagttaaattcatccatttccattaatttgagacaaaactcacacacacacacacacacacacacacacaataattcaggaaaaaatagtacctcccgagaacagttgcgagagtgttgagataagtctcaatcatttgctctctagtgggagcagggtctttggggaactccataacaatgagccagtggttgtagtcacagcctggcaacataatcgtctccctctgctcattgtttttgttgcttctcctggacgagtaatcggcgtcattcgcagcccgaacggctagctttggagtagcagagcgagtggaagaccaagtcacagagacgaatcggaaagggtgaggagaaaattgatgaagacgaggtgagagagaggattggggagctgatagtaaggttttgggcgccagagaaagattggcagccatagctatggcctataaaccgaaacgaacgagaaagttggacagataaggaggcagaagatatttcgtatttcgtatttcctttttttctttggctagaagaattagaaatgcgtatatttgtgaaatgtttggtcccaaaatggattgggcttaagtattgtggtctcaggtctgtccttgcaagtgaagaatttcaaaacaattag

SEQ ID NO: 2971 - DNA, 1109 bp, Cannabis sativa
tatattatatatatatatataaaaataaacaagacttctcattagtattgaaaaaactgaatataccattataaatataaaaatttgataaaagaatgattaaaaaaaaaactaataaataataaataaatataataaattaaaatttttaatttgtttcttttagtttttgtcagttaaataaatatattatatataaaaatgtataaaaaatagacttctcgaaaactgaatatttttaaaggatatattaaatcgaaattattatttttagaaaaggatgaagtagctttaattaagagagagaaaagagaactctaattattttttatttttttgaagtaattgtaaagatgatggacaaagagacacggaacagttataaagagggggagggaaactaagtcctctaaataatatccttattctgtcgtagtgtcgtagtgattctctagcattcttatgggctgcactattgaaaacacgagagatgtggcgcatagaagcattagggaaaagggatagggattgtctgatcaactgcacaacactagacaaggctgaattgtccttccaatgattgttgacccttggaactaattgtagactatttgattcaatggactcaaaggggatcttaattgtagaacaccaatgcagaccttctaaaagagcttgagcttcaacataaagtggagtggaagctccccatttgtgtatcgaaaatcctgctatgtgatagttttgactgttacggatgaaagctactagtcttgtatttaggtggttcaggttcaaagcagcatcaacttgaagagtgtattgaccatgttgttgagagtgagctggcaaatcctagagagataaggaagtctgatttgatgcaggagaaatcgaggaactggagcaaggagatgaagaatgagctgcctgataatcctacaataaagaaacaaccaaatcttctccctcaatgggagtgttaggagaacagtttaaaagagcattgttttttttttgttccaaatctaccacactaaattaataaatagagtaaatgtatcattattaaattgttctagacttctcatgtaaaactctttgatgtc

SEQ ID NO: 2972 - DNA, 687 bp, Cannabis sativa
atattaattatatataaattattcatttaattcaacacaagaataacatataattaaggttatgaaatgcagaaggcgtagagtgaagttccagtggtgaaagaaaggaaagcaccaagactaacattatatccattcccaacaaaaatacacccatcgctcactgacatgccaccataaactgatgccccaatctcatatgaccacaaaatatgtcctgtttttgcacttagagcatatatgggtccttttttatgtgtggaaccaccaaaaaccactccattagccactgtaacagggccagaagcagtgtcattggtaggattagctgttgaccatagaattttgccactgccagcctccattgccacccaaccaccaccagtagtgttctttgtagatggctttagagtaaaattttttatctcagaattggcaatgttagtgtacaccctcttttcgtctgtggcagctccccagtatcctcctccagcagcgccaccaggtccagcttcctatttttttttttttgaaagtaacaaacaaattcattgaaaatataagaataacgttatacataataactatatacggtaattttcctttcaatatatatatatatatatcaagattagattagtttgtaattaagtatatataatcacttaccgtaaaccatacaagggc

SEQ ID NO: 2973 - DNA, 666 bp, Cannabis sativa
gtctgaaataaacatacaaacacatacataattagtactatttcgtccaaataatttttgttaataaatttacaaattaataacttaataatttatttagtacatataattctatccaacatatagaaattgtacttattatgctctaactagatcatttaggtaagtgtcaaagtttgtaaaacacttatcgtatgttaaagtttgcaatatatattagggattatatattttataactaaaaataccataaaataaaaaaaagtttacaaaaatacagatttatagcatttttttaatatttttatggggtttttatttattttttttttataaaaatgtgtaacagttcacagttgtttcatgattgcgcgctttaaaaacaataatattgtttttatattattatatttttgcaatttgaatataacattgtttgttcggaaaaatgtaagcacaaaaattgaaaaaatcaatattcgtaattatatatatatctgcaacaaagtaaaaaaaaaaataaagaaaaaagcatgtatttgtgtaaaaatctctatatataatatatttttatatatattttctgaaatataatagagtattaattaattaaatttggataggtgatttgtattaacaaccttaggttaatcacagtcttatttt

SEQ ID NO: 2974 - DNA, 833 bp, Cannabis sativa
ctggtggtttgtaagtcgttagcacaaaaagtaagatccacatcggcagataggcaggcgaaagtattattagtggaagaagaagaagagtgagccaaagggcacaagccttgaaagaagttcaaatagccagtcaaacctgagcaatagtcctcgtgcaattgagcttggcaatccaccatgttacaacccacacactcatcttcatgcataacacgtagcacttggggacactttttgttgagatcggttgtgcaaccaatagatctacaatctcttcctttcccacccttgggaaccacaaccatcggaagattatatcccgttgcaacactcacaagataagtcaactggccatcgcccatacccatggtgttgaaaattgccaaagtagtggttagtggtactgtactggatgttgagcttgagctagggcattccatggtagtagatgatccgcaatctccagttacacacgagaattggccttgtaatgaatatgtgcatagagttcgaccccatacgaaacctgaccaccctggtggaataaccactgtctttgcctctcctggccttagtgagaaaccagtattaatattattgttggagagttgaggagagcttggttttgattgtatgactggccaaatattgttgctgcatgagtttttgattctcaagaatgttggaggagtactcatgatcaaaccagctgtgcatatatatatgtagccatcatatatatattttatatatattgcatgcagattataatttgatcttcaaaatgaaaattaaaacgagagatctattaatacatctatatatatata

SEQ ID NO: 2975 - DNA, 2223 bp, Cannabis sativa
gtggcagtggtgaagtttccactgttttcaggactttcagtgccaacccaaacagccccagcatacaaatctgagaacaagtaccttcaaaacaaagaatgaagaaaattgtagaggaaaacatttgtaatgtaagttggttaaaagtaagtgtgagaatttagattgaataggagaaaattcaaaccttccatagaagcatggatcagtcattgacctgtagaaatagccacctatgatagaggcagatttaacactagagtttaactgagagtgagtataacccatgacaggaaatatgggctttatggatttggcagaagtgtttcctccaggggactttgttgggtggaacaaaaaagagccttcataaactctccaaccatagttcccacccttttttactatatcaacctcttcatactgatcctgtaaaggaaattttaacatcagcaggctaaaacaacttctgcataaaacaagaaaatggcaatttcataagatcttaattatgtcctattgtgccaaactgaagttaataagacatgcaacctatcaagagctttagaatctgaagtgaacaaagtcacataatttgtctggaaactacagttagtttacagaaatatttggcaagaactctagaaatgaacaattggggaatatttaacaatgagagaagttgactgatcttaagtatgatggagcaaaagttctaaggctgcaagaaatagtgtagacaaaataaacaaaatttccagtagaatagctattggaacaactgtaatctacaaacctggccactatccccgcaaagaaaatatgaaggccgttctgaatcaaagctacagcgccaaggattactaaaacccaatgcccaaatctcaggctccaagtccttgtcatcaatgtatggattatctcttggtatggaatagtttccccataagacttgttcttgtatttcctttgtacctgataagtaaacagcagaaccataatgagtgtcttacaaataagtaggctgatcagtgaccacacatatacacaggccttacttggtatattgtctatgtcaatcctcaggacttttccaagcaaagacttcttgttctgtgcaaaattataaggatcatctcgatgataaccatcgcttgtcatgaggtaaagatagccatcttcgggtccaaaaataatttgaccagcatgcccatccttgtcaggaatggctaatgtaaatatccttctcacttctttataactctgctcttgaacaataagattgatcaacaactgtgataagaaatacaaaatgactgaaaattaatgagtaagaacaagaaaggctccacctcggtctgattggcagtatactcagccacaacgttgtgatattggcatggctgaattcccccttctgtaccaagttttgagggatcacaattcacatctgtattgcaagaacacctccctgaacatcctggatttgtcattttatcacagttgtaggagatgaagaaacgaccattttgcacaaagttcggatgaaatgccatgcccattagaccatgctcagggcccaaaagcacttcatcagtaatgtcaagaaaaggtgtggattcattcagctccaaaatcccattgcaaaatccttcatcaggaatagttgccaaccataccttaccctcctggttagaaaagaaagctttctgggagccatcaggatgaggaaccatgttaagataagtcccatttccaatcctctcaaggcacaaaccctctggctctggaggtgaaatagcttctactttgtttagtggaaaacaataaagaatcaatggtgagaaaaatagtaaaggaaaaccaagaaaaccattcatttcaatgcacttaaaaagcaaatgaaaaccactcgttgtcattacagtaactctcatacaaacactttattgatttcataccaattactgtgtagtgtagttcccaaaccacggtattcaagaaggcaaagggtctaggagaataatttaatattgagcatgcagccatatcaagtagagttcacttaaattttggtgatggaagagaacaaattagatttctttatgcagaggttgattactcgaggctgttgtctgcttttccacagcactagtccattttccttcttatctgcatgtgttggcgtgagtgtagagtttggtgacttatctaatacttctt

SEQ ID NO: 2976 - DNA, 741 bp, Cannabis sativa
gagtatactagacatcacgttgtagcaaaaccaaagagatcgtagacgttgagcacgcgggcagaggtagatagatagatagacttcaaacatttgttggaacgtcttgtcgttttcgcacatgggtttcgttaaagcagaggagccacatgacttgggctgatttcctaaataatatgtttcaacgaaaatagtgttaaaccacgtgtatgtcacgtgcgcagatcaatttcccaattaaccattactcttcttctcagctagcctctgcacattgacttcaccatactcattactcttcatcatcatcatctctgtccttctctctctaaaagactaagaaaatacctaaagcgatgactgaagaaggcaagaagaatcacccacctggaatctccgccgaccagtacggtaccttccaaggcgtagccaattatcctcctcctcggcctccaccccctgccatcggcttccctcagcccgtaccaccgccgggagccgttgatcgctccggtcatccatctcctcacatctatgatcatggatatcaaacagttaccggtaattacttacaatcccttttctttaaatatgtggtttttcttgggttgaatacatgtctttttaaattaataataattataattagatgaaatgaaattttggggagaaattttgattttttttttttttttgaattgggaactagttcgtttctattggtattggatgttgttaatt

SEQ ID NO: 2977 - DNA, 1994 bp, Cannabis sativa
tacaactctataattatggtgatccaattgcgttgggagcttgacttttttttctttcaaaattgaagtaaattggttgattgggatgttggtaagtattaggggagatgcaatttcaacaacttttccacatgtaacatgttcaaaatacaggttcatggaggctctagtggcattggaacatttgccattcagattgctaaatacataggagcgagagtatttgtcacagcaggtctggccatacttgtttatcttatgacatatctgctgtttctgttgtattcacatacttggatcttccttaccaggcagcgaggaaaaactagctttctgcaagaaccttggtgctgatgtttgtataaactacaaaacagaggactttgtttccagagtaaaagaagaaactggtggtaaaggtactttactttgtagcagttacatattagtgaaaattctgggcctctattttctatgttgtgattgagaaaacatagttaacacttgggaaactgtaggtgttgatgttattctggatagcattggagcatcctatttcaagaaaaatcttgagagcttgaattatgatggaaggcttttcattattgggttcatggggggagctgttacagaattagatctccgtgctttgttccccaagcgcctcacagtgcaaggtattaccatctctattgagatttggttccatatgctcattgattttttttctttctttgagttggtctcttcagctcaacgtattacatttttttttcctcttgtctcctcttttttcttattgaatacagaagcaaatgatcatgttctagttttggtattactgttccgttgaatatgctttacctcttttatcatttgctgattgtgtatgaccacggcgcagcggctggcttgcgaacaaggactctagaaaacaaagcagctattgttagtgaagtggagaagaatgtttggcctgcaattggggctggtaaggtgaaacctgtcatctacaaatcttaccctttatctgaagcagcagaggctcacagactcatggaaagcagcgaccatatagggaaaatactgcttgttccatgattccgttaatgtttgtgtaagacaatgtttgatgtgtgcatacatacccatgtttactttagactttaacatgataataaagtgatttctactcaacgtcatatactgctagcgtaaatgaatactatgctaaataaaactatctcaatctaaatgttttgagctctgttgatctttaattctgtagtacttcgaagccttgtctagttgtcattatatggactagtaatctctaaaagatgttggggtatcaacctaagagtggcatcggaagaaaaagcaagaattatattgaatataagtgatcaagtgttccacctattctattggaccatttgtttttttactaatttggtgtagaatttagggatgttcataaaatatctaatctaatttgtaaagtgttaatatctgtacttgtgcggattgtattggattgaaaaatttagaatctgtatttgtgtagattagatgttgattgatatgtaaaagtaatttatctaatctcattcacatatatttatatattttaaaaaaaaattatgtatatgtatacaattaatattttaatgtaaaaaataaattaatacacataatttaaatatatttcaaaccttagtaaattaaatcaaatgtttattcttatttataaggaaaatataatttataataaaattatatatatttttatacatgtaatttttttcttcttttgaatttgatatttgttattttattcgttttaatttattgttagagacatgaaataataataatttattttattttattgttacttatatgaaaaaaattaataaatattaaataatttaatattaaaagtaaccgatctaattcgtatttttgcgaattagattgggttaaatttgagt

SEQ ID NO: 2978 - DNA, 910 bp, Cannabis sativa
tttcgtaaaaatacaaaaaaaatttatattatatatagattagactagtaaaaatagtgttaaattgcataagggccctccaatgctgacacctataatccaaaattcacaaaataactaattatttttttttgaaaagaaaaaattgggctgacaagtgataatagtatcaagttctgatagtattgccaactaaaaaagaataaacttttagtaccacaccacttaatattgggcctacatttacaaacaccttaaagcattggagatgctctctaaaggtattattatccaataatggctacaaataaataagaatatgaaaaagtgagaatatgaaatgatcaattttggaccggttaatttgggctatcatgtgggctatatatttaaggattatttatttatagacatatatgtacatatttagtaattcaagaaacatattacagtagtgagaaatagatattttattttgtcctttagtgaaaaagactttatcaaatatgtgagtttttgttttggtacttttattatttagatatatatctcaaaagataaggatcgtggcaaaaccagaagaagagagaaatcaaaaagatattggccacccacccaaaccaaataaaacttcagaacaaaaaaaaaaggccaaattattataaaagttttgtcctcgattattttatgttctgctttacaaaagcatagatattttagtatttgagtggtttacgttttaggaatgatttttaaattttcacatgtttttaaataattataagatttagttctaaaaatacacacaatactttaatcttttattttacctaaaatgaaagaactaaccgacaaattttttaataacaaatattattctttagcatacaaactgtgagttagttggcaa

SEQ ID NO: 2979 - DNA, 1983 bp, Cannabis sativa
ttcaatctttcagtccttgtattattcaaaggctggggttcaagaacatagaatgcagaatgtcgagtatcaagttggagaaagatctaaggaatttgaatcatcaagtaaaatgtgtgatgttaatgcaacacccatagcctgtcacagagagaatagtaacataagcagaccatttcatctcatgagcagacggttcaatgaatccacatctgtaaatgaggactcagcaatgcagcctatgatgctattggataaagttgcaggtagtcaagaaaaagacaatacaaactctgaagataacaatagtaaatggcacttgtcgtttagtaaagagaaagagaaaacaagctcgaattcctctctcgatagacaaaacacaatcagtgctgaaaaagttatttctgcagagcagctgccatctacagcaaaaacttcttctaagttttgtcatagaaatgatcctctaggaagctcctgggtaactcggtttgctccaaaaaccctgagttcctcgccgaacatggatcatctcaactggaatgctggtgtaagtcctaagcactccaccgaatgcctaaagcttttggagattaaggatcagtcctcagaagatttacagctggtctcgggtaaagaattggagaatagtgctaataaggttgaaagttttgatgatcaaaattcgatgtacagcttaaatcctatcttaccttcaactaaattgaaactttcgggtgcaatggcttctgtgtttgcaagaagattggatgctcttaagcacattaatctgtcaagagaaacgagtaattctgctcgtgccagcgtgaaatgtttattctgtggcttaaacgaccatcatttacaagattgttcagatatcactgaaatcgagcttgaggaactctcaaggaatgtgaatacatatggtgggatagatgaatcctcttgtttgtgcataagatgtttccaacgtaatcattgggctgttgcatgcccaaacacatcctcaacaaaatgtctaccagcagaatctaatgcttcttttggcgaattacagcttgatatcgtaaacaaagaaaacttgaccttcaaaacttgtaaagacacccaatttgaaggtgatgttgagaaacagttatctaagaaacatattgctacaagctctgggggtgacttgttgaatgaaaaacagataattcctttctcatgtcagctgaactcagatgtgccgaaaggactctttgatgctgtaagaagacttcgtttgtcccgtactaatatcttgaagtaagtaactatttaaactgacatatttacagtactaactatattacaacatttacaatacttgcatactatttcttttactatcttgatggtacgcatactgattaattatgttttgctattgaatgagataaagaaatggaactgaaacagaaaagcttgagttcagacaagtagatgagttgtggaagttttgaccaactaaagatatttccgtatatttattttctattttgcttaatgattcatatggttcttagaaatggaatatatccactgatcagtagagtttttttaggaaatatttacttaccatcaaattccaataaccagtttgtttgggtggagttttatcattgatatgtactttctttacaaaaactaagcggctagaaatgaatggagttatctaagggaaaacaacaatggttttagcatctaaaagtcattgttactccactgttctttacttgtattcttgacattttgttattttaatatataggtggatgaattcacatagctcactctcacctgttggtggattttttttgcgtctgaggcttgggaagtgggaggagggattagtgggaactggctaccatgtcgcttgcatagttggtataacaccttgaattacagcatgcttttctatcttttatcgagaaactcttaaatgatcaagcagtgtgc

SEQ ID NO: 2980 - DNA, 2205 bp, Cannabis sativa
tccatttgtgaggggtggattcaaaagagcttcttctcattgtggtttatacaatacggcagataaggtatatgaaaatacatttaatgatatttctctttacataacaatgtgatgaattcattttttacagaattactcaaggatcggaccaaaatcaactgcaatgtgacaatctggttaaactccgtgatgatttcgactgcagctaaaaatcattattcaaacattgtttgggtagctaccaagaaacttcacagaccctttcggggttgtgatgcgacagcttgtgagtttgccttgttgaatgccatttctaatggcaactcttttggtattgtggagagcgattatgaagttgtgataaatgttatccaaggataccatccttagaagagaaatatgtaattatttcattgcttcttgactaaaaaggaaaaaaaaaaaaagaccaccatcaagtaagatcatttgttatgttagttgtaaatattcacattcttacaatttttcccaatgaacaataaaaattgtggctcagttgccaaaattaagcagtgaactcactgtaaaaaaggaaagatattttcataagctctgtattttgagtcgatcttgtactaattatcttgaattatcattaagtaatttggtctgagagaaaatattacaatctaaagaaactgaagaatgagaaagagaatataagagagtgagaaagagagattggtttctgacttcaaaatcagattatcacattatctacaacatgaactttctcagcatggcaccaaagccaaccaaagaattcaagctcatcatgcaagaaaccctagcctctctccatttttcttggccaaacgaataagcccttgtctttgttttgcatcagcacctatagctttgcaaaactcagtaattacctgagaattataagaataaacaactaatataaaaaccaaatctttgggacaaattacaaattacatacaaaaaaaaggtcaaaactttataacagatatgtcaattgctaactaaaaattctcatattttctcatacctgtgagtgcaaagcaatagctttacccctaagttgattgaaccttttcttgccaataacatcacgtgccacaacaacaattggggcaaagagaccttttccttcattgatgttcttcatcattggttgagacctgattggcttcctcccaactcgaacataggttggtactgatttaaccaacatagtgtaatcttcaccagccattgaagtaccccaacttccatgaaaagaagagctcaaaccacctttaaacccagtagcagaaattgaagttgccataagaaaaagaaaaagaaaaagaaaacccactccaaagattagatttttaagcaaatcccagatagaaatttcggttcttttgctccctaagaaatttgtgataaattttttgatatgggttttattcaattatgcaaaaaataaaggatattttgtttttgggtgtggtagatttgagaaccttgggtttataaaccactgatgtccacacaaactagtggcttgggttttagtcacagtattttcaacaaaacgtatattatttgttaagcctaattacttatggtcccaaaaatttgggagtagaaagatgagatctgaatgtgaatttttagtggatgttatttccttacatggggtccattcataaccctttttttaaccgttgatcatggtgagaaatgatcttggcctttcattttagacacaccagtattgaatattttctggtgtagaaaacaaatatgtggcaaaatttgaataaaactgaaatgaacggtgccaaataaggttagtacttttcatggtattgacctggaatgttcacaaccaaacacttgtttaaaaaattgaaccttttgatttactatcaaagctgccacgtgaacaatttttgtgctcgaaagggaacattttcagagttttaggcataaatcaaagttctaagaaatagtttatagccaatatgtttttttatgtgaaacacaatttaattataccaattttctgtagaatgtactagattttttttttcaatgatttattttatatagacatacaatagctctaaaagtacgtataaattagtgttatgaaaacaaattatttaaataaataacgaaaatgaaatattattatttatt

SEQ ID NO: 2981 - DNA, 1132 bp, Cannabis sativa
aaaaacagatttacctgggataaggagatcccttgatgggcttttggccgtacttcctccaggcccacgaatcggacggtggatacgcctctcctttgttcttagatccctccacgtcactaatcggcactgacacaactctcttctgtacaccccttttactgagcacgtttccaaaaccgaaaaatccccgaaaaaatttcagtttaccaaaatttaaatacaaaattaaaaaaaaagatactcaaactcaaggctaaccttttcttaggtgatggctcctcaaacgaggtcgttttgttcatatcgtctccggaggagggagaatccggaccatttccagatacgtgttgttcgctgtcttctgggtaagacgtagtgtgaaatcgacggtccatgatcagggagggttgatcacttgagtgaatctggacccttgatttttgcgccagcagtaacctgaaaaaatattgagaaaaagagaagaagagagagacaaggagagagagatagagagagaaagtgagggtggagaagatggagacggaggccggaggggtttaatatgggccgtcatgttgacagatagatatctgtgtttgtttattagggacgtgcaagcaaacacccattaaaatattatttttattattattattatcttacatttataaatgtataacgttaattaataaagcttttttttttccttcaatggtgggttgatattgtagaactcgacctaggttaagatattatagaattcgctaattattggatttgaagtttggatgaggcaataaacggtccaaaccaaccaagtgggacttagacttatattgattaagaattttttattttttgttcaaagttaaaaaattcatttataaataagaagttcaagttggtgagttaattgaggtatagtctatgagctagcgtgatagagtatagataattgatataaatatacattatatgtggtggtagggttagttttttctcatggaaggactatatatatatataaatatataaatggagaattgttattgagtattggcagtgcccaatatcttttatagttagtatcttataattagttagggatgttttttaaaatttattttct

SEQ ID NO: 2982 - DNA, 1124 bp, Cannabis sativa
ctgccaaagtgttttgtagccatcgtagtcatcttcttcaagcacgaaactttactgctgtaagaggcggtatgcactttttaccgtgtaaaatcctgtcgacttcttactccaataccaggcatcagtaagcacactttcacccaactgaatcgataaaactaggtttctatctcttgcttcaaacatgtcatttatcacctccatatcccagtttctagatccaaccacaaataaacttgacactctttgattatgcagccccaaatgtgatgaaatagcatatggattacttgaatctggcagccacgagtcccttagaatactgatagagtgaccatcaccaatcgatcttctagcccccatacgcaccaagttctgagcttcaaagatgctttgccatataaagcttgggttttgtcctaaggaagcattgaggtaacttcctgtaggttggctaaccagtgagtcttcatttgtcaacaatctccacccttattttccaaggaaagcaagattatagtccctaagatctcgaaaaccaaaacctcccacatatttatgacgacaaagacgctttcaactcattcaactcactcctttgctagcagcccttgacttagatttccaccaaaattttgacatcattccttcctagagcaaatttccttagtgagtaacaacatgctcatagcataggaaggcagtgcttgagtcacagattttaacaagacttcttttcccgctttagacgaaaattggctttcccaactgaatattttcttctgcattttgtccttaataaaatcaaggatcacatttttatttctccccatagtacaaggcaaacccaagtagaaactattatccgaagcttcaaccttttccaacgcagcacacattctattacgagtttcctcatcagtattcttgctgaaaaatattgatgatttggcataattaacttgctgccttgatgccctttaatattcatggtgtaatgtaacacatttgaagcttcattgtcattagccttgcaatagatatagctatcatcagccaatagcatatgggaaactcgaggagcacccctggtaactttctgctttcataatgtttcaaca

SEQ ID NO: 2983 - DNA, 2347 bp, Cannabis sativa
  modified_base (1804)..(1808): a, c, t, g, unknown or other
gagagtatgatttattaaaaaataaaatacctttttttgccaatttgagtatactaattttaccaattaaaaattttgagttttcaagtgatgatgtgtcaaaatcagttcataggttttttggttataacttaacatatatatatatatatatgaggcaactgatcataaaatatgaataattttggatgaaatctctgcttccgatgcaaaatatgtgaactctattagaaaatatagatgaatcatttgcctctctattctattaaatctaacaactatagcaatttccaatttgaattgatttatttaattatgaatcaataaaaataatcacaaaaatagtcttaactaaataatgaataatttctatcaaaaaatactaaatatataattactaataataaataaaagtgaaaagattaaagttgaaaaacttagatgatgatcctaactaagagcattcgtggtgatgagagttgacgtcgacaatagtcgtggcatttgaggctgaccttcgaccactgagtattagtacacgtgttgaagacactaagatagttcgcgcaacatgatgcgttgattggttgatcgtgagaatagtacttataaaattgtagaatgcatgactctggcataatgttaaactgaggaagtgggtgatggtcgtgatgggagtattggagatggtgctagtagtggagatggccgtgatggtggtggtggggtgacaaaagagtacgtagtacaataattttggctatttacaaaccaataatggggcaacggagtagcatatttagtattcttaaaagcatcttaattagtgcgtttgtacaagtttgaattgataacacgttgcaaagaactaaagtttctagtaatccaatcccacaaaacctttttctcgactcaaaaaatcctatattaatattaacaaaacaactaattaatataacgccaatgaaaataagaaaaacttataaattacgcaaaattaattagtaccattttcaacggggttgttaacaaggttgcatcataatttagcctctctatacattcatccttgcgccctaatccaaacattgtaattgttgccggtacacatccaatcggtggaagtgtcgtcacaccaaattatcttgctttcatcccgtataaactctatatacacaacaaaaaaccatgtatatatatgcatccacgcatattaattgtgtacgtattaagaaataattgtacaattttatgattatgtatatagaaaatatataaatataaataattacaacgtacataccgtaataaaagtagaataattttggagaagaatgtcattaaactggctggtagagtaagtggcttagagaagcatttgcctctcctaccatttgctatctgttttgatagcaaactgcatgtatacatataggaaacaattaataaaattctcattttaaaaattataattattattaaaaaaatctaaaattttactataattaactataataaatgccattaattggaaaaaaaaaatgtatacatatagttaataaatattacgtacatttagatttgaggtgagatcataaccagaaccagcacagcagaagcaagaatagcaccccttaagagattattccctactttagcaaataacataacgatttaatttcaagattcccatttgagaattaatatcattgtttgaaaagataaaagtaaaaatgacttgagtgaaaaaatgcaaagttggcactagacctccctcaagtatatatcatatatatatatatannnnnatatatatatttatataataataacatggtaatatttataatttttttattatcattatgtattattatcaagaaaatgggtgacaaactttttgtttgagaatcttctggttggttctctgccatatggaggaaagttggctttaattaacgttgggatattatgtacatttaggtttgctgtgagatcgatcataataattttttcattagtgacatataaaaatgtcaagttttaatggtaaaaaaaaggaggaaattttttggtataattataaaaatatagttttaaatatataatataatattattgttgttaaaattaacagaaaaagaaaaggtcaaattaacaagtttcgtactattaaaaatataaatgcatctaattatatatatatatataatcatataagaaataacttatatgtacatacctaagtaatgaaatggtaaattttgctgcataatgtgtataatgtgtataatagttaggtcatatgtgctgcatagtagataggcaatacatattgttcacgaat

SEQ ID NO: 2984 - DNA, 591 bp, Cannabis sativa
ttccttctccaatttttcaggtacgttaaaatttaatatcatatataagatgaatgaactacttctcttattaatacatcttattatataggaactttatgtgaggctaacgcgaatagcgagcattgcaacggatatgtttgttggtagagaaagatttgcgacagttctattaataagactttcggagactgtgatcttatggctctcaaatgatcaaaacttttgggaagaaattgagtcaggaccacatccattaggtcctcttgggcttcaacaggcaagctattattgaatttgataaataattatcacataattaatggtgaaataattatgacattaattaatgtgtgttttgcagttttatttggatatggagtttgtgatgttgttttgttcacaaggccggtatctgtctaggagtctacatcaggttataaaagacattattgatagagctattcaagcactttatgctactggaatagacccacaaaggtacataataatattcatactatattatatataaaaaaactcataaacaatcaaatccaattcatctctataccatcttaattaagggtg

SEQ ID NO: 2985 - DNA, 828 bp, Cannabis sativa
ttagtccaccatactagtcccactcttccaatccaatcattctttcctctgctgtcaatttaatcagacatgatgccactatgttgtgacttgtggggtcccttaatgtcttgaaatttttccatatatgtcattataatttattattgtatggtaagaacaaaggtttcttatcaactcatagaattcgtttgtccacagaataacacattcacattggtcataaattaagtttgagattagttctataacaaattatcttcttctcgtgcttgttttagttggtttatctgatttgtagcagctagtctcaaccagaagaagaattacccagtggtgaattttggtcaagttggtcaattcaataaatcatcccaaattccaattaaaagaagctttgccactctaattttttagaaaattcttcatccaaatttaattttctttataaaatagcacagtcacagaatctgttttacctttcttttttgcactgcaacaagattttgattttttgtccatatctttatcagtcaccaccgcaaagcaaacagtaaattcacaagcttttttcctattttaaagtgagcacagtacttcaaaattaaaaactaatactacttaatatcctcgtatgtcttatgggtattacgtggagttttttttttctttccgaaaaatgccttaattctaattttggtgctatttgagttaaatttgatctgaaatattggcacagcttttgtatttgtgtttaaataaattagctataaaattaatactactattaatgctaattgaaaaatatataaaatatataattttatt

SEQ ID NO: 2986 - DNA, 1032 bp, Cannabis sativa
ttaggtccagtaacaagaaaatcatcaacataaactaacaagatgatgagattgtgtccagtgccataagtgaacaaagaagtatcagatcgagatgctacaaagcccttctgtaacagagtgtctttcaaggtttggttccaggcccttggtgcctgtttaaggccataaagagccctgtctaacttgcaaacgtgatttggtttagatgcatctatgaatccttcaggttgagacataaagacagtctcctcaagtgtgccatttaagaaggcattgctcacatctaattgcctcacatcccaactattcgacacagcaagagtaagtataatctgaactgttgcaggcttaacaacaggagagaatgtctcctcaaaatcaataccaggtgtttggagatagcctttagctacaagcctggatttaagtctatccaacgtgccatctgcattgagcttgactttgtgaatccatttattccctataacagtcatgtctgggagatatggtacaagggtccaagtacctgcttttttaagagtagaaaactcgtgattcatcgagtttaaccactgaggatgcttgagggcagctgcattatttttgggttcagatggaataagggcagagggtagaggatatttggtagcaaggtaagattttggtttgaaaatattgttttgagaccttgttttcatgggatgtgatctggtgaggacattagtggcaatgggagggattggagcagctgaggtaacagcagtaggagtggtgattggaggattttctggtgtgggatcatggttcactgctgatgtgggatcaggattcatttctggtatgggtgggaggctagtgattggaggtgcaggggatgtgttaggcacagcagggacaagggaaacatgtggcaatgcagatacacatgggtcagttctggtgtgttcatgtggaagctcagttcgagttgttgggttgaaaacatgcacagaaccataaactaaattagtagatgtaggagagtggcca

SEQ ID NO: 2987 - DNA, 1147 bp, Cannabis sativa
tttgtatatttataaaataatctcatgttttttaaaggaaaaagaacgttatttttatattgttgtaaattatagtatattttcgtaacgtaaaaatatattttttaaaaaatatttaaaaataatggtctataaaaaaaaaccataaagtacaaataaaaaacaatattccgtgaagaaaaaacataaacattttgttatttttggtatttctcaaataatccctataattttggttgttggaaaatgatttcaaagcattttgtttcacgaacgtataatgtagacttcaaaacaatctaattcgtgttttctaaatttttcagttttctacaactttataggaaattctaaaataatataatgtatgttatcatataaaaaaatgaattgttatttatacatgtatcaaaacacaaaaacacaagttgttttgaagcatgttatatatgtgcataaaactgatttttttaaaaaaactaatttccacattgtaaattatttagaatttaacgaaaaaattgtaaaatctccaaaataattacactgcaggtcatatgaaaaaaaacttaaattataattttatcttacttgtattgtgaatgtgagggaagatgctttgtggtaggcttggaggggagcagagattttatgagctatggtccatagatcgttggtctcatcagtacttagatcagcaaagcgtttcacttcacgttttgggcacacaagtacatgtacttaacactatatatgttaagtttaaccaaactgaaaaccatttactttagaaattatagatttagattatttttggattggactctattatatgatgctatatattgctatgcttactgataaagtttaattaacagttaatcccagtttaggcagaaccattaagcatgaaactttgggttttagataatttgattatacacaacacatatattacatacagtacggattaacaaagtagagagaaagaaattaaataaaggatatgacctgcaaaagaaaagaacctaaaataaatatcacaaagaaatgaaagtgatactgaaaatcaattaagagaaatacaagtacaacacagattaactaagtcaattaaagacagttttctttctcatttttttttttt

SEQ ID NO: 2988 - DNA, 935 bp, Cannabis sativa
attagtaatgcaagataaaaataatttttttttatacattttaaatttatttaaattacatttttattactagttagtatagttataaagacacttaagtggcattttatttgttaatggaataaaaatgaaataattttttatttttttcttttatttagttgcattttacaatattaaaatattattttactgaaatgagtattttttttttaaaaaaaaaaaaattcattccaatagaaaaactttaataattatcttctcaattatttttatgcagatttcattcatattctaatttctattcctatatttttatttaaccaacaagaccactcactccaaactttagctaataatgatgtgtttgtgtttgtgcaggcacaaagagcacgtggaaggttgattagggaagtggaagataatttaaagggaattgatggttttattgggaatgcaactgattgggaaaaagtatgtatgggaaatctagtaggaatgcctgtaattgtggttccaacaggtctcaaacccatctcccatccacctcccaatactcgacgaaggaccactatcaccactgccatttatgctcctcctcaacatgatcacattgtaattatcattatcactaataataatttttatgttgacatttaattaattttttaataccaatttgatgtgtctacatgtgtactattcttgcctcataagaaattaacaatagggtcaatggattttatttttgcagggtctagcactggcaatggcttaccaatcagtgacccatcatcacaagcagcgcccaccaattgatgacctcggcccacatgatgtgcttcacattccaagcccacctccttctcctcttccttaatttctaatcattactacgtcaaataaattatccctcccactcccactcccactcc

SEQ ID NO: 2989 - DNA, 1184 bp, Cannabis sativa
taagctacctgtttaaaagataacatatttttaagagtcagtcaagccactactacctctaatttttgtatcacacaaaataacaaaatacaataacgaacgaaaattgattaccaacatttatattggttccaaatacaatgaaggctaatgaaaaagcaaatgggaattaaacagttaaagatttaagccaagcacaaaacatatcaacaaaatgaaaatcaaaatttcagattattaataaaaagtccaaacaatgctaggcctaatcattgacttctgctcacaattttgattgacttatgtacgacactacaaaaaacatatgaattcatgatctaacatccaaacaggataggccagaaacaaattttgagacacaattagcaaaatctaatcacgtttcaagctttaatgatgaaaaaagaataatgctacgaattcccaagtctatctatcagatgggtgtacgaaaggtatttactttcacaaaaacccaatttatatgaacaaacattttcataaaatttcagccaaattaaagtgcatagatagagatccaagtttacctgaacgaaagctgtcatgacagcaaaaaccacgtagagatctatgacctgcggaggaaggaaatctgggtgaagatcgtgattttgggtaaacagaaagaaagagatgtgaattgagagagtgagaccttgagcttagttggtgtggctgcataggcagaacggagggattgaaaaagagcttgggcgtccttggttgtagatctggccatggcgtacgttactttctttctttttttcttcttctagttccaccactggcgttctctgccgctaggatcaacaatcaccagtattaaagcccttttgcccgcaggtcgtctccgctccagggataatatcgtcatttgacacaaaaattatttaaattttgccccaaaattttgttagaaccaaattgtgtacccccaaaatcgttctcacatcacatcgatcttacatgtgtaatttaaaattacggatattataacctatataatactaggtgagtttgtgtcaaacatttcatttcatctttttattttcattttcactctataattgattgtgataaaatataaaatgtaaaattaagatttaatattttaaacatcgagaagagcgtctgccctcctt

SEQ ID NO: 2990 - DNA, 953 bp, Cannabis sativa
gtagacaaataaaatatgtaaaaaatgctccaaaaggggaaaaaaaaaggaagaagaagaagaaaactagtgtgaaatgaaaaaaagttagtttactttaaaaagaaagattagtatacccaagggtaaaatcgtcaatataaaactttcgaagtaactaaataaagggattaggctattgagctgggttacctactccagttgaacaattcacctcccacaaccacaactgaaaaatcaataattgaaaaagaaaaataaataaataaataaataaatgcttctttcacttcaaatctagtaatctacagtttcattttgcactttcttttttgtagcgtttgactctctttcaccaagtaagagcatctaaaataagtacctatgtttttttatttttgctaaattttaattaaaatagtaaaaaaaattataatagagtcatttttattaaaagagtaataattataatttcttaggcaattttatatctaaaattatttatcaaaatatttttttttctaatttttttcatagcaatattcgttatagttacaatattaattctgttaatttttaaaaaaattcaaatagtttatagcaccgaaaacagagttcttgatatttcagtctaccatgtatactcaaaaaagttaaaatatatttttcgacactgtaaactattcgaattttttcaaaaatttataaggatgacgttgtaactataacgaacaccaccataaaaaaaattgaagaaaaaaaatattacttaaattatccctatttaattaagaattatgttgagagaacatggtttcagatactctaataacaattaacattgagcgcttgagtgggtagagttggcgatagctagatttgatcttagaaattaactaattaaaatgttaatagtgtaatttcttagtattttcgcttaaaaaaatggtttg

SEQ ID NO: 2991 - DNA, 1438 bp, Cannabis sativa
cttccccttgatacaaaacagccaattcactagaagatctagtggttttagctacaccatccgcaaaggaattaaaaatacgacttataaagaaaaggcgaacaaacgaaaggtctttcattacattaaaaatactgtaaaataaacttgatagcttccaatcagggatcttcttggtatcagttagggagtcaactgcaatctttgaatcggatagtaaaacaacttctttccagtcactttccacagcccaactcagacctaaattgatagctctaagttcagcatcaagggctgagatagcctgaattttctgtgctttgacaaaccagcaacccgaaagcctattaactgctattgctgcaattccagcagacccgttcacccaggcagcatctgtaaaaatcacaaagatcacctgatcgacactgggaaaggagagaggagcagcaactagaccaccttgagactcaggggaattctggatatcagaaatggtggggagattcttgaattgaaaatcctgaacacacttagcaatttcgactagagcagacataggattgacaggagtatcacaaagaagcaaggcattcctttggcgccatatttcagagaataagcagccaatgtacgaaagcacctcaatcctgcttgcttcagaagacaataagggtaaaacattttccaaacaacagaacaaattacttcctggaatctcctcaattctgatagggaactttccaccaaaccagagggattttgcatagctacacttacagaaaagatgtaatccggtttcctcttcagcatcacagattaaacaacttttgtcaggtaagaaatgaagtctattctttgtaggaatagcctcactcagggctcgccatagcatgattgaaactcttgggtgaataccagcatcccaaatccatttccaaaggtccttagtagggccaaacttccacagattctccacaagataggctgacttgactgaaaactttccatgtctagcattcttccaaaaaatctggtctttgaaaggaagaggaatccttggaatactgaggattcagatacccaactcactaccaaatatctgtaaaatgatctccccattccagcaatgatcaatggaaacatctgccaaggttttgatggtgtaccctctccctccaaggctagccataagatcagagaattgattgtaatcaagccagggaatccacggttgtttccagaaattaatggaatcacccgaagcagcaagagagaccgatcctttgaggatcgtaattcttgattgaagaatgcttttccattgatacgaatcattacttttctgcttcacacaccagaaatcttcaaacttacaatatttcttcagtaagcaggaaacccagaacttctccttaatagctctgcacacttttga

SEQ ID NO: 2992 - DNA, 1102 bp, Cannabis sativa
gtactttttcaaagttgtttgtcatttttgtcacttcagaatatgtaaattgtcttttcttggactcatgatcaattaatgaatcagtttgaaaatttgacgaggctaaattctcagacaatacaagacctaattaaaaaaattccactatataaatatatacatatattaatcgatggagttatatataaataaaagaggacattgattattaaagaagttaccaattttattctttctgtttttaagtgtgagcacaataattgcgactataatcaataagattatcagtccaccaaatgatgttgctattggaattagtatattcttcttcttcttgtttacacaaggagtggacaaaccacataataaatcttgattttctccgaaactatatattatatatccacataaaaaaaaaaattataaagttagtgattggtctgaaaaagataacatattcaaacagagaaattcaaacagagaaaaattgcatactttactaacagcaaaccattcttcgatttttctagaagtgaagctggaaccgagcctgtgagcatgtttcttttcaagttcctataagaaaaacaagattaaagctcttctttgtcagaagaagattaaagttgaatcaatgtactatacatggtaattgatagtgaatgacttacaacactcttaaatttggtaaagaagataaaaaatcaggcacgaatccagttaagttattgtctgataagtctctgaaatagaaagtaatatggtatttaatgttaatgtaacaacatttttagatttttcttgagaagaactttacaaactaattatgtatttgacagtacttacaaagattctaacatagtcaatttcgatatatgttcacttatactgccacttaatccactcgaagataagtccctgattatatggtaattgattaattagtcacaatataatgtacaattaaaaaaataataattcaaaattttaaagtaaatgaatcaaaattaacttacaaggatctaattctaggaggtttaaggatatcattgctacaatttagacctgcccataagtattttaggggaacacaaggatc

SEQ ID NO: 2993 - DNA, 1599 bp, Cannabis sativa
acaatcaccagtgagccaccaacaattacagccacaccaacctcgaactatggcccccctaaaacccactctctacacatttaaccatataactatatcacccattgcaaatgaagttgaaaacaaaaaaaccatagaacccttcgaacttctacctcaactgactggacgctcgctcctatttctttaagtttttgtgaagtttttccatgtaggatagtactgtgggaactaaagatttgttaatactatagtagctcgggaggttcccccaacgaaggttaagtataccaatttcaatgatgctttcatcaattttagaactcagatggaaaatgagcttagctgagtttcaagtatttcattcatactttctcagtgttggtattaaaataattttaaaattcctgtttagcctttagataatgggatgaggcatttcgtgagtcaatcttcattattaaaaaaccttccttcatcagttctctagggttttaccacactccaaactctcttcaacaaaaaatcgtattataaagtaattacaattttagtatatttatattcaagtttttagcaataattaacttaataattttaataaaattggaacggaatccgatagttgtttaactggtttaccgaattctatatttttggatcgaaaaaaggcaaatcgtctgaagcaaattgctactagcccaaattcacaacaaaattgacttccaaatgcagtgttttcaaaggttttatttaaaaaaatggaaaaacagacaacagaagagtacgtgcttcttcatctagaatctcacctcacttcaggacaagtttattatctaagtcatagttaataagctcaatagtgcagctcaagcaatactggcagtccatgttttatcccccatcgaatagtaagaagaaacttccaaacaatttcaatgtttagcttagagcatagcagccaattcataatgaagtagtatacgaaatttaagatggatggtaagccattgttgtaagaagcaagaagatacattcaaataagttatcccaagatatatttacatatttttgaactcctacttatatacaagatacaaatggtaaaaagaactaataattacatggagaatatttttgcatcacattgtttgcaatcaaggacttgtgaaaagcgagttatccgacttgatctgatctgaatgttggtttttccatgaacttgttatgtctggctaaatttgtgattttcatccaaaggaaaaaaaaaaaaggagaagattttcaagtcttgatagcaaatctttacaagaataaaaataaaaagttctgcaatgaggatccatctatatatatacatatatataaatatataattccaacacaaatatacgggcttattaaacttcttcctcacttgaatacgttggcttgtagcctgtaggagaagcttcgtgcttacataaagcataaaaatgcaaactaaacttacaacgaacaaagtttgtccatcatgcatgtatgagtaactgcatcccaaataaatccaaatagaaacgcctatctccactcttaagttaatttcttcttatatatata

SEQ ID NO: 2994 - DNA, 1040 bp, Cannabis sativa
ttggccaattctaaggtcaacaatcttttttccaacctcctgaggtttttgttcttaaggtctgaacctttgggctttcaactaaatgcataggcttcgatttttctttttaataagtcatttgtattcctcgaaacagtgttcaaatggcctaaaccacggtattttaacaacttattttttgaaaaattttggtaagtaatttttactttaggattattaaactaaaatatttatttaacctgagctaattaattactccaaaatcaaacgttttttggtaaatattacatacttctaggacttttaaacttaaatattcaattaacctgaattaattaatatatttaagaaacctaaacgtcttagttcgtttaacctaaattaactatgaagcctgaacttctaagttaaattaacctaagttacttatgaagctttaacttctaatttaaattaaccagagttaattacaaagtcagaacttctaagttaaattaacttgagttaattatgaagtgtactaaattaatatgaattttaataaggtagtggcttactttggattctgttgagcttcaatttcaggcagtacttcctagtcttatacttgtttgttaatttagttatttttttatggaaaatgtataatgttataaagatataatgtatgctacccccaagtgattaagattttagacttttcatcacatgttaaaagacaaaactttgagaaactatatatgaaatgaaaaattcattctttattcaggattcttgccctaaggcgtatatggaaattggacttaaaaataaaaagcaatgaaaagtgaaaaggaagctggccacccctagtctattgatagtatcggcccagttggtcagcattccatgctcttggaatttttgttccatctaacctccttaagcgataggttccatcacaaattttatgttggacttcatatggaccttcccatttgggtgctatgaccccactccaggctcgtcagagactggaaatacccttctcaaaacta

SEQ ID NO: 2995 - DNA, 1086 bp, Cannabis sativa
aaatttatacgtgtataaaattttgtcacaattacagttaaaaagggattgaaattactcaattttacatgaccaaaaataaaccattatttaactctataaaaaaaaatgtgaatcctaatattttactcataagaaattctattccacaaaaaaaatattataaatagatactccatcatatatatatttttagggatagatattgaaaaaaacaggtggattagtggtgagcaaataatattattattaagaaaaatgataataaccttctgattccttcctcgttggtaccagcatttggaacaggttcacgggttccggttctcaaattgagacgtgaaactggctttttcagtaatttcttaccaagttcctccagattacgtaaattttctggggtagccttatccaccgaagctaaatctccatgaagtgtgtcatcctatatacaattaatcaattatattcatatcatatatcataaaatagaatgaccataattaataatgatatgtatatacctcgatgcggaggacctcatcttgagaacgaaaggcttcgaaaacaagagtgttatggtaatcaaccatgtcagagctggcctccatgaaaacatcagtgatgggagtagagccctggtgtgctatccacgacagaggtccccacttggcacatgatttagcatcgtacttcttctcacctctgttcgaaccagtccctactgatacaagcagaaatcgaaaattttctgatgcgaatgtcgtgtagttgggatctttcttaaggataattttagtcacttcactaatcgcaaccagagactgcatgcaatatacgtttcatttcattaatatatcaaataaattgttgattataaaaattattaattaattgaattaattattacggggttattagcgcagacgccaccgtcaatgagatcaaatcgttcagattttccattttcatcggtgtttgtgaaatgatgagcaggaaggtaagttggggctgcagatgtgcctatgcaaatgtctgaaagatgtgcatccatcactttatgatcatccaccgtctgtatatata

SEQ ID NO: 2996 - DNA, 2584 bp, Cannabis sativa
taatattagacatcaaagacatttcaaattaggtgaaaaaatgtaaggttaaagcatgatggtgatgctggaacgcaatagaaaatcgatactctcagtccgtacagtttctattttacagcaaattatatatcactctaataatcctcctatatgttcggtatataacaggaggttgctcaagtaaatagagtacattgtgttttgtagtctttttgttaattcattcttttcatctagctagaagttattaagcttgggctgagtcctgagtcgtcttgttcaaagtagatcctagttggcttagatagttctagctattgtctatgaatagggtaaggggtcattttgtaaggagagcttagagaaagagtagactcttgtgaagagaccaatcctcttgaaagactggaataggagagatgagcctctccaatgcttgatttgtgtattgtttcagcaattcataaataattgaaagattggaataggtgagacgagcctctcgaatgcttgattagtgtactgtttcagcaattcataaataatttcattatgggtttccgttatttgtgtcttgattgctgatagaatctttaaactgaagaaaattctatcatactcaaataatgacattcacataaagttatgaacaaataaccttacttatttaggtatcttaggaagcaaattaatcaggcaaagaacttcaattattacatcttttacactaaactctaaaacaagaattaagagaaattgtcattacctatcaagaaaacaatttaatattattcaaatgtgtgaatatacattatgattgtaaaaagagaagccctacccccagtcgataggagccgaaagtgaaaatctttgcattggcatcttgcaccagttgctcattcaaacccttagcacgactaatagttttgacccatactttcacaatctgttccatttcacaagaagcaaaaactaagatactcttacaatagaaacaagtgttaatcaaaattcaaaataatgattatatattgtttcttaaagatcatttacttagcagtcaaacagagaaaacttccacctggtctagtctgccaagcacctcctccctacccacagcctcctcttgactctcatacaatccagcatcttgcaaatactgaaacatccacaaatcaatttcagcataacttcacataagagttcaaagtatgataagctgtaaaattaaaccttttcaagctccttcgttttcatcacatcatactctgttggcccacccaaagatatgggatctgtaatgcctaaacgctgcccgttattcttgttgcttaatcccgggttcgccatttagaaatatattgtcccaagtttttttttcttttttctttttcctctttttttcttttttaaatttctttttctttttcacagattgatattgttatggaacaaatttttgtagacaatattttagggtactcttttttttttttttccttttttttttataaaaattttatcaaatctgaatcaaataaaaataaacaataaaaataaatgtcaattataacagtattggctggactcccagacctacaaaagaaaaataacataacatccgaaaaagataataatagtaatattccaagccctaaacctacaatcgaataaaatacaacacaattttgtgattcacagaagcaaaaaccctaaccctagaaagatctcagaagcagcagcagcagctgaaaatgatgaaattgtacagaaaacgaataataacttgttcgtcagattgtcgagtgagattgaattgctgaaatcctgaagaagacaagcgcaacagatatagtttgaatgagagagacctccacatattaggttttagaacttttgggttgttgattttcaggtagaattaatgaaaacaagtaaatagatacaatttataacccaaacaaattcttatagtggatagagtcactgatcaccgctacatctgaattgagccacaatcaagctcagaccataaattaaattttgaatatgttatcgagcctctgtcgaggtttctttgagcttgtcaagctcagtgaacaagatcaatccgactactctgtcgagcccatgtcaagcccgaatcaagccatcgttgagttgaaaaaaaaaccagtaataaaaaattatcaaggcttatcgagcccgcatcaagtcattggccaaattttccaccaataagactattgtcgagcccctaatcgagcctcatcaaactcaaatcgaggtcatatctaacaaatgaaatcaatgctaagcgagccctatatcaagcatatcaagctcaacaaccaaaatgcagaaaaaattcactgattggatcactaacgtcccagcatcaaaatcaaagcaaagctaatgagaaacagaatcacctattatcatttaagcaagaaaaaaaaaccctacaactaaatcaaagctttgaaaaaaaaaaaaaaactcaccttcaaagagagagatgtccgatatcaagtaatgaaatattgaagagcttagaacacagactattgacaaactc

SEQ ID NO: 2997 - DNA, 1326 bp, Cannabis sativa
  modified_base (62)..(65): a, c, t, g, unknown or other
aaaaaatatatatacgagttagaaaaaattacgaaaatgaaatcaaaataagtattgaaatnnnnataaaataatgtgaggaaaaaattaaaaaaaaaatattaagagtaatttttaataattatttaagtttatattttttttaaataatagggtgtatttatcattttatggagtgcaaatagaactcccctttaattaatctataattagcaaagtaaggctctaacttagtcaaattattgtttccactgtgggagagaagaagctatagctgggaaagatccaaacctctcgaaggtttggagctttatttgtaatctcagatttttcatatgcaataagaaaagaacggtcctgtttggatgaacttctacttctgatttttagcttctcagaacacccttcttgagaaagctattaaagtcggcttttgttaaaagaactttttaaggctaaaaactgaaactcactggttacccaaccagcaacacaagtgttttcggagcttcaaaagcccaaaatcaatttttaaaagtcgaaccaactagggccactttcagactttattcaaggttcatatagggaaaattccaatcaaatcggtatcggaacaaggtttcacaatggctgcatttgaggaagaagtcacaaagttgagattgcatttgagcgaggaaatgagctgcttcagaaattttgtttatagagagatcaagaaagaattcggcaacacttttcaacaaatatttcaagcccagcttcaaaaatccttccaaacacaggttcaatagccaaaacccatggagattcatccaagaaatctgaagaaacatccaaaaatcccgaagaaacattcaagaaccagcacttttcatcaaaaggaaagccttctgaagttgtcatgtccagtccgatggaagtaatcaacatgagacaaaggcatcagcacaaaggaagagtcaatttctatcttagaaaattgagccaatttttgatggaactaaacctgatttttctttcacaaatacaacgaggaaaaaatggaggcatcaatcataagcttggaaggagaagctcttctttggtatcaatgcaacaatttggtaggagttcaagatattgttgttgacaatttcgactcattcaatatggaacacttagccaacaacttcttgtcttgcaataagaagtaatgatgagagagtactgaaataaattcattgaactttctgcaccacttggtacaattttggatgaactcgctattcacaagatcattaacaggcaaaatccagagtcaaaagtgaggtttgaatgtggaaa

SEQ ID NO: 2998 - DNA, 820 bp, Cannabis sativa
ccattttttcactcatattttttgctggtgcattttagacatgcaattaaattccaaaacctagttatcaatcagtctaattaatcatcattaagttgcattttatgtgaatacacgtcacattatgtacctatgaaatttgcaattaatgtgtgatgcaacctagagctagctatacattctgagaagcctaggctatatactttacttgtatcatcacctcaaatcaatcgagcactagccataatgagtgaacacttgtaacaaaaagtcatcaaatattgataatggatgagatgagatctctagattttgcactacaaagattttatgtaacaaaaacatatatttattaataaattactgcgtagtgagacacaattaaccattttcttgttaatctgacaatcaatgataagattgattgattacatctctacttcataataattaatgtatagatctcataattattaactttttagtataaatacactgaagaactggcaaaaatcgataacacccgtgtttactaattgtgtttccacacctgtttgtccaaaagaaaaagccagaagcaaatattttaatttcaacaacattaagaaatttaattaaaaaaatatatatttatcattcattattaattaatatttatatagtcacaacatttacctcgaagggctacgaagagggcacgtcactaagagcactcgaaagcaaataaaaaagagttaggcaaagcaatatgccaaaagcgggacccagcgcgttcctacacgtgccatattaacagtgtgagtaaggctgttggcaaaaa

SEQ ID NO: 2999 - DNA, 785 bp, Cannabis sativa
gaatttacaataatgccccaagagagtagtaactcaaattcatcacttttcacttcaccatgtaaaaatttgagagggttaaaaggtccaactatctctaacaatgagacctcatatgcatacactgaagaaatcatcaatgattatgaattggctcaaagaaaagctgaagaagcaggtaccaacaaacacttctcccatcaaatatgactcttgctttttctttttctttttgcttttttccaagttatattacatcaaagttttgttttttatttatttattattatatctttattaagagaattgttttaggcttattgtcatgattaagaagtataatcttttgaatttttgttaatggaatagtcttgatttttttctttttatgattatgtggacctcttaaatgttggtaatggtgggtccaatttgaccccaactaagatatattttacaaaaacaaaaaattaaagggaaacatttaacaatgtggttagacttagacctaccacaattagtatcactttttttattatttatttattttttgtaagtgggttataaataaattttattatgctttgatggttatgattgtgtcaaccatttcaaaacctaaatttctaaaaatgttatattaattatttaatgttgtgagtgtatgcatatatgtatagtgacactaattaaaagacaattatgaaattgttttttttttctctcaccaaacaaaatggatagatataaactacctattaagagtgttttgacataaggcatgg

SEQ ID NO: 3000 - DNA, 608 bp, Cannabis sativa
ttttttttttttacaaaatctccaacaattaatatgtctcctttgaaaattataacttctttatgcacaccaaatatatacagaagatatatatatatatatataattttctaaaggatatacagaagatattaaggctagaggagtccataaatatataatatatacatttatactatattcgaacactaaattaatattactaatttcggaagctattgctatgttgtttatattaaaaaatttatgtatataaatatatatagatctactgcagctaattaaatggatgatcctcacatctaaatattagtactgttcctaaataaagtagacaaacattaaacaaattagctaaactacataagaatattattatataaaatatatatatttatatacattgtagtactagtactatatatatattgttggttcttctcttttgcatagcatttgtctattttcaataatagttttggtttgtcttaggggacaatggtgaaaacgtattaactgtattcaggtcattctctcagcaagtttggcttctctacgtttggctgcaacgtttcttccaaaacaacaaaataaaacgatgatatata

SEQ ID NO: 3001 - DNA, 573 bp, Cannabis sativa
agtctggataggagaaattttggacggttgggaaaaaaggttttaattcttcactcgagacgtcccactcctcaaagctagaggaggagttatcagcagagggcgaaggtgatgccctgagtcttagttggtcgtgaaagagtaactgtaagagatcatcaattcgattattacctccccaaaagtcgtcgagaatcatttataaaagaaagaaggagatgtaaataccagatagaatagaaataaggttctttttggaaataatttatatattttgaccaacaaaatatacaaatcaaaagaaaaggtttctctagaatgacgaagaacctggttcgaagctgatcaagaacaattttgaacctagaaaaagctaaagtactatacaagccttagttcaacaaaatttctcaagaaaacatatattcatgcgacaattcaatagtttaaccccgcacaggaaaatttgtcaacaacgaagaacattcatggcataaacctagatttttgcagaaaacatgcaatatcaaacgcaaagaaaaatagtaaaatatatttaaatcaacacactta

SEQ ID NO: 3002 - DNA, 2646 bp, Cannabis sativa
aaaaaaaacaacaacaacaataatgttgttgttattattattgttgctatatttaaattataagtttcttttgacagataatgtagtactaaatatatatagttataattttagcaataaaaaatattatatgtatggtaaaatatagttgttgtttgaaaaaaatagtatggttgttaagtcaacgagtcaaaggatgtgtacacatgctaccagaaaagaatatgaagatgataataatacaaatggtgtaagcataacttcaccaatccccttattacccaaattggtatatttcaattgctaattcttaagtttttttctcacatatgtgtggttgttgaccaactttgtaatctctattgagaattaatgaaatattagagataaagttatctgaagcatatgaattgtgatacttaatcttataaattaatttttcgattgtaaaatttttaaaattcacattcaattttacattttactccactataaatatgaaattacacgctttgataatataaagtatatttatagaattttacttgtagtgtattgatataatcaatataagttgttcgccttcaataattagagttggtcaaaattattgttttacccttttaattatctattcactccttatgtacaattaattcaatgtgagcagttaatctataacttattatagatttggatctaactgttagcactcccagaattaatactataatagaactaatattcgatccgttaggagagcttgaattctattattgtataacatgttcccagccacttatgttattaagctccaaaaacagaagttgtaagaattaacttttttgagaaactttaacgagtgaatcaaagaactcaatgagcacaaataggagttcatgtatactcaggattcaagctgatctattaatgatcattgttgtgatatgaatactctttcattggaaacgacacgttaatgaaagaaatttattacataccggttcagtcatgcataatcgaattatacacaatacctttactacatttctatccatatgtgatccaaatcaaaatcacacacacacacacactaaaagtatactgtatagtaaactgcatttagaagttccatattaaagattcttattacttttatacactatcgacttaatatttttattcatatcgtataatcttaattctcttgtacgtccttacaagattataccttctccatataaataagaaattttcagatatttattaattataattttataattaatgtatcatttatcttgtaattgtatttcatatattttttaatatttatccgttaattacttacttttagggcataaattccaacagaaacacattgtgtacagctgccagcgctgggggcatagccaacttgtacactacttgccctaacctttctaggatttcaaaaggtccaacgaaccttgggcttagctttcctctcttaccaaggcatttcacacctgtcataagtcagatctagaggaacaatgtatgtccaacttgaaagtcaacattccgacgctttggatttgcataacttttttgcatattttgagtagcgagcattctaactctagttttgtctattgcctcacttatattctgaataactttgggacttaaaaaattcttcttacctatttcatcccagtttacaagtgatctacattttcttgcatataatagctcataagaaggcatctcaatagttgaaggatagttgttattataagaaaatttgatcacgggaaggtacttcacccaaaattcttaaaaatctaacacacatgcctgtagcatgtcttctaaaatctgaacagtcctttcagactatctggctaaggatggaatgatgtgctgatctttaacttcatacccatagctcgttgagtacccttccaaaatcttgatgtgaactttaaatctctatcggatacgatagactttaaagcaacatataaagacaaactatttctctaacatataactcatcaagtgatcagcagagaagttcgtcgtttatggttttatttttatattattttcttgtgttctttagagaagttgagtaatgttaaaccttatgttattatgggcacacttaaatttggttggtattttatcatcttttgttgtttaattacatgtaaaaaactaattctacacaatagtaaaataaaagaaaaaaaaattaatttttgattgaaatgtgttacaactagcagttgcgtgttattttattaccataaaataaattgtaaaacaaagtttcattgcatcatacaaataataattttacaacagtgatttaatgagtggtttatagtaaaagtgtaaaaaaaacaataacttaactaagagattggaagaggtgcaccattccaactagtgagacattcaagcattggatcaataatttttccctgacacattgcagtgaataccttgtcaaactcctctcctggtgatctaacactatctccagtaagaaaaccagtccccaactcttctctcacaaacttgtataatggataagatctgcagtccttgatcttgtttgatatatctgcgctcccactttcgatagcattccttgca

SEQ ID NO: 3003 - DNA, 2463 bp, Cannabis sativa
caaggggatcctctctccccttacctttttctcttggtggccgaaggtctttctgctgctacccgagttcatgcttcccactccaatttcaaaggtatctccatctgtaggtcagcctcttccatctcccacctcctttttgctaatgatagctttctctttactaccacttcccacaacaactgtaggataataaaggacatccttactctttaccacaaagccactggtcaatcggttaacttttccaaatcctctattcttttctcgcccaatacggctgcttctgataaagatttcttcttcaacactctccaaattgacaataaaccctttgttactaaatatttgggagtccctcagtgttttggccgctccaaaaattcgtccttccattacatcatccaaaaagctaatgctaaacttcaactctggagtaataagttcttctccaaagctggtaaggagactcttataaaagctgttatccaggcaatatcttcatacgccatgtcatgctttcgtattcccgtctccatttgcaaaacccttgacaagctcacagctcattattggtggggttcatctgacaaccagactaagttgcattggaaaaactggtcctctctttgtgtttccaaattttatggagggttaggctttcgtaactttgtcattcataatcaagccctcctcgcaaagcaagcttggcgaattctcacaaatcctaattccttggtgtccagacttcttaaagccaagtatttcaagaataatgacttcctttcagcttccaagggtcactctccttcctattcttggagtagtattttatggggtcgggacttactctccaaagggctcatttggaaaattggtaatggtgcttcgactgatactcttcaccactattgggttcctggtttcaaatctcttagtttcaaaactccttttccaccccctatttcaacagtctccttttttataaatgattcaaggtgttgggatcttcaaaagcttcacacttacttcactcatgacattgtcacagccattctcactatccctattgatctttctaaaccggacactctcatttggagttctcacccttcaggaaacctcattgttaacactgcctatcacctagcctcatcttctgcctctttcaatacttctgcaccttcgacctccaatctggatcaatctaaaaagtggtggaaaactctttggaatcttcacatccctcccaaaatcaagcacttcatctggcgtgcttatcaccatatccttcccacttcttctaacctctttagtagaaaaattattccttcccctcactgctctttttgttcatatggcttggacactgttactcatgcgctcctaggttgctccagagttaggaaaatttggaggaaaacaagtctaattgcttttttcactgcttaccaatttcaggacattaaagactttattctttcaggttatgactccttgtcaaaggatcagttgtgtctttgttttactttgttgtggactatttggaacaggcgcaatgagtctcttttccactcaaaaacctttccaccagatgatgtagaaggttatgttgttaactttttgcaggaatacgcccactgtcagcaacaacttgccacttcaagccctgcaccctctgcttcaggatctcaacctccttctcccccatgcggcagttactcgttatattcggatgctgctatttgaaaattaaattccaaaatgggttttggaggtgttgttcaagactggaatggtcataccatagctgctatttgttcctcaaaaacaggtgttctctctccaattttggccgaggctcaagctcttcttcaggcaattcagtggtgcatcactgttgatcttcctctgcactccattcattcagactgtttggacttggtcaataaaattaacaatcgttccaaggacagatcgccattatccgacttgatttggaaaatcattgaatctttatcttcttttcttagtgtaaagatttctcacatttctcgtcacaacaatgtacttgcacacactttagcacaaaaagtactaggaacggatatagatattgtttggaattgtaatagtttaaattcctttttcatctgattttgtaaccaaactttcagtattcttcttttaatgttacaaatcagtttctcaaaaaaagccaattctttagaataaataaaatgctgttaaaaataaatttgattttctagaccttattttgtaactaatagtacaacttttatcactaaaataatttttattaggtctttgcatttataaaataaattatatagtttcaagaggtattattgtaatttatttttgatgagatgtatttttattgaagtgatatgttttgagataaatagagaatgcattagcttgtttaaattttattagaat

SEQ ID NO: 3004 - DNA, 2736 bp, Cannabis sativa
tctgatagtttctcttttctttttctgtccaaacaatgtgttattcaggacatcaccaagaatcgtgtgattgggatgggtgaaaggattggcaatctttactacttgtctgaaaatgattttcctgttgtttgttctttttctgattctcaaatcagtgatgagacattatggcattataggctaggccatgcttcttgtatcaaaaaccattcattatataaagccttgcaatttcaatattcacatgattcaaattttcattgttccatttgtcatcttgctaaacaaagaaagttgccttttgtttctcatcataatatttcaaaacaatgttttgatcttattcacattgatatttgggggccataccacattcaaactcttgaagggcatagatattttattacaattgttgacgattgttctaggtatacttggatcaatctgatcaagaataaatctgatgcccaagttgctgtcccagcttttattcaaatggtcaagactcaatataatgtccaaataaaaggagttaggtctgacaatgctaaagaacttcaattccctcaacttttttcctcacttggcattgttcattatcattcttgtgtccaaaggccacaacagaattctgttgttgagagaaaacatcaacatttgttgaatgttgctcgggccatcttatttcagtcacatattcctttatcttattggggggagtgtattagtactgctgcttatattattaatagaactcctacacccaatctcaaacacaaatctccttttgaaatctggaattctaaagctcccaattatgatgaccatctaaaaacttttggatgcttagcttatgcttccacacttggggttgctagatccaagttttcacctagagctacaccttgtgtttttctaggttatcctatgggaatgaaagcttataagttacttgacctcaacactaataggattttttgttctagggatgtaatattacatgagcaaatttttccttttcttaaaaccactcaagtatcacctagtttttttgatttctttcctgctgatgcttcccaaaccagtatggatttttctcacaccagacctgatgcacagcgtgcgtcttcttcctggttagcccctcccatagttgacagcaatgacagtcatccttcctatcccactagtcattccagacccgatcctatttctcagaatgaaaatgttcattctagacctgctgctatttctcaggatgacattgttgatattcctcagcaggttgttcacaccagacctactcgaacaattcagaaaccatcttatttgcaggattatcattgttatttgtccaccaattatgtgcacacacaggagcacaaagtttccactaaccattctattactgagattgttaattacagcaggttatcacctcaattcagagccattgtgttagctatttcaagccactatcaaccagaatatttccaccaagctcatggtatacctgtttgggataatgttatggacaatgaaattgaagctcttgaagctaatgacacttggatagtggttactttgccagttggacaacatggaattggttgtaaatgggtgtataaaatcaagtataatgctgatggttctgttgagaggttcaaagctcggcttgttgccaaaggttataatcaacaagagggtgttgattataatgaaacttttgccccagttactaagttggtttctatcaagcttatacttgctttagctgccattaaaggttgggttcttcaccaactcgatgtcaacaacgcttttcttcatggggacttacatgaggaagtgtttatgactctacctcctgggtatagtccttagggggagttgccaccaaatgctgtttgtaagctcaagaaatccctttatggccttaagcaagcttcgaggcaatggtttgagaaattttccacagctttagttgaggaaggttttcaacactcagcctcggatcattccttattcatccaacacaaaggttcaaccataataatacttttggtgtatgtggatgatgtgatccttgcaagcaatgatattacagctttggaaaggttgaaactcaacttgaataacagattcaagttaaaggatcttggcgagttaaaatactttcttggtattgagattgcccgaaccaagcaaggcatttttatatcccaaagacactatgctttacaattgttggaagatttgggtttcttgggatgtaaacctgctaatacaccaatggaagttaatttgaaacttagccaagatggtgaagaaaagttagccgatccaaagttgtatcgaaggatcattgggaagttgcaatatttgacaataactagacccgacttagcttacacagtgaacaagctaagtcagtttctagttactcccaaagtcacacacatgaacgctgcacaaagggcacttcagtatatcaaaagctctcctggacaggggctgttttatcctgctaattctgaagtaaaacttgaagcatatactgatgtcgattgggcagcatgtgtggatactagaagatcgacaacaggcttttgtgtgtttcttggaaagtctttgatttcttggaaaagtaagaaacaacatacagtctcaagatcttctgctgaagctgaatatagagcaatgtctaacacaacttgtgaacttgtttggttg

SEQ ID NO: 3005 - DNA, 992 bp, Cannabis sativa
atgggaaagttgtctggtgctctttcacgacaccttagcatcgattcatcttatggcaggtaattcatacaaatcttcttactcgtgataatttaattaggaagaatgtgtatgttgaatctactatatgcacgctttgtgaaatggaatgggaaagtcttgagtacttgtttttcaatgtcctttctcttggagagttatgctcaaagtcaatgaatggttaggaaactaaatttggccgaattagtttgttgatttggttcattggttggaaattaagaggccaaagagtctcattctggaagtattttttgctgagtaatttatgaaatttggctaaattgaaatttttctcaatgtatagatgagttaattaaagaaaatgtataagttagattgtgtcttgtaaatgaaagtaaccttaagcagtcataaattggttcttgcaaaggtgaaagagatataagttgtaattatattgtatagagtttgatagatatgcccaatatttaagttgtaaatagttcatttgattaatgaaagttttttttttttgataaataaataaataaataattaagctaatcatattttccacataaaataatattcatttttttttttcaaaattcccacataattttacataaaagtactcacaatagagtagctgttgacccccaaaaattactaagtgtaatttttagagtcattagtgttatgcccgaaagttcgccaagtataaatcccaaaatgcacccaagggcatgtgctggtacgaggaggagcaaagacacgcgcctagctccccctgcaacgcccagcctggagcacccatcctctacaacacccagctcccttagcctcaacctacaacgcccaactttcccccaaccttagcttgcaacgcctaactccccttgccttagcctgcagtgcccagctcccccagcctcagcctgcagcacctagctcccctagcctcagccttc

SEQ ID NO: 3006 - DNA, 754 bp, Cannabis sativa
tgaagaaactgacataatttgtttatagtgaacaatatatcacgcctagttaaagtgcaatactgcagtgcgccaacaaggctgcgataggtagtcgcatcagcaagaggttctccattataaagagataaagatgtgagatccataggtgtaatgacaggtttcgaatcaagcagttgggttttagcaagaagatcacgaacatactttgtttgtgatagatggagactagaagtggagcgatgaacctgaataccaaggaagaaatggagaggaccaagatcctaaaccgcaaacctggtgttgaaaaaagacaacaaggcagcaatgctagattctgaagacccggtaacaatgatgtcatcgacatatataagaaggacaatcactacagtggtcgatctgtaaatgaaaagagatgtatcaacctgtgaagcaacaaatccccattcaacaatagaagaactcaacttgaggaaccaagcacccggagattgtttcaatccgtaaagggacttggacagtttacacacatgatgaaggtggttggatcaacaaaaccttcaggttgggtcatgtacactgtttcggtaagatcaccatagagaaaagtattctgaacatcaagttgtttgataacccaattgaaggatacaactatagaaagaatcagctgtatggagttcggcttgacaacgaggctgaaagtttcatgatagtctaagccgtgggtttgaggaaaccccttggccac

SEQ ID NO: 3007 - DNA, 2254 bp, Cannabis sativa
tggtgggaagaggtttaaggagctactaaaggagcttggggagctattggggtgtttcaatataggagactatattcctaagcttagttggttgagccgtgtgagtggttatgatggtagaatggagaaggtggctaaggagtttgatgagttcttggaaagtgttcttcatgaccatatgaatacaaataatagagttactactggagagaacagtgaagagtaccagaaagatttcgtggacattttgcttatgattcaaagggaaaacttgcttggctttcctattgataaaacttccataaaggctataattttggtaagtattcaactctctagatgtcatttcattttcatgattactatatatcaaaatacaccttattatagccctaagaaaaaaatataccttgctaatttatcatatatatgacttattatttaattaatactatttgagtgagaattgttacaagatattattgttgtttagcatattttttggtgtgatattgtaataatcgagccccatataattttaagaaatagtttttagagaattttactaaccaatcgtatgatactgtctatagaaatatataaagtcctagacaccattcatgtccaataaaaatgatctatttgaatataccttcatttatcacatccctcaaagccataattagttaacaaaaataggtaatcattaaatggtatatttctacctattccaaaattggttcacaatttttcatataatttattaaattaaatatatggtaccccatattgaaatgtaaaatgctacatcttgtggtacttacaactttattataccccttaacataaacaaatagtatatccctaaacataatatatatatagagtatttaatatattaactatttcttgtagataaattacataattatgtattgcgtgcttatatattatggtttaaaaagaaattaaaaaaattaaacaaagtttggatcgaaaggctattcaggcaaattttttaattaattaataagtatatttatgttatatttttagatatagttcaggaaattaaagacattaaataactgcaaatataaattttacactaaagaaagattatttattatataaaatgtatctatgttattaatcataatttcaataaagttttaatagtcgatcataatatgttaatatttatttgtagttatgtttaagtatgtaaataaatttatgcaatcgatcaaattacaattgacaactaaatattaaatatgcaattgtgatcggattaaattagatgttatttttaaatatccaattagatcaggtatccaaaaatcttgtacatccaacattcaatcaaattaattaatattttcatttattttacatgaataattaaattttatattgtgatactaaaattatatatgtatatataaaaattaaaattaaatatttactttttttttattagatttgatcatggatacaatttaattcaataaattctgaatctaaaatattatatggatcatattcgatcaaaaaaaaaaataataataaatctaaaatattggttaaaatgaaccaatccaaaaaatatataagaaatacatctaatggatatggaactgacccaatccaacatttaatggatgttagatcgatctactgaaattatcaggttggatgataaaatctaacaacgtaccaatatataattagatcggatttaaataaacttaaaaattttagatgtagtccaataaacactcttaattatattaatcaattggcattaattcctaataagagacatttaaggatgattgtgttagattgatactcttttatatataatttatttataatatatatgaatattttcaccactaattgtatcaataaattcataatataatttactaactaaaactaacatattactctaactaaatttattggtgtaattaatgtgtttatatttgctaatatatataccattaactttagacaataaatattaatatattatgtttattgaataatacattattttatataaaattatttcctattttaaaatttatatgacaattaaatatttttaataataataaaatttctaaataaattaaacaaattggtattatacatttataaaaatacctttgtgtacaggacatgtttgcagcgggaacggatacaacgtacacagtgttagaatgggcaatgactgagctca

SEQ ID NO: 3008 - DNA, 1919 bp, Cannabis sativa
tcatagcattctaaagcttatttaatgaagtttttttaagcattaagttacgtaatcaaaacaaagaacaagttattaataacagaattgtagaaattgcttgaactatttgaataggtaagctattcacaaggtattttactactttgtttgcaccttcttcattttttttttaaaaaaataaatatgttggtttagcttaaagctttttaatttggggaactgtaccattagacctaactcaaaaaagtgacttgtaatgtaatttttatagtgactttaaaatatacttagaagtaacgttaaatttgaaagtaattttattttaaaagaatggttatttgtgaagaatgagcttatgaagggcctaattttgggttgtcaaagttctctaacacaactcaagcacgcatccttctacatatagccatttgattttttttttttttttgttgttgtataattatgcatattatagttatgatagtattttttttaaccggttaggaaaaaaatgttaaaggcaaatgtgaaaagattattttcatcgaaaaaatgttactttcagggcatgttttaaaaattaatttcaacactttaaattatttagaatgctttaaaaactaatagaatgtttgttgtagttataatttacatttgaaaaaaaaaaaaaaactccaggtattcagataccgaaaatataaaagaaatgcattgatagtctcaagactactttagaatttacctaaactttaacacataactaaaacttctatgtaataaaatttgttttttaatattaccttttaacttctccatatggttcttttatattttagtgatttgtttaatacgagaatttttatagtgataaactaagaaaaaggttctaagttcagttagattaaaatgaaaaattaaaggcatcatgaacaattttataaatgcaaaataaaatatagatggaacatatatataataaaaagattgaaatattttcaatcattaatttggataatcttaatttgctaacattagacttccaaaagaaaatgaatatgaattagaagagtactcggtcttgggcttccaagctttcattaattttttttagataagagttattaatagtttttgtcgaaatattttagtaattaatttaaaaaattaaatccggtaagtaaactgtgaccataattagaatattgtaaattaattatatgttataaatcaaatcataaatttattaccttatataaaataaaatatattctaacaagttgaagacctaacttttatattttcttaaaaataattagagtataatgtacctatactaaccgtacaagacaagataataagagaataatcaattgaaataaagaaataaaaagttgtaattagaaaatgatttaagtttagagttagcatatgatgagtttaggcattattgagtgttggaacaaaacatgtggcttttaagcatattcggagttgtaaagcacaaaattatatgaatattcttattcttttatgtgatccgactgcacctctaatttttgagtcattccaacttcttttctcattttatattgaccataataccccccaattcttcttatccttttcacgaacaaaataaaacttttgaattatgagattcatttaggacatttaaatattcatctctttctctatctaaattccaaaaaattatagtgtttggtattattattatgctataataaaacatatattataataattggagggcaatttagacatttcactatccaattgtgtaattaatcaattaattagttttagcaaaacacagctactaattgcatgttacgcactcattcgggaactccgtgcaatggtgttcgggtactgccacctgtcagatgaagccaaaa

SEQ ID NO: 3009 - DNA, 1057 bp, Cannabis sativa
cgaatatgccatagcagaatgaaacactcactgaaagatacatacataatattatacatgatcattatatatgatctaagtggagtctccatgtttgtgtgatgagcctttaaattatatatatagatatttatttatttattataatatataccacgtacgtacgtaggacatctaatgtccatactttctgaagcactaatatatatatatatatttatatatatatatacactccaaaatctaagcatccaattccagagaagttaccacaaaaatcatgaccactgtcgtttagaagccaaaaagcatataaattttgtatatcatgaattattatattatatataaaagaaacctcaaaaaatttatgtgtgtttgtgttttctttcttttctttataaaggtagttgcatgcattgatctaatatatatatattatatcaatcgccaaaaaattggaatgaaacaatcgttttcagccgtcggattgcgattgatttagatccaacggagacaatatatcaatctctctggaaatgaaattatatatcattagtcattatctcatgaaaatatatatagagagttagtgctcctttttttctttatgaatatattaaataactattcttttatgtttcctaagttatatttatcttttggatatatagatatagtatcttccgtgtcacaatccaattacttttactcaatctttaaaactcaaatcaatctacacttctatagcaccctctccttaatttgtattgattaataattaatttatataaacttttttcaaaaggcttaattgtacaataattatatatatttatatggcttcctctaattggtggctttttgtaagttttcttgacatgtgtttgattttctagaaaaatgtcaagatatttgtgtgtgtgtgtggtgataagaaaagaaagaagagtctttaaaagaaaattaaattgagaaaagaaagagtcaaagggagagagaagattgtggttgacgacgcttataactttgctagcttaatattattatgagcatt

SEQ ID NO: 3010 - DNA, 1489 bp, Cannabis sativa
atcaaagcatctgtttcaatttgggcaataggcacttggacttgaagaagccagtttagagcatgaaacattgcatttgcctccatttcatacgattccaaattttcgacaatcctctttgataaggcagccataacattaccatgagcatttcgaacaacgacaccaacacccatgatacttcagctggcatccaaagctacgtccacatacgttcagtttgaggtcgcctgaagttggtggtagccacagttgagttgcagccggcagcagagaagaggtcgagggagagacactttaggctacggttactgtaggtatgtatttgaggttggcatattagaaattattaacaaatgttgcagcaaaatcaaaaagttgtgttgctgtctttgctttcccgccatggatgattttgttttgttccgtccaaatacaccacatggtacatataatggtttccatttcagcctttgtgtgcagtgtagatagatggacaagggagtcccctttagtcatagaggatgaaagattccaatcaaaagacaaacccaaactacgccaaactgaacgagcatacttacaaccaaacattgcatgtctgattgactcccaagctcgtcgacaaatagagcaagtagaatcagttataaccttattccttctaacaagatttgtggccacaggtagagcatcatgaatcacccgccaagcaaatatttagattttttgtggcaaggtaagagaccagaaaaaaccccatcatgatgatgctaaaacagaagtggaggagagactagcattttcaatagaatcagccaagtggaagactgatttaacaatgtagtgcctagagttgtcatgatgccaaataaggatatccagatttgagaagaaactcaatggtatagtaagaatcctttccacatcgagagttgtaaaatattattgtagtagcggtagattccattggcgctcatcaattatcaaatttgcaactacaccattttctggccctacataagaaagagggtgaaaatttttgtgacctggaatccatggagccaaaccacaaaaaactgatctcccatcaccaattttccaacgtaggcccgtttccaacaactcacgatcccataagataccttgccaagtcatagatggagagtgtcctgcttgtgcctctaggaaagtattctgaggatggtatcagcacttaagcagcttgttgagaagagaatttggattttgcaaaagccgccaagctttccgccaagcttgctttgccaaaagtgcttggttgaagtgaacaaaagactgaaaacccataccacctgaagctttagatttacatagcaaattccagttatgccagtgaattctcgtgacattctcattagattcccaccaaaaattcgacatcatagattctagttacttataaaagattaccggtaaccgaaaacagctcatggcatacgttggaata

SEQ ID NO: 3011 - DNA, 933 bp, Cannabis sativa
aaatcctaatcaattatactatttgagattaatgtcaaggctaacaaattgtttcaatctgagtaatttactaaaatcacacatgttttaaacaatggcaggtttgttgaacctttcatttcaagtactaataagccactagattaaactagactttagtcttagttgttaactctcttcgttttaattaaaagatgatgtgtttaagttttagggcaccgagagttgagagccccaattctctcgaactctcccgaaagcttatgatttgtaattttgtccatcaattcgataaagtttctgcaagaattttaactatcctattatcattaatttgacacaaagttttgttttttaatatatttagggaaagatttcatcaagttagtggaatcatgtctatccaagaacatcccaatcccaccactacaaaccagaggtaaaatgaccttatttttctaatgactactttctcttagagcagggtcggttttaagggtaggcggggttggcacactcctaaggcccccacccaactgaggccccgaaaaaataaatcatttaattttaatataaaaatttaataatacttggccgctgttcaccctggttcgaactatgctatttttttaaaaaaatattctctataaaattaaaagaagtaaacaagaatcgaacccctgaaggtaaaaaagtaaataccttgccactaagccaatttcatgtgatgacattttgggcctccattttctttgagttataataacaatttataattcaaatcaagtcattgttgaatgttgggtacttcatttcagcaagtgatcttcttcaacaaaagtacaaaaactttctatcagacaaatttcaacaactaccagatgaactatcattctaagcacaatgcagcctcaagaagaaagaaaggaaaaa

SEQ ID NO: 3012 - DNA, 935 bp, Cannabis sativa
ttaaaacttgcctgtgcctcaaaagcatcatcaatcaaaatgtttgcagactttatatctctatgaataatttttggatggcctgtaaaattatggatcaacaaaacaaaagtaagaaggcattaaaaaccaagactataatatgcaaagagagagagatacatacaatcttcatgtaaatatgccaaaccctttgcagcccccaaagcaattctcaatcttttggcccaatccaataccggaagtccagcagctgataacaaagacattattataacaaactaaaagaataacccttaaggcttaaatgaatgaacaattcaattagttaataccatgcaaatgatgctctaaagtttgattaggaacaaattcatagacaagcaatctatgatgctcatctatgcaatatcccactaaagacaccaaatgacgatgatgaactctgctgatgatttcaacttctgctttgaactctctttcaccttgtccacttccagccttgagctctttcacagccacaattctcccatctggtaaccaacccttgtaaacacacccaaacccgccttcaccgagcacattttgacgcgaaaacgaattcgttatctccattaaatcttcatagctgaaatatgcattagaaccacctatgtccaagccacctcctccatagcttactgcattgcctctctgactcccatggctattggaaatgtatgaattgggaccttgtgagccatagaagctgtctgctggtccagagtgattgttgccaaaattactttgttgttgttgttgttgtacttgactcccataatacccttctggttcacattatacccaaaaatcaattgaattgaaaaattaaatcccacctactaaaaatcattagaaaaatctacactacacctgctaaaagggtgtacatctcc

SEQ ID NO: 3013 - DNA, 991 bp, Cannabis sativa
gagatggttcccgtaatactctaagattaaaataatggattttagtgaatctcttaactagttaaatgtgtattaatatgaaattatattattacataattaaatatattatttaaaaaataattaatgaaaaaagggtccatcgagagccctattgtttcaaggtatgtaattgtatgtattgcttgaaatatgaatccccggcaagctgatactctcttgtgcagtattgaacattgagtgatcctaaaaaccccagatagattatcctataaagcttacagcttttggaggaagaagacctctgagaagagaagaaaccgccatgaagtttcagattgaagatgtgacggtgtacttcccctacgaccacatatacccagagcagtatgcttatatgcttgaactcaagcgatctctagacgcgaagggccactgcctccttgagatgcccaccggcactggtaagaccattgctctcctctccctcatcacaagctacactctctctaagccccaaactccactcaagcttatttactgtacccgaaccgttcacgagatggagaagacccttgccgagctcaagctcctccatgactaccagctccgacacctcggtccccaggccaagatccttgccctcggcctctcctcccgcaagaatctctgcgtcaactctaccgtcctcgccgctgagaatcgtgactccgtcgacgccgcctgtcgcaagctcactgccacttgggttcgggcattggctgctgagagccctgacgtccccacttgcgacttcttcgagcagttcgataaggccggtcccgctgctgtgttgccgcctggggtttatacattgcaggtactcttgccctttagttggaatacaagattgatcattttaatgaaaataacattattattgtgtttatatttacgggttttgtggagaattacattttgggtttattgaaaaatctttgttttttttttt

SEQ ID NO: 3014 - DNA, 1918 bp, Cannabis sativa
gccctccactagcgcttagctcgcaggggcactattggagacaccactctactgatcaagcctagaggctagagttttgtcaggcccactcacccttgcctacatctagagacaagagcaaggaagctgatcatgatgcagataaatcctcttctaaggatgatggtagttgatagctgattgtaccatcttttctatttttagtcttgtattcaatatttgtaacttatgctcttactttgttacttcctttttacagatatgccttctagactcagaggtctagttggagggccttcacacaagactttaggtcaccctagggcctaggtggcccatactacccgttctggtgatgctacatgtacttctcttcttcctcctccttttgggcctggaccagctggacagcccatgatcattgacgcaccattgaggagggcttggcgttcaagaaagggcacctagaggcccagccaagggttgaattcagccatggggcagagagccatggtggcagctcgccatcgtatggatagagccttacccaccgtggatgatgagctttgggagctcggtgatggcgacctagagaggctatcttctaatagtatctaggagttggcctcggtaagttgcacatctaactttgctcacttttcagtattattaaaagttggcctgccataaggggctattgtacaaggctggctggctagtgtagtgtcttgagaggctagccagcattagtagcaccatagaggggctagcgtgctagtgttttttttggcactaattttgaccatgttttattttcaagcctttatgaagcttagatttttgcacggtaactctaaggggtcctcaagagctctccgagagtagctaaaagcctaggaggctgagcttctagcgagaggtgaggcccttaccaacttagtggctcttgtcaaatagaagtaggatatgatttctcgtttagagtgcatgatcaacaccaggaaccaagagcatactttacttgcagctgatgtctctaggctagagagagaactcagaaggagtaatgatgaactgaagcttgccttcgatggccagcaggccttaaggaacgagtatgacaacttgtcttcagaggttatctatgagattaagctgcacaaccctagatttcatctttcctacatggggagtcctttccttgagcgcacactgccctaggggaaatagttgaatgagagcaggatggagacagaccaaaccacggtctagctagaaggatcatcattgggggactttgatgaggccatggccaacaaacccattgaggaggtggctggctaaggtattgaccaggttgccagctagcctatagaggccttggttggcttaccctttagtgatctagacattacagcttccgattcagctccacctgcacctagacacgagtagcttcactttcttagtattttaggcttatgattttatttgcattaacattttgatttcatgttctgtatggcatattagcttcttactcttgaacactacttaatttcagccttatggctttcatattcgtacttttggcctataggcactctgtttttgaacacttactagattttagcctagagatttttaccatggatatgtgaccaatcaggcgatctttaactatggctatcttctcattgccttgacatttaagtatctagatttacttttctttatgccaagctgaagtatgcatgcaggtgatttaaaggcaggtttagtagcttatactgagcgttaaaatttatctgcataagttctctgtgctagtttgatgcattgtacggtgtgggtgccccccaagggaacacgcaaattcacagtctcttggtgagttgcaattcaccaaggttcatag

SEQ ID NO: 3015 - DNA, 2253 bp, Cannabis sativa
cctaataaaaataatataattaaatactaaaagatatttagtgatgagttttcattagcaatattttatatattataatgaaattatttgtgactcacaatataattaaataattacaatcattttattttcttaactggtacttttagttaaggattctcactgtagtgattatatatttatgatgatgatgatgatatatttttgacaaaattatcttcacatatagttggaattttgatttaatttttcgttttttgttcaaaacagtaaatcacacctcatatataattaaatgatatagttacattaaatatatttattcatgcatggctgattatatatatgaatgttaattttttgtagatctttattcaattgtagtattcaatttggtagtttataaaaaaaaatatttaatgaattgtgttaattcaacatcaaaaactaaagtttaattttgagtatattatcttggatcatgtattttgcaaaagttaataattagaccctaaactcaatttttaacaattttgtttctaagaataaccaactttaatataatttctaacacgaacagatacagaaaatgtaaccagttttgtcataacatctcttgatcggattattattaagtttcattttgacaaaaaatcagtttagggtcctatttgtacaattttggaaaacacatggcctattttgtcatttaataaaatagagagtcaaaatagtaacttttacaaaacacagggttcaaaatgatgtttaccaaagtttttatcatttttggttaagctaactgaaaaaatctgctcatttacggttttctctctaaacttattgtagtcgtcgtcatcgtcttctccgaccaaggctcaccggccattcatcatcttctccgaccaaggcttaccgaccattcttggtatgtgggatggctctagtcgggcttatgttttagacgccattggtctgtgatgtggttctttctttcctttcgagttttctgcttttcccttgaaatttttctttttggctgcttggttttgaggcctttctgtcatggatataccttcgtttctctggtggtcgcataagcagggtcggtcctaggcataggcgctcgtgcctagggcctacgggggcccaaaaaaaaaaaaaaaagtttcattagatttttatttaagtaaaattaagtgtattataaacaataaatatttatagtttagtttgttggggtgtatggtataatatataatgtcatgggttcaaatctcatgacactctttttcaatgtttttttatatatatttctaaaggccccaaaatttaatttgtcttggcctatattttttcagagtcagccctgcacatatggtatggatctagtggtgttcgactgtgtatcatgttttgggttagagtctttgggtctgactcaattaccgtgggggttggactgtcatgccggatatgggttggtgatggtgatttggcagagtttggtggttaccgatgggggcttaggctgggtcgaggtagtggtttggggtgtagaggggctacaactagagaaatttctaggggagaggtgggtatcgaagatttcacaaattggctttatttggtcatcattgcattttttatttctatgatgttattattgatgttttgttttcatcctttatgtctattttttgttttcaatataatggtgttgcaacaccactttgctattatttttataacatggttaattttatgtatggtaagaacttgttgtcttgtttcctggtgggttgtttgtgtgcagaagattggctcatggctctcacgcgtaggtgacatggttaccactctccatattcagatttcggagattctcatatgactattagcctcatgttttatggatcgattctttaataagactgtcttaggcatggttagtcatgttatttctttttattcatgtttgaataatcaggttgtcattacctaatttttattagaagatctttggctgatagtcattgacaggtgtgatctgtcacatatttattcagattagaggtctaccattctccgcacttctttgatgcatattagtcccttattgaacgtatggttgtgctgtggtagttcgagatcttgataagtaacaattttcttgtggtggatgaggttgtgcatgctatggtccagtctccttgggtgtcggtcctagacggacatagttatcatgggaga

SEQ ID NO: 3016 - DNA, 1522 bp, Cannabis sativa
acgggctcttggaatagtctattctttaccggtttaacttcattaacttcaactaaaatttgattttttatgttagttaaagtttgttatgtctagctagtattcagttacaacatgtaaattccttaacgcttcaatctcgagagttaagtcagttgaggacaattctgtctttccaacactcttggaccattataaataccaacttcttctaaagatataaataactttcaaaacttcttatttatcctcttcgaaattatccctgtacaaaaataaagactatagaactcgatcctcttgtgattttatagatgttaaatcattattattataacattagtgtgaatcaataaagattgaagctaaaggttgtttcatccgaaaattcgaaaagtaaataattttcactgccaataactaatcgaacctcattaaattggcgtaatttgatttatgtttttcattctcttgattagttagttcattttattacactaattgtcatctctgtgcttaattattttttgaggtgactaaaacaccacaaattttataataaattttatttttaattaaattataataacctagtttaacataaagaaaaataaattataaactttaaatttgcttttatgcatacgtatgattacaacataaacatatagattagtataaagaattatgataattcatttatttatcgtgactcatatttatcttgtggcggccattttgtcacatctctcgtcaaagactttttgagtgtgttctactttttctgccacccctttttgatatccaactaaaacattttttgatcgttctaaggattaatcccagccctctaaaatggtaaatccaccttgattagatatatctttgggcatatatatatatgttaactaccaagtcttttagcttccatgaactctactttggtcccaatatagcaatatatatagtagtgcatatggtgcgtgggcgactaggtcagcttggtcccgatggcccattttaagcacgccaccgatcaaaattcaacctctcatattacaacaacttcatattcgattccatacctggtcaaacacgtcgatgtaattaatttaataatcttatgattaattggattcgaattatatcgttataaatggtaattaagtcacaaatgtcaactgggactgtaataataaaaataaaatttttatgaaactaacacacataatatttttttttatttatttgtatgaattttaatctcgaaatcaattaataatgaataaaataattatttgagggaggggatgatagtgtatatatacagtttgatcagttgaaatcgattggaagaggtggtgaagttgactagtccacgctttcttcacgcaatttgccactacatatattcacaaaaactgcaccccacgccttacttttccactactctcatctattttactgctgctcaacccatataatagggtaaactatagtttctttatttgatacagtagaa

SEQ ID NO: 3017 - DNA, 2561 bp, Cannabis sativa
gttagttagggtgttacacaattaatctgcaaggtagagttgcgtagggcgataagttgagtactcaagtacaaaggcctaccgtttagggaaggaaaaatttccctagtaattctgttaaccaaagtgattaagtagacgaggttcacccaatttcaaaaggtaatttgtcaacagcggacctccaggaacgtttaaacgcaaagaaagaatgagccagaggcgagaaggcaagacctcatgaaaatgaccttagaaatcatatcaatgatagagttcgtgggagtgagttataggatgataatgaaaagcgtctagaagatcaaatagctaaattgactaggttcacggagcatcttgcctggacgcaaagtggggtcatatttgattcgaaagaagaagatctaaaactgtttgtaagaagaataataaaggcacccttgtcagaaaattttagaatacctcaaatggagctatacgaaggcagaacggaccccagggcccacccgtctaaatacatttgattggtgtaagtagcgaaggcaagtgatgacgtaaagtgcctctattttttgttaactttatcgaagtttaccgaagactggtggaagagattgtctcctaacttaatttgtaattggaaagatttacaaaaaatattttaaaaatagttcatagcctccaaggattatgacatggaggtcaattcattgaccaatataaaataacaactaggagaaagtctcaagaaatatgtccaaaggataatggatacaacaaccaaaactaaggtcaatgatgacatgaaactggtgaccttagcatcagggatttccacgggatccctgttgtggggagaattgctaagaaaaaggtctaatactttatcaggtttcttgtcgagagctcaaggcttcataaatttggaagagacttatgtccatgcttatggagtacctcttgaaccataaaaaactgtcaatagttcaactatggctccccaattttttactccaaatatttctcgtcccagaagtgtattcacaactccaacagtgtatagacctggtgtctcaggataaacttccacacgaaaaaatttctctgtctttggggtggcacaaattggatgtagagttgcccccaaacaaatgagtgaacaaatgaaagttttggaatcaaatttgagtgactccaggagcaacagaagtgctaagaatgtgagttagagtgaagctccaaagaaagggaggagtcatgaaccaagatattctgagtatactagcttggtggatactcagaaaaatgtttacaaaggaacttgaaatatggtccattagaagaagccaccgcttatgtacaaaggtggaaggcataaaagggaccaaaataaaagatgtgaataccacgatgatgttgggcacaatacaattagtgtgattatctaaaagaagaaattgaaggattggtcatttatccaattgtgtgcggatcctaatcatttatgctagacagggtgtggctcacgagcaactatttattcctggacaatcgggaaccataaatcctcctcggggagtaggtttccttcaagatctaggaatacaagcccctagaattcaaaatcctagcatgcaggccctttaaggggtatcaaatgcctaggtttctaagcccattaaagctcccagaccaggtaatcaatacccgccaggtgttgctctgcctgcaatagatggccacgtggcaaccatatttggaggcccacacattgccaaaaatacaaggaacactcagaagagacacctcaataagctagatcaagacggaaacatgtgctcttgtccaaactcctgcccaacgtccgagaatgatgaacatcccaatcactttcactgaagaaaatgacaagcatgtacattttcctcacaatgatccattggtaattgaagcccagattgctaacaaaagggtgtccagaatccttgtggtcaatggaaattcagtcaaaattcttttcaaaaattctttccaagcaattggattagtggagaccaacttgatgccttgtcctatccaaattcaaggctttcatggattcaatattaccgatgtggaaaattcaacttctagttacgttaaataggggtgtattaggaagcagcacaattgccgccttcaaacaattcacgtttttggtagtagattgtcacattgcctacaatgttattctgggatgaccatttctagttgaattcaaagttttaatttctattcgagatctatgcatgaaattcccaagtgataaaggaagcatcggggtaataaaaggagatcaaaagagtttaagaaagtgttacaatatctcaacaagaatagtacttatggtttaggaagaagatgaagaagaagctcccagagcgcttatccagccaacactaggggtaatctgggaggaagatgaattagactcctaggtgggtatagaaagaatattcaaaccaatggaagaggtataagaagtgtgcattagtaaagaaggtcatactaaagttatcaaa

SEQ ID NO: 3018 - DNA, 1220 bp, Cannabis sativa
attaaaacaatgtataatttataacgtacgtatctttatattatgcacattaacagttgtataaaattaggaatgcaattctaaatcaatagtatagtcatcacaaattaataaatttgaatttaacaagttatataaaacacaaagacatgatttttatttaattattccacagtacataagatagaaaatagtagtagaatacaataacattagtgctaataaaaggtatccctctcttagctttattcaacagaacaaacataaattaataccaaattaagaaaagcttaattttatagtttgccatatttttgatgatcaatctcgatcgtacttatgcttatttggctgcctttgaagctgcataattaaaaccaattatacaattttaataaatatataaacataaataaagtaattaaattaaacaaataaaaaaatagcactaaattaaacattattatgtttagcaaataaacaaataaataaaattcaattttaataaatttttaatattattatatttaatttttataaatagcacttaattataaatatatttttttttataaaaaataatattatttattaaataacttaaaaaaaatacttttataactaaaaatatcgttaactgttgattttaacgaaaaaaattgttaaactaataatttatgttagatagttacatttaatataagagagatatatgtaccagttttagcaagggtttggtcatcgtcgtcatccctgatagcatgtaagaaatacccaccaagtccttcttgcttaagatagtcaatctttgattttatggaacgtttaccatcatacccataccaagaatcaccttgagtcatgtacattgtcttagtggtggcatcaaaagcccctccttctgggttttgaatctctccataggatatgttaccattgtaagcaataacttgtgacccaattttgttttcatcacttggataagccaatttccattccttaccgaacaacggaatacccatcaccaattttgtctttggaacgttagttttgctccaaagggcaattgcatcgctggtgcaattgacagagactgtcttactactatcgacttggctatgtgcacaagtgataggaaagtagttgtaaagtattatgttgaaaatatcaacacatttgatgaagtcatcagttagaggatatttgagattgtttttcgc

SEQ ID NO: 3019 - DNA, 923 bp, Cannabis sativa
tccgatctccaatttttcctttttcccttgttgattttttccagatgtcgccgcatgcctaatccatgccacggcctgtgtgcgagatttttcttggcttgtttctttgtcgaccctggccttctcctcttgttattttccgcttatctttttcatctgtatgtctaggcactgaatatttatgaaaaggagaaaaatatttgaaataaatacattatacaaaataaataatacttaaattttttatttttattttatatttttttaattattaacaaactacatcaatctagagcttcttatatacttaaatttttatttttttatgagtggtaaaatataatttaaaaatactataaattatttttatcaaatggatataaatttataatttgagaaaaagataattaaaaatatgcaaaaaaaattgtatatcataagtatttatatatttgggattataatgaactagattataacattatcattattataatagaatattaacaactcatagtactttaatatttataatttaccaaacactcatatcagtttttttttatagttctgttacacttgctttttttcaaaacatagttattttttcccttatcacagttgtccaaaactaaccctaaattaatttcatattttcttgatctttatctatttggtatatgtattattaattttaactcttgatttaatttaaacaaataattatcatatatttgtcagcttaatcaattgtgattttaggaatattaaatgcgatttattaacatatttttgaaatgagaactttctttgttgttttctatattcgattggatttaatcgaccaaattatttacatgttatgaattttatttttgaaaattttttagtgattgcttctaattgtttccttgcacgacttg

SEQ ID NO: 3020 - DNA, 1914 bp, Cannabis sativa
ttaaaaatatttatatttatgttaatcatatttctagataggtgacataaaaaggaagatacaatctcaaaatcttggtaattaaatcccttccaattaaaccaagtcacggaaaaatttcgtagattttggaataggtcaagactgagagatatacggagatccatattatattattataatttttgggacacggaagatttatcaccactccggatctggagttgctctagctcacaccctacctaaacgataccggacgggtacttgaaggggccatcaccgatgctgactatcctaaaagaatacaagcgtctacattggatataaacccagatcgtcgagcgacagttatactttttatgacacagaatcaaatctcatcccatgtgtcagaacatggtagtgcgcaatacacttttttttcagacggttattccaggcatttacttttcaaggttaaaacttttggcgacacgcatcctgtatgtatggtggtctcctgttgtccatctacttcaacgtatgttcacaaatccttccaaggggcccaacagttaagtctctttggatgtatttatcccattagtggcatttttgtagaaaccctaagtgggtcatgggtttatcaatacccgccctctagcctataaatacccctctactctcatacaatggggggatcacaaccaagatagccaaaactctactaaaattgttctaagttttcctcttcttcaagagaaacaaagggtaaagagttagggtttcttgcataaacactataaaaacatcaataacatcctttgaggctaataggctaactcatgtactaggcctcgttaacacctaacatctccatcttctttattaagttatttattatttcttaaccttttattatattagtttttgaaaaatcttgataaatatttttgtgctttcattgagtactgaagaaagatctgaaccaccattactattgtaacaatagtgtttactcaaaaggcatttaccaaaaagaccccccaaggcagtcttgacattgtcatggaggatgtaaaccctcattctccagaacaagctcagctaagcaatgcgaggggagaggatgcatcagaagcttagaatcgagaaggtgattccagaaaacaccataagcatgtcaacgatagctagtacgatgaagaagagggggaagatgatgatggaaagtatgttaaagatgggtattacaaggatgtgcactattatgagaaataccttgaggttgtttgagtgtctagagagcaacaggagacctaggagaaattggcccgccaggagaagttttccaaaaagattgaagtatgatgactcaccttcaatattaattcgaagatctagacgaagaagattctaatgatgatccttcagtggagtatgtcaatggaaacaactaggaaaatcctacagatgttggaacctttactcgtgcacaggacaagggaaaggcaaaagtggatgaccctcagagcccaaaagctctcgtacctcctaaacaaacgtgaattaagccagtagacccactcagacgcagaaggccaccgaaaactccgggcttggatgctcttctactctaaaaggtcctactacataaaaaggagtggtacgaaagtacccagacccagggaaaggaaaaactgtcccagtgattatgtaaactaggacggtgggaccagggaacaatattctgatgacagttggtccatagtagatcttcgaaggtgtcttgacgccaagtatgaaaaggctaaatgtgaaaaggcaaggccacgagagaatgacctcagaaatcatttaaatgataaagttcacagatgagatctcgctgacaatgacatcaagaggctagaagagaagattttttccatg

SEQ ID NO: 3021 - DNA, 873 bp, Cannabis sativa
agaagaatttaccatgcctctagggtattatatataaagaaatttcataaaccatggtagacgctgttgccaagcaagaaagaggtaaaaatggtacacaacactcggcaaaatagtcgaatttgaatcgatgaatttgaaatcttcgatgcagaactcatgtcgtgaaggagatatacaactgttaagagcttagattgtgaattcgatggagctacacagaccagacctgctgccaaaactaattaggcaacatttccgaagaaagcaaagaaactgcattttgtgcaaattggaaagccatactcagaataagttagatcccttgacgcaaactaataccttttctacagtgattaatcgaccttcaagaactgcacgatttaaatgtttaacacagcgctcagcatcttcaagagtttccatagtgacaaacccaaatccacgagattccctagtgcgaggatctgtaaccagatggcactccaaaacctgatagcaaaaatgacaagtcaaacttcattcaacaggtaagagtttctcccattactaaattaatatattcaaaccacccccataatgcaacatgatcatgagttatgagtattacgactccttgttgctaacagatagccacaaacacaataaacttgtgccattcaaacaagaaatcgacatcaagttctgtactcttctaaggttccataaatggtgaaactacaatttccaattaaccatacctttccttcttttccaaaaaacttctcaagatcatcagtggtaactcttgtcgataagcctgtcacatacaagttattcccagggttgactacatcctcaggactcctattgcaacaaaacccaaaattcaat

SEQ ID NO: 3022 - DNA, 1641 bp, Cannabis sativa
tatatatatatttgcttatatttataaatagtcccaagatcttgaaaagtaaaatggttatctcttgtagaaaagattaatgtgattgcacacagcacatggaaactctgtagtatatgaatagttttactacgagccatttattacagctagttgtgttgtattattctatattataatcattcaagaaacctgtaaccagacccagtggtaaaaatggcctattgaaaaaaattctataagaaaaaaatataaacttcttggggacataaataattatgtgagaataaaagtaaaaataaaaataaaaacggacaaaaataaaaatatatgataacaaaaatgaaaaaaaaataaattgtggggcatatataaaaattagtaaaaaaattatgaaaaaaattaatttattaaaaattgagtgggtcatataaccccacctccttattgtgtgttgcctgctcatccaccattttttaaatatgaaaagtagtgaagagcattgccaatcactacaaaaaaatatttataatttctcaatatacaaaataagaatacccctacgattagaggcaaaaattatcctctttacctaatattttttcagtatatattaaattgtaaaatagtaaaaaggaaactataccatattttgtcattttattattagacagtccaaaatttgggatataattcctgtgtatgctattggtaagtaaaaaaaaatggaaataaaataatcgaaaataagaaatgaagtaaatataaaaggaagaggaaatggcaagatcaacaccgttacgttactcaaaaagagatgagctgcctgtgagatttgagagagactcgtttttagctgccattatcaattcaattagacttccacactgaaccaaagggagttcttcacaactgccttgaaacttgaagctatcaaatcccaaatctcccttacagatctgggtatcccttacttcagaactctttcctagtctctctctctatctgtccctctggatatgaggcggagacccgcggagtttcggcggccggtgaggcggcggctgttctcgaatgctctctggtggcctctctgtgctgtggcggttttgcttttcatttatgttttgagcaaagggaatcagattgagtccaggcccgccatttcaagggtaatgatctcacttttctgcttaaaaataatatacaatcaattgggtcgaatgggtattgtcttaatttatctcatttgcctttattattttgctcgcgaaaagctttagattgtttgtatgagtttgcagaatggctgccatattgtatgattgatttgtttctaaccttttttatggatcttttggaccatttgatgttcttttaatcaggtaaaagatttcagtttgtgtaaccattctgagtttttataggccaagtaattggttgaatcaaagtatgcgtgaataaatgtctatggtattgtaatccatctgtctaatcaagctttcagaccttaatcgttgcctatcattcaaatcaaaaaacaaagcaatccagtgtgcttgatctatactctcgctctgtcagttaattgatgacactgctaagttttctctgaaaacttgtttgataatacagtggctg

SEQ ID NO: 3023 - DNA, 745 bp, Cannabis sativa
ttaaaaaactactatgtgattagatttgcatataataatttttgttgaaatacaattaattactaatttgatatgtttatctttgttaaaataattatttttaattctaatattaattattaaaaatattaattttgtgtgtaactaacttagtcaatgccattatacaataactttcaaataactaaatcttttctcattataaaaggcaaacaatgaaaaaataaaaaatttgtgcatatcatatagtgttatgaacaaatgatgaataggatatctacataatggcactttaataatgtcatccaatccatgaacttaataattactaatatttaataaaattagagttaattgatatatattatgtaaatgttagggggaaattttttgataattaatttaatatggtataaatcaaaaagatagaggagtgtagtagtagtagtatggtgtgtggggtcgattattctttttctttctttcttttcttttctttgggtgtatgcatgtgtgtgggtacatggaaggagattttgggtgtggtgtggcgaaatggctcatcatcatcattgttccccccactaacccaaagtcgaagtatattctttggtattgtgttgttagcaattagctagattagtccacgagttggctcccgctggatctgcatgtcggccacgtgtctcacgctgtgccgttggttacatcaatcccaaccccaaacccctgatgggattgctct

SEQ ID NO: 3024 - DNA, 1723 bp, Cannabis sativa
tctcaaggttgggttcagccgtccacctaggacaccaattggctgtttgacttgaagtccagcccaaagcaaaatagattggggtacttgtacttctcccagatcgaaaaaaatggttgagtggcactacgaatactgacatgtccaaaattggtggttatgtggaggactactactttgtcaaaggcatggacaccaatcacaccaaatttcaacacattccctactttgtcgacctactttcacactggaactcaagaagagggtctaagaaatacctagacttcccttggatgctcaaaatatgtcactcttagctattgaggccaacttcattaaatgtaagctttacccatctgatggtggttaagggaccgagcaagtaacagaatgggttgtggttgattaggaagaggaggtcacacctcagcaagaagcaccaaagaagaagaatcagaagaaggctcgctaaggtaaccaagtatctattgagcggcctatcaagattagagatggttatgaggaggttactcatccttccatctaggtggaaggaaagggaaaggccatataggttgagcaagaagaagaggattgttctaatgaggatgctccttctttacttgtttgagaaagtgctcctatacatttacagggtaaaccatttttcttagctttgtttatcctcactttgtttatgctttgcttacatatatttattttactcatgtgcagttatgtttcagaggatgttgcgcgcactgaagaagaggtcaggtgatgtctccagctagaattctccaacaaagcatcccaaagtggacgacacattgccaaagataattgtgccgagcactaagactccttagttgactattgagaggagttcaactatctatgcctcagatgttcctgaggtagtggtttcaaactctatcccactggccaagaagaatttgaaatctcaatccgtggctgccccatccaagggctctaaggggcgagcactgaagagcccaaactgcctaagccttttgctactcctcttgtactgaacccaaaaacaaaaaaaggaaaggagatgctcttattctactaggatcatgtgcttcctgaagtaaatgaccagttagtcagtggaaaggacatgtctgtagagctactcatggccagcttgctaaaggaattcacccaagtaagtattttccttttttttcttacacgtgcttttacccgtgcaagctttaatcttttctcatagtgcaacttaatctgaagatggcatatacatactcttgtgccaagtctacagccttgaaagtcacgacaaccagaaccaccttgaaagtcatgacaaccacaaccaccttaaaagaagagatggaggaggctcaaaagtatgtcgagctgaagagtactcaacaggtcaaggttaataagcaactcctagctactaacaagctcattaaagactttaagaaggagattagtgatatgtcgtccactgctcagctcgaggcagacaatgaggccttggaaaaggatgtaaactttcttaaggataagagggaaagtctctgtactcttctttctagtttggacaccaaactcaatgatctaactgaggagaagaagagtttgcagggaacccttgactctgagcgagcatcttttagtgctaaatgggaggttcttcaaaaggaggtggagagcatgtagtcgg

SEQ ID NO: 3025 - DNA, 3221 bp, Cannabis sativa
gaatttaattctataaaattcaattagtattagaattacaaactacaaatgaactttatgagtgtgacttgatattttctttttcttcattttttcccgggtagcagtcaaaacttccccctatgcagagtccactaaagatgacttctccaccatgcaatcttcccgagtctaacatatctaatttgaggaaatttggtgcttcaccaaatccagtttctgaactaaggcctccacttgctcctagaagtttacttggaacagttagggacggttcacttgcgagaaatggtaaagcctcatgctcaagctctggatccccagttttagctgctgctaatcctgctttatatggagttgtggaaacaaactcacaagctactaataggcagatggaaaacatagagcaatgcaatgatactagttataagtgtattaaaactctgaaagagttacatggttttgttggtgtggacgaactgtgtcctggaaaagcaggaccacctaacactgcaataaaattttccatagaagatgcagaattgcagatgaatgataccaatctcttactgaaagaatcctctgagatgaataagtatgaaattgacacgaaggtagtagacagtagccaaaaaagtagtgaactggaaattccacagctcaaaacctgttctagctctgcaattgaagttactggtccctctattaaaagtgatatttctgaccaccaacttgtagaagagagaccctttgattcatcacttaaagatcatggtgtcgttttgcaagtcaaccctgtgtgcaaagctgatgaaccatttggggaacaaagtgaaacgatgcattctcttactggtgaaagtggcccattttccaacaacaaccagatgctacaggatagtgcagcggatattagttcacaggttggggatgatgatgtggctgaagctgaaaattctcacaattttccgcattctagatctattgagttagaaaaagaggatcatgatgtctgcccaaagttgaaccccccaaagggtgatatcgacgaaccatatggaaaacaaactgaaatgatgaattccttaaagtgtatggcttctccagttgttagtgatagccagatgctgcaggacaatgctgcagatatcacttcagaggtccaaggctctaatacagttggaattgaaaattatcctgctaatgaaacatttgaggaacaaactgaaacaatgcatagtggcccatttttcagcgacaaccagatgctacaagatgatgcagcagacattagttcacatgttgaggactatgatgtggctgaaacggaaaagtctcatgtttttccacattttaggtatattgagctagaaaaagaggatcatgatgtcttcccagagcttaaatcccaaaagggcgatattgtcgaaccatatggaaagcaaactgaaatgatgaattccttaaactatatagctcttcccattgttagtgatagtcagatgctgcaggataatgctgcagatatcacttcaaaggttcaaggctataatacagctggaattgaaaattctcctgctttttctcacattggatttgaagagcaggaaaaagagcttgataaaccatttgcggaagaagctggaccttatccaatttctagtgatagtcagatgccatgggacaatgctgcagataacagttcaaaggtccaagattataatacggctgaacttgaaaattctcctcctcttaggctcacagattatggaactgaggattctactgccattggtgaaccgaggaagcaatcaaatgtcgaagatggagttatgcaatcaggcaacagaacagatagaaacaacaacagcagtataagcatttctgcaaataatgatcacaaggtggttattgagaatgtaatcgaaataccagaatttgtagagcttccaaagtctccccttaccggagaagacactttgcaggtagatggttccttatcaggtgaagaaagcatttttcctgaagagttagagcaggaaaatgttcttcagtctgatgaaacagaagttactgatgcatctcaaactgagttgagaagtcctagaacttcttcgatgccagactctatgctagactgtgaatctaatgcagatgcatctgtgcagtgccacattttagaggatagtccatcagtcttagtggaagacatcatcaaaccagtggttgctaactgtaatcttaattcccatactcagcatgaagttgggttccgtgatcaatctacttatgtagatttgggtaatatggatgaaggtgatctatcagcagtggttgatgaggatgttattgtcacttgtcaaaaagttggaccccttgctgacagtgaattagaaaatccctgtgttacatgtgaaccaagttttgcagtgcaagtcgaaagtgaatattcttccaaaaataaagttcagcatgttgatgtagaaattaaaaacgatttctctgctgaaagttctcactgtaattttgactcacaacctgtagatgagctctgtccttgtgatgaaaattcttccatggttcaaatgtataggctggaaggtgaaaatgatgacaatgatcagggtgatcaagctaagcagatcacaccttacctctttgaaaccaaagtaatatgcaacgatgaaaaagagagtacagaggttcctacctcgtcatttgacgatagtcactctgtggatgagcctcacacattggagaatgagtccaacaccagagtcacacttcatgatggaagtttcagcttatcttcgcttaaagatgcagatcaaacgtttaaggaatttgagggaggtaatcacgtaatcgaggaacaagatggtagtcgcgagcttcaaaatccagttaatcaaattgaagaagtttcctcaactagtgttcctcaagatgagggtgtcacagaagaacagtaagtatcttcagtgctcattttgtttgtttattctatgtcatttacacagtttcttttttaactgtataaaatatgtaaattctgagaagcataaatgttgtgtctgtggttgcagcaaagaatctggcattaataaaaaacaggatgttcttgttataaaacctcccccgaatgcgactccattttcagatgaatggttagctgcatttgaagctgctggagaggtaagacagctttagttctttttttt

SEQ ID NO: 3026 - DNA, 1298 bp, Cannabis sativa
ctattctcggccacaagcccaccaattggatccataattaaaacattgggtcccttagtaactctttggctgaaaaggggctgggccattaaattatcacaatgtattgggcccccccttcactccctcagcaatgctcatgttaccatttaatcccaccggccccactatcacctcagaagtagtcaaaggctcatttgaattctcactaggaccacacatattcggcccaatacccataatagagcccacttcctttccattattcaaactcagcacacccaacgaggcacggtcatctccattaatcgccaaaacaggacccttctttggagcctttccatctcttagatttccaaactcacccttattaccagaattagtaacggcctgaacagagcactcaagactggctctttgggagccacactgcctacagaggcttctcggacccatcacccgcgtgaccacgagaggtcaccatcaccgtacttctccttgttctcctagcgaggccttgcggaccaaccccagctttcccgttaaccaccattaacggagctccaacacggaaagacttccccggagccgaggccaaagcaccacgaccgaacctagaaattattcttgagaatacatccaaaatgtagaaacagtagaaagtcatggcctgaaaatggggaaaggggtacctacgctgttcacaaccataacaggtgaagaaagcttacatccccttcgttgatgtcccaacacgccacgtttataacaaaaaataccaattttttcaaacttgaattgtatccatctcttttcactattagctaagtcaaagtaacatcctgaggtcagtggttttgcaaagtcaatatcaacttgcactttcataaacttacaccatgaggaaggtttatgatcttcatgtggtaagttatggatttgcatccataacctcaaaagcttaaactcaactctgccattcaagctcggagtccacgcctgtagaaccaaagtatagcctcgaatgcaccggggaccattttcaagggcctagtttctaagttccacatcctcaaacccaaactcaaaagaattattgccaatttttgaatcgcctgccaaagccacaacagagacttttttttttttccaaaatttggccacaaaagcgaccatagtagattcctccacagacattggggccaccagttcgccatataaacacaaagtggaaagggctttcagagaagagacactagggttaaagtgacagtggtttcaaggcaagaaaagcattt

SEQ ID NO: 3027 - DNA, 1012 bp, Cannabis sativa
ttagttataaaccgggataaaatggtttccgtgtgaaacccttttaccaattgtactctcatttgcgatgatcaatattccactgacctctgcttcttctcaaatcttttacccccatttctcgatccttcaaactcaaagtacacacgtcgatcgattaaggtactgattttttcattattgttttcaaatcttttgcattttaaatatttcatgatctttgcaatttaaaggtttatttctatcattttgttttgggtttatatgtttttttaataatgtctcttagtttagaaaatattgattaggtatttatttttttcctttctaattcttaaagatttattttttataatatttgagtgagttattgataacaaattttatgaacttttgatcttttgctatgacaagaataaacatatttatttatatatacttagttttaaacatttgagttatatagttctagtaataactttattttcatgtacttgtgatgaaaaaaattattaaccaattgataattaagaaactttcaaaaaaaaaaaaaatagtaattaaggtggtgtttggtttattgtaggaatagaaaaatgataatgggaatagtaatgtaatgtaatgagaatagtaatggtattaagatgtttggtttatttatgtaatgaagattgaaatagaatgtaataaatagtatatcgacaaaaatatctatatatttatcaattaatttttttaatttaaaaaaataaagggtgcaagtgtcattttattttcaattcaacaatgcaaaacacatgacatgggtatagcattgtagtggttattattccaataagtagtgtacaatatataattttccacctctattagactatatattgatcataatattgaatattgatgaaaaaaagttagcataaattgtgatattctaatattttctttgatacatcattaattgtagtgctaatttgtagttaaaaatggaaaaactaaactttttttc

SEQ ID NO: 3028 - DNA, 1721 bp, Cannabis sativa
attcttttgtacttggtcaatgtctaaaaatcattgagattgtaagaataaactatgttctctatttttataacaagtactatgaaatattaattttatgctaaaacataaatatcataatatttgaaaagaaacaaaatttaacttacgttaagtatgtgtctaactcaggacaattattcaaaatgtaccattgaccttggttccattcctcttgagttagtataaaagatgattgtttgccaaatggtcttgtaggcatgttgattatgtacgactccttgtatcttctttgaaacacctaaccagttgaaacacctgaagcgattttttaattaacaatctattcaatacaagattataaagtcgtcatgatgtagatcaaattttgtttagctcataccttaacaactatggcattaagttgctcttcatatttgttgaggtgaattaagattcccttgagaaaaaaaaatgacaatgaagaaatgacgactgaacaaagtaaggaaaaaaatgacgaaaaaaatttatgtatagtatatatacacatattgtttgaaaaatctaaattcaaattttaatttttgaaatacttatttgcaattttgttactttttcctcttgttttgtgggatatcttttatgaaatatgtattgttagattgtatgtttataattaattaatgttttaattttactttaaattttataattaatgtttgttagtataggttttgttaagttttttggataaattaaattaaatattcttaaatttattgttaattttatatctaaaatgttcagaatttgtgattttaattatttttaggtataatttttaatttaaaagaagataaatagatttttaaatatattctgcaaagatatttttattttcttattttgagaaaagaggtatttgtatattaaatttagggaattagtgattcattgtgtaccatactattataaaaactagttttacaaagtaatatcactacagctacagtataaatatttttatctcatttgaagcatgtggaacctcaaattcaacagaggttttatataactcctcttatttttattgtgaattttaataggaaaaatttctctttatgcaactagtatatagtgcatattgttaatagtctattattttagtggcaaaaatcaacagaggattgcaaagagtgagcaaaatcattgacaagggtgctaaagctcttcaagatctaaacttgctcaaacttttgcaatttaagattacacatgagctctcttccaattcctttcaagttctctttttctattttcatccacaatgataatttatgtctatgcgaattgtttacttttttctttgatgttcttcatcgacaggaatgaattgggctaatatttacaattcaatgtgttggggatatgggattgattttcatttgagttttcatttttggagttgtaggaatgtattaagtgaggagaaagcatccttttttgagttttgttttacagaattataattgcagcttgtgaaattcatgacagtacattttcttgacccatgtatatgcattcataatcatgtatatgtattatacatttaaacaagcataatgtagtgtttcatatgtaatggggattgtgtattgcggaatagaaaaagtggagaagatttcattgatctgaaagtgaatgaattgaattacaga

SEQ ID NO: 3029 - DNA, 1077 bp, Cannabis sativa
gcctatataaatgtaagagttgctctattttgccgcctttggggcagctaccctctctcaaacaccttatgatttcagattttccaagcctgatggaaataggtacagagttcttctcaattagttctgatacaaaaccatttagatgtttggagagtttgtatttggaatcgatgccagagctccaaaagtggttgtttattgaaggtgaacttgaaggtggagtatttcctcgtcttgaggaacttgaattaagagattgtccaagactcaaagtttcattgcctgattacatgccatcgttgagaaagctcgtgatcgatgaatgtgaccaactactgcctttacttccaacggctgcatttccacttcttgacactataacaatatctgaatgtcaaggacaggaggtgtttctacaagggggattgccttcaactttaaaggaaattgtcatttgcagttgcgaaaaccttaaggccttagactcagccattcaacacctcacctccctcgagaagttggaaatttcgttctgtgacaaggttggtgttttaacagaattacctacctctcttcgttctctaacaatcaaaaattatcctttactaacatcacgactccagagggaaactggggaatggcccatgattgctcacttaccaaatttagaaaagctgtcacttttacatggtctgtaatttttcaaagaattctctacatcagctggtaattaatactctttcctctccacttgtttatttttatttttatgaatgtttaacatgaattcaatgatgttttaattattattaccaatcttaatatgtgattattggcaacatatagactgcatatcttgttgcagcttatttgaaatgtgacttttatttattgcaggaacaatatttacccaacattatggattcttttccaatgctacaagtacagatattttctctgttcattcaggtaatgatattgtcatatctttaaagtattaattacacaacgagtaatgatatatgtgcaccaaaatattacacccaataacatggcattgcttttcaaaacagt

SEQ ID NO: 3030 - DNA, 1618 bp, Cannabis sativa
cttcaacttgaactaacattgacatgatctcgccagttcccttatagtagtgatatgaataatttaaattaaaaaaataacatattgaaacagaaagagctccaacacacaaagctcaccgaaaaagcaataccggcgtaaaccaactaagatcccttctcttgctatcttcttataaccggcatagtaatgatcacgtaaatcagtaccagaatttccacttagctcctcagcaaactttactctcaaaatattgtcatcccctagaaccttttgtaagtgagtttttgtgttgcttaaaaaggggccctggattaaaggtcaaaatcatcagcatttgcaatagtctttcaagtggcaaaccaataataccaacatgggcttgacatcagaaaataccgtttagaataaatgtatagatacaaggtcattggataagtttaatttacaatcgagcaactgtatcaagtttttcatgatgttactatatttcgaagttaagcagttgttgcacattaaaatcccacactaaggacattcttcccatcattgaagtgaataatgcaggactaagccttcttaatcatgaaaataaaaagttatcttatagaataagtcagaactttgaatcaagttatttaagttttctaaattagagaaaggcctctacaacacatatattagatcagagattggtgcatttactaatccttgtaaaaaaggtttcataacaaaaaatttgatagtctttttcaatttcactaatacttgagaaattctcgaaaattaattcacaatcatgaaagacaaaataaaacattttctttaatttccttattatcatcacacattacagattagtaaaaacaatctaagataaatgatcaagatacaacttttctaagaaatacttttacgcttataataaaagtccctaattctatatgatcatgtatgtgcaagtggaataagctagtataggcaaagaaagcaaaccttgaacctgtaacttccttctgtagaaacatagcaatcatagatatacgttcttcctttcacatcccaatcgtcatactgtatatcaccccaaaaaagaaaaccaggaaaagcattacaactaatacaaggtgactaataaataccctctattataaacacagttacacatataacaaaaaaataatcttaagcttagtcctactaaattttattgattaaatgataactcaccatgcgacgatcttcttttttgacgtatctttgaccaaagagtctccatacttctgcttcaaaccgcaccatcgtaagttgattcaggctcctaatatcttcagccgtggtaaccttatgaagctcatttctgtagttatttatacaaaaattgaaaaataataaataaataatattaattggaaaatgataataaataaaaactttagattaatacccggcaatgtagtttaagattaagaactgcttattaaactccatttcccctaaagcttctaacgctgcctctgcttcagtttgtaagggagtcccagtctctaaattgagggagcaaggaatggggcgaccggtaatacctgttccacattaaacgacaccgttcggtaac

SEQ ID NO: 3031 - DNA, 2624 bp, Cannabis sativa
tacttggaggttagttcaaagcatttttgatattcaccacactggtggtagtattcagctttgcaggccaaaagatcagtgttgtttttgagagagcacttgaaagaggaatcagaagaattactactacaactttctttctcgagttctttgaatttggcttcaacgacatattctttgtcatactaaaaaacacaataaggaaatgaaaaccatgaatgataacaatgaaaaaaataaaactgtgcaatttggcagcacaataagttcgaaaaaaataaaacttattagaggttcttgatattgacatatgccatatgtgttgtagttattcttctattttaccttttttattaaacaagaatagaatgatgacagccatccatcttcaggaccgaagtgcaatgaggaaacaagacttgtttctgaaactcagaagtaaaataccaaatttatatattatacaataacctcccttgttagatatcaccatttcctcttgcacaatatgatgaatcacatccaactaaacagaaaaggcattgaaccccacttgctactacaatgattagagggaaaaagaacactcaacagcataccttcctcgttagaaagcatgtggttttcaataagacattccagagcctgacaaacaatcaagaccaactataaaatcaaaaactatattacctataaaaagaattgattctagcttagattgagttgataagaaaatactaaaacaacaagaaatggaagggggagggaatcttaataaaaaaaattaaaataaatgaaatttggattttactttggttatttttaataggccaacagagtatgaactttcacttagagattttcactaatcaaataggcaaaggaaactaactttgtttaacaaaagatttaagagaaccaatcaaaactacaagtgtaaatccaagcaatacctcataacataaaggatcggccttgatagcagctttataccttcacaacacagataaaagcaatataaatctgattaacataaatctaacacacataaaagcaatatgaaatcaagctaggaaaaaaaaaaaaactaaccactgtcgagcttggacacgattttccaaagcttcatatgccctgcctctcaaaaagcatattgcagaagatatctgtagcaagataagaaaactgatttaagtgcatataatacatttaattcattaagcactcaactatatactattttctattttagatgactaataaatgttaaaacataaattacaaacagcacaagaaaataatagtgaagaaatagttacatcaatttcgcgatcttccccgtatttatccaagtacaatgcatttgaagcttttgtatcatagacattcccatgttcatccactttagcttctccaagcattagtaaacattgatcccattctctcaattcctcctaatgaaaaaagcatatcaatgatatcatacaaaaacatacatagtaaccaataaaactcatcaccacaacaacaatgctatttctttcacttgtattctttccaaaacaaaaagtagcataagaggctaaactcattgcttctaccaagttctaaacaaagattttatattaaacttttttgcaatcaacaaatccgaataaagtattttccctttttcacctccattcaaacaaatttgaaaaattctccatcgaaaaacagaaaacctaaactcgttgcttctacaaagttattaacaaagctttaattaaactttttcccaagaaaaaagtatcagaataatgtcactctctccctttatcaactccattcgaacgaattcgaaaaattctccattaaaagaacagaaaatgtaaaaacaaaaacaagcttctgctacaatggtatttcgtatttttatcaaaaacaaaaattcgaatgaatttgaaaaattctccattaaaaaaagcagaaaatctaaactcattgcttttacaaagttattaacaaagctttaattaaactatttcccaagcaaaatatcagaataaagtctctatctctccctttttcacctctattcgaacgaattcgaaaaattctccattaaaaatacagaaaatgtaaaaacaaaaacaagcttctactacaatgctatttcgtatttttttatcaaaaacagaaagtagcatacggttggaacagaaatcgatttcaaattcttatagtaattgcttctacaaagttccattggaataaatttaagtaaaaaaaacagaaaatgaaaaactcactagacatttagctgctagataacgaaagcgaaggtcacggagaacgatctgagaggcattaaggagatgataagcgcgacggtaatgacggccgaggaagagagcttgagcttgcatgtaaatatcggctgggtcattggtgaaggcagcgaccttgtctgagaagaaaatggcggaagagtagagatgcttggtgacacagtccctgactactccacgaagcttttcgatctcttcttctctcatcgctgttaatggaaaaccagggataacgaagaagatgagagaagtctgtagagagagaaagtgaaaagggttttagagagagaaaga

SEQ ID NO: 3032 - DNA, 614 bp, Cannabis sativa
attcgcagtatattcgttttctaaacattattgataacagaattttcattctctgctttatgattctctatattatacatctccaacatatcatcgaaatacacagaaaaataaatacatacgtacagaagcgttctctgttcccttttcttgttaggaatagcctaacactcaacagaaagttctttaaaaaagaaaaagaaaagaaagtaggagttggggaaatttaaattagaaaatgtaaaaaaccgttaaaaaaaagaagaagaagaggagatattttgttctggactaagctgatctcattggcactttattcattggcaaataaggcatgttgtccagttgtgatttatttattatcttagttaagcttttgaagcttctagcggagtttgagccctgcttgcactgatctgctcgtatagatctcttatctttaatccaacaatggtttggaagagaccagtaccgttgttgctacctgggaaatcagaatgcttcaacatttgttgagtcacttctccatagaacttggttgagatgttactcagatggctctccacatagatcagctcatctaatctgtcaaattgtccatccatctctaaaac

SEQ ID NO: 3033 - DNA, 985 bp, Cannabis sativa
cgagttaatacctgttttcgagcccgagaccgagcagcggattctcgattcttaatcatacggcgttgccttctctccaccaccacttccaaacacccatctatcatcttacccctcttcctcaaactttgactttgactcttctcttcataacacacactattattacaatcaaacgacgtcgttttctcatcagaagaagtaccctgttgtcgtttcatcaaaaccctcgtcgtttcatccaattctctctcttcctcctcttccacatttgtcgtttctctaaccacacctgcttttaccaaaaagtcctcaagtgtcatctccccaagcgtagtttgctctgaacaatcctccttattccgattccgattccgattccgatcccgatcttcatcttgttcatcttggtctttgtgaatctgaaaccagatctcatctacggtttttttacataacggaatcggaatagacaacgagccttgtctagacaaagacaatgaagaagttgtttttgttgttgtaacaacctcgggggtaatttggtcattttgattattattattattattatcgacggtccagatgttggcgatgaaatcttcgatgttcatggatccaaagcttttcattcgattattcttggtttgaatctcatctagagtgagactgaagatcgatgaagatgatgttcttactaacttcattgattccgactctgattctactttctcttcttcattcaacattttcattattaataataattttctcccctaaacaaaaaaaaaaaacacaaattatgtaaagaagataaagtaataactcattgcatgcattacataatatatatatatatatatatatatatattaccttgtggaaatggaagagagaggatggatatgatgtagatgagagagttgagaattatattgtaagtgattatattatgtatgtatatatgtgttatatgtatgtatag

SEQ ID NO: 3034 - DNA, 2864 bp, Cannabis sativa
  modified_base (1717)..(1720): a, c, t, g, unknown or other
ttttttttcttagttttggttctatctttaatttaactaaataaataaatattaatttaatgatataacctaacattaaaccctaagttttcagcctaaataacccataaaagacaaaataatattctacccatccaccaatcacttaggttaaataaagcctaacgatattttggtcattttctaactatcccgactaaaccgacttctcaacattctaaactagtccggtataattccaatataactcaatttttatcgatgtgacatttctgaccactctaccgaattttcacgaccgtcaaataattttattttaaaaaatgtatatacaatacccacataatctgataaaatctctgtaattaataaattatacttaattattcatttaatcacatatttaataaaatatgcccaaattaatataatcataatttctgaatattacaagtgggtcacaaattgaaagggaaatcatcaagatgacacacacaacatgcaactactgatcaacccgacttacaacaaacagttgctcaaatgcaaagacaaattcagatattgactcaaaaattgtcacttgaagaccgtgcacaaatagatattgagataaccgatgcatctccaacacaaccaatgcatccacaaccatctcgctctcatatgcctagagatggatctggtccatcttttcagctaatgggttttcagcacagcaatcgcagcagactcctatttcatttcagcaactactacaccagcctcatgttccttcatctgcacctttaacccctgaacaaatgtttcaaagtcagatgttccagtcattcttgcagatgatgtcacagtcgctaaacagttcgcaagtaatgatgcagatgaatgacatagtcacctcagacgtctcagatctcacagtcttggatgccacaaatgatgccaacacattaaatatcacagatgttgtaaattgttcagatgatgccgacaccacaagggcggcaatatggggagtagacattgcaaatgttgcgacacaacatggacaatatacatctcagatgatgccgacaccacatggaccgcagacatctcagatgatgacgagttcgtagatgccgccatactatccacaaataacagatgttccgagagatgatagtgatgatgacaatgatactacaaatttcttttaaaatttttattttcattttatgaactatcgattttatatctatttatgttttatgaacactcacttttagtaagtactcttaatttaacgatattgtaatatttgtgactcttaatattatatatgaaaatatttagtttttttactcttaattaaattattttgagggcgtttggtaacacttttgttttaaattttttaatcacaaaaaataaaagtaaattttgtgttttaaaaaaataaaaacgtgttctataaccattatttttgttttttaatttaaaaatagaaaataaaagtgtgttctataactttcatttttttttattttatttaagtcggttctaggtctggatctagggttagggtcgtggttcgagtctgggactagggctgggtcggagttcgggtcatgtacaggttggggttggagtccaaaatattgattaagaaaaaaatattaaaaaaattgtgaaagtgatttttgttttgttttaaaattttttaaaattttgattnnnnattaaaaaattaaaaaagtaaaaacaattttatagaacatgctttttgaaaatatttttacttttttaattaaaaaaacaaaaaataaattagaaaagcattaccaaacacatttttatatattaattaattaaaaaataaatatttaatacaattttatttttataagagaaatcaaaataatttttttaaaaccgagtctatcattgacgatattgtcgtcattgatagcccaacaatttaaaaaaaaataaaaatagcacattatcaatgacgacaatgtcgtcattactcatttcccctgacaacttaaaatgtcatcattcatattatattttgtcgacgagctatcaccaatgacttttcaccagcaacatgtcgctattaataatcattactgatgaaaaacatacccttcactgacgaaatttgtccttatcgaagcatatgatttttgtagtggtcagagattggattagtggtagagtagtccttcgatcgtagaagagagtgagagagaagagaaagaaatagatggggatgtgttgaaaaatatgaggggtaatttaagaaatagacaaaaattgacctagttagtccatattagttagctttagtttaggagaaaaatttaaacctagtaaatggatattttatcgaaattcacaaactaagaacatgtatttctcagcgataactgatacattttactctaatttatcaattaaactattagtaaaagtaattattattaggtaccatagaatatgtaaataaatattgtcttataatttaaatgaaaaattataatataaagtataaagtgacatatgaaatgaaactcaagtatctcgtagtatattctggatgggctactaatacaaatattatagaaacattcttttttcattatggacataacatatatagtccacaagtagtgacgacaagttacaaacaaagtcaacgatcaaattttgtcaaaatcgaaatacatgatgattcctctttaggactctttacgtaatatttcatgattacaaatattgaacaaacccactaatactattctagtcaattagttgtgtacgtaagtaataataatattctctttttcatgatatttcaacttggatcgatatat

SEQ ID NO: 3035 - DNA, 3415 bp, Cannabis sativa
atcaatccgcacatttccttcttaggccacgcattttcaaatcgaaacgtcttatttctcttgccactagttcgaagcaccggataaagaaaaataggacaatggtctgaatgcccaaaatcaagattaaaaagcttagttgaatggaattgagaattccaaattgagttagcaaaggccctatccaacctgatttccacctatcggcttgttcctctactcgtctcaagtgaattgatgaccatgaagctccaactcatataaagcgtagtctaaaatagccgattgaaacctttctagaaaccacgatggataaggcactcctcctctcttgtccatttgatccataacattactaaagtcccctattagacaccaaggcaacaaagattcatctttaagagttcttaataaagagcaagtgttgtgctgaagtacccgattagcttccccataaactcccgtcaatcgccaaccatcgaaaccaaccactcgaaccacaatatctatatgatgcctagaatacctaataacctctgtctcatcagcattcttccacaacattgtgataccccctgagtgctccgcatcatcaaccgaaaacatcccctcaaaccccaaataacgaccaagcaaattaatgtgatttgtatcacaaaaagtttcacacagaaaaataaaagagagcttcttttgagaaacaatctcattaaggaattgagtgacccccgggttcccaagtccacgataattccagcttaaacaactcatgactcttggcgagctctattcacaaggcctgccaaatccaagttttttgacaactccacctccacttcattactgtttccttcaaccagtacatttggcccaatatgcctaatagaagagagtctcctccttttcatttccaaaacagtcaacccccctcatttaatcgagtatcgtcgacactatccataatagtgccattaataaatgtagaaacagatccctcggctcctaaaattttgggagatacacctataccagctggaaatttttccccaacaatctcagcattacccgagcaatcaagggtatcagaacccagaataagccactcggctctcggagccaacgacaccatatcagagacaacttccttttgccgcaaaccgctcccaccaccttcctgctgccaatcaacagtgcccatgtgaaccccgtccatctcttccattcttgttcgaagccatttttctccgatgagctttgtttgtctccttaacggagccttcattcactcttcatacggtttggttatcttgtccaacgatgtatcaaacagccgcatacaaaatcgttcaacatgtcccaacaacccacatatgaagcaaaacgtgggaacgttctcgtatttgaatgcaatccaaataaaatttgatttcgtctttttcaatttcacctttctttgtagtggcttattcaaatccatagacactcgaatctgcatataattccaacaaattctcatgaagtttttacgattcgattttaaaaacttcccaatatagttgctaatattcttaaggttctgctcagtcatatatcctatcttaagatcgtggatttggacccacaaatctaaagagtttaacgggatggtccttggattctcaccatcctttaatctacgcatcaccaatacctttctattgaacgtccatggactcccttctaaaatcctcgtaatatcaattttatggcaaaattgaaataagtaccaatctgtatccaactcctttatgcaaacatccttacctggctttcataaggccaccaatgtttgttgcatcgaaggaaaatccactgcaccatcagggagaaaacgcccaactaaacaccaacgggcatcaaaagccaccacctcttcctcatttgcttcacaaaacagccccccatcattctcattctccaatgtaatatccaaaaaatcctccctcaaagaactactagatgccatactgaaagccacaaaccaaccacgacgagacaaaccacaaacaacaaaaaacaatcaccacgaacaacaaagacactcaccacgaatagcaaacacaattaccacgaaaaaacctcaaacaaaacaaacatacacaaagccaaccatgtcagatgacaagacaaatatataaccacattactgaattctcataaatctattccttttaggtttaggaatcgaaagtcgacgtcacgtgaattctcgttaattattcctcagtggtttaggaattgatgaagcttaataagccaaaattgacaattaagccaagctgatcaaagtcaccgtcacgtaggtttccttcagatttttcttatactccctctagtttagtttataccaaaataacaaatcggtataaaagtatcatttagtattattgtgctcaaatttattttcataatggtcataacatgtttcttttaactacatattatatttatatatataatattttatacaaagttaaagttgaaaacttaatttcttttaaaaaatcaaacttaaaaaagaagaaaagaatttccttttaaaaaggaaagtaaagcaattattaaaataattgaaaatctaaaatttttataattttgttttttttttcctttgagaactttaacaaattaaagtaataatagtttattatttatttttaagaaatgtatttaaacttggttttaattttagagaattatatattgaaaaattgacttttcattttaattcaagcgtattagatatattatgtaatcaaaatatgaaataatcgtataaaaaataaatgaccactgcatgtattgtttttataccaatttgtcgaatataagatagttttggtttttacctaaacaaaggggtgtaaacaagtaagaaagtggtataaacccatccgtgtccaaatttttggtaatttgtttcttctcattgcaacttttcaattattgcaatttgcttatacttgtaaaatgatcaattttttggtgcattgacagacgaaatctgtacttgacatggcaactaaggtgaatcatgtagttctattatcagggacaccgtctttgtcaaggttgtagcatgtccttcaagtagaaaagcaatatcactatatcagttctgttattgattatgcaatacattgcctctgttaatgtgcaatgtttattatttatttattcctgtcagttttctttttggtctggttaacgttaattgcatgttaatagctcactttgcacaacttcctaggtgaccataggccattcgacatttttcatcagataaatatgctatggtaagttctttttttgagaatcgctaaaggacactagtagtgcttaatactaccatgatgcggcatactgctattgatgc

SEQ ID NO: 3036 - DNA, 924 bp, Cannabis sativa
ccttattcttctctttgactacccattgttggtttgtactagctttcttcctgtactcatcagtctcatgacccatgcctttacaatgaccacaagttagaggcttacattcatacataagcggtaccttgaaatttcccccatattcatcttcaaaaaagatagcatcagggaactcttggtgaaccgaaacctctattaacatcctgggaaaggtaagtttattcctttcttttattgttgtatccacctgaagcgggttccccaattgtccaactatcttaaacaaggatttttcaccccaatattttagttcaaggtcattaacctgaatccaaatgggaattgaggtgatatcctccttcctaaaatttgtatcgggatcccacgctttcatgatcaccaatctcttattaaagaaaacatagccaccattcagaattctatccctggtttgaaccgaattaaatctaaccaagaacactccatatgtaatcattcccaccctatcaacttctcccttccaaactcttctaataaaacaattaatgacagataatgggggatttgcccctaacccatagcacacaagagatggtctccaaaactctacctcatcttctatgtcttccaaattaatcttgaccattgccttagttccctgtttagaattcttaaaagagttttcctggttcctaacaacactgccagatcgcaagatagggggagtattaggattaccttgagcaattgaggtagcacacctttggtttgctgtcatgaagaaatcaaaatcagcttggatctcttcctgaagcttaatctgctgcaatgaagacctaggcgagagtggaggtatgaacaaattgccctggtcacgatccacaaatccaggaacatggccttcatgatcttcctccgaga

SEQ ID NO: 3037 - DNA, 865 bp, Cannabis sativa
ctctattgtcaccggaaaataacaaaagcttttttttcaatagtgatggaaatattattaagatattattgataaaagtaaaagtatctttgtatttattttataaaaataatttcttgtataaccaaagattatattttgcataattcttattgcaagtcacataaaataaaattgtatttgaaaatttaaacaatataaagtttccaaacaataccccatcacattaaaaaacacctttcccatcctatttgtgttcaaacagtaagtcatattttttttacttatttatagaggttttcaagatctttcaagatcacttttggaataacatgagataagtttttttttttattatttttctttgcttattctattttttatagttagtttactggatgttataaaagatattttgtaagaacttattttttattttattattaatgtagagaaattttcagttattttgatgaaagtgctagattggtctctcttgttggagcttttctattcatttctagagtctaattatttagttttgatatcagcatattctaagcgtttcgcttgatgtaatgatttggacgctttcttagctgatttggctagtttattttctaattttcttaaggtatctctagttcatgtatgcgttaattgtgcatgcttagggtggattgtgaactgggtagctttatatcatttcctattgatgtaaggccaatttttaacaattcaaaacttacacctatagattgttaatttttgtttttctcctattggatatatgctcttcttattttactatagaaaaaggttttataaactattggctctttataaattctaatatatatttgtt

SEQ ID NO: 3038 - DNA, 749 bp, Cannabis sativa
acgagcggtttgtgctgatacgtgtgcttctgttaagggaattaagttttgtagttagaagttatcgagtgtctcctttcgaactgcatactttttggaatgcttgccttataactaaaccgtgcagcttatgtgacataggaacttttaggttgcctttaagtaatcgaacaactaaaccatgagttgaccaatgcacctctccggggctttgtactattaactcaaagagtaaatggtttagaaaatatttgtctattttcccaggaacacaataaaggccacattgtttctaacacaagtttatttttgtttatagtataaagtatgtgttggctcaaattgacacatgcatacaatttggagaagacgcagatgtgaagatcaaggactttgatccagaagatgatgactaagaaggatgtgttgttgggttgaaagctttttggtattatggagtataaggagagatgtactgatttatgatgatttttagaggttcttttataacttggaaagaatgctcgaaacagagtttgtggattttgagaaatgaaatgaaaatagtttctctttgaaatctttcatttgacaagtacatttatgtcggatttgttacgtggaagagttgatatttattttttatatagtgatgtgaggttattatatatgtagctattaatcattagcactttatatggctgatttttcaaaggaatacttcttttcttaattttcctcaatgtctc

SEQ ID NO: 3039 - DNA, 885 bp, Cannabis sativa
agaagaagcaattttaggctatgttaggcaggaaggaaatgaatcagaagaaaaatataggagagaaattgaaatgaatattataaaattataatgatatcccctattattttgtagatgtaaatctgtaattgattcatttgccttatgcttttcaaacctagtagttttggatttagttcaataatattttcttcattttcttttcataaaacaactgaaatataagagtaaatttttctgttcaattgatactgaggtagtacagtagtaacattttgcaacaataagtacacacaacaactcacattggtcacttttattctacggacccaaattacaaagttctattacatacatatacatatatgcatacattacatgtacctattgtgtatagatattagatattaatttagagaaacaggtcaaaattagaagcaagcagcactagtcgatagcgatacacaacaacacaagtaaaaatactagagtggagggaatcacaatcataatcaccagctaaagctaatggactcaaaatgcaaattttccactaaaccagaggagcatatattggccacttcatgcctcagctgctttggcccactagctagaactcctatgcttgatcccttgcactcaaacaaaatccctgcattaaaatcaaatcatcaacacaaaattactttcactttcttctctctctttcgaattcacgtgaaagtcacgtgagtaaaaatacaatcaaaatccatgtcatgcatatgtattgttgaatcacttactcttgagatcaggtctttcaccatagtggaccttcgtagcttctgccaaagtctgtctcggaaggctctccagctctaattctctctccgcattata

SEQ ID NO: 3040 - DNA, 867 bp, Cannabis sativa
gcaagttttcatagcgaaattccaaccaatgttcatcccgaacatgaggaagtttaaccagttttccacgcattaatggttgcgtaatgtcaagtcgcacacgcacccgaagaaaagaaccccatccttcatgaagcgagtcctcatgaacgtcaacatattcaccaatccattcatcgatcttagaggccaaggcacgggacttgctaaggaagggaagtcgatgaacttggacccacatctgaactttgttcaaatcctccttagtgacattatgtagaacaattggagagtgcaaaacaatgagatagttgttgtagtgccatggctctcctaccaacagtctaagcttatcacctgcacaaccaagagtaagaagataaagatcagaatgcatctcagtaacaatgacttcaaaccgacatttttttgaccaaaattctcccattctagccatgaaggtttttggattaaaagcattggagagacatcgggcaacaaggaaaaattgtgggttagtgtttggtgtttgcagatcagattcagtaaggacatgagtagccctttccttttcagacaagacaattttggaagacatatcaccaatgattgattccataaacagaagaagatcagacagagaatacaaaaaacgaaggtatagtgtaaaaatgctttgatcgaaagaataaatagatggtaaaaaccagtagttatgctgaaaaaactgggaatcatggtgagaaaatggtggtagaggaggatgaagatgggagatcatggcaaaaaaccagaaaagagatgaggaaacagggaaaacggttgaataactgctacagagcaaaaaaaccccactcgggcaacatt

SEQ ID NO: 3041 - DNA, 3524 bp, Cannabis sativa
  modified_base (904)..(914): a, c, t, g, unknown or other
  modified_base (994)..(999): a, c, t, g, unknown or other
gaagattagtatgtaacgaagagtgagatataagagtgatatcccaaaaagtgaaatggatttatcttgccaacagaaaaaaaaaaaaaaaaaaaaattgtattattattattactgaaaataaataaataaattgaataaaaaatgagactagggtggcccttgcctgcacacggataagaacagctgtcaacgtggtacaacttgaataggtggtccctacctgatttggcatttctcaatctccacgtgttcatttttcattgcgtataagactttgtgaactgtgaaatgtgtttcacacgagtatttgttcaagatttataacgaactgatccgccagttggataaaacaaaataaataaaagccaaaccccaccccacaccaagttttcatttttaaataataatatatatttttgtttttagcagtttactctaaatttaattttattatcaattaattctaagttctaacatgtaaattttagtaatttacttgcagtttttatattatttataattataatttgtgaattttgatagtataaattgcaatatgttatctaactctttaacatttctcaattaagtatgaaactttttatttaaaaaaaataatgaaaaacattacaaacttaacaattcactaacttatttcccacgaaaaaaggttgaaacttgaaagagtattttactaatctcaagataaattcaatgaacaacaatacaaaaaaaaatctcaactttgttaaaaaattataataatgatattactattactctaatgatcataatactggtttttttaatagttattattgattgaggagttgataatagattatgtagatttcaactacacttgcctcctttaactacggagagagagagagagagagannnnnnnnnnnagagagagagagagagagatttgtacgtataggccatgtgaaaatatgtcttggttcttgagctctctctctctctctcnnnnnntctctctctctctctctcttactgagatgcccaatatattagccacatttgattatttgatattcatctttgtaacttgacagctctctctgcactctcctctctgtaaaaccagtgagtctttctttcagagattgtctttgtttttaataaatatctatctatgtatatgtgtgtgtttatatatctatatcatcaacttgtcaagcatttaatataagattggaatatatgtaacatctcaattaatgcttatagcccatatgttttctacttcttcttcttctttttcagttgatgttatatagtttgatgattactttaatggtgtaaacaaaagaagaagaaagaaagaaacaagacatgggttgtgctgcttctgtatatgttgttccatggaagaacaagaagaaacaaagtattcctgaagttgtgatatttgtaccttcattgaaaataccattacaatctgatcttaaaaggccacttaaagggttggtcccaaaagatcttgctgaaaggttacaatctcttaggaatcagattgtgttagtggctgatgacacaggtttctttcatctcattcttattttctgtttgtttactgggaaaattctctgtttttactttctttctaactcttgttactgtagatggatctgctgtaactgagctgagaagagcattggaagagtatttgtcttttcttagtggacttactaacaaaggtgtttgaataattgtctgaactagaacaccctcaattttctttttcttgttagttatcattgtattaacaatattcatttatgacaacagaatttggtcttgaaggattgatagaattcaagtggaaaacttcacaagatgaaagacaggtatgattgtcaaaacaaactgactatatatattaataagtgggctttgtctgagttgagtgaatcattcaaattttattactaagcaggaattgagtgtagcaaattcttggtttgaactactatctatgattcatatgatggctttgctgaccttggctgaggctgattccttgatgatccccaaggattatggatcaggaataagagttgtatcttcaggtccatattgtttcatatttggcttcatatatctttgtttcagagttggtgatcttaacttgatctccatctaattgcagattgtaagagggaagctgttgatttattgcttaaggcatcagggtacttggaattctgtgtccgagatgtactggttaggataccacaagatattaagtatgttgttatgaaaagatgaaatgaatataaagtatgaatgaacccatttgaaacattttgacacaaaactatgtgtggtaaacccaggaacagattgcccatggatatgcaaggtggggttttggaggccatttctattcaagctctaggccaggtatttataaccagggtgtttgagtcttaccattactgttactgttggtcaatttatatatatgtttatgcatatatctgaatcttgatgatgaacacaggggacagaaattcagcttggtttagcagtagaatgccaaaaggcaactttatcagttaaaagaaggttggcatgtgagcagcttagctattatggccaggtctgtaatcttgttctcaaattcttttccacaatatatacattattataatattaacctatagatatgttatactgctatgaaattttgttacttgtggttttgatcaggctttccaatccttgtctggagcatatgacaatgatcatgggaatggaaagaagcatctttggtttatcaaatggaaatttcttgaagcaaaggtataactattattacttgaaaaaaatactcaaaatctaacaacagaagaaagctaatctctttatgcttcataatattaacaactcttttactttggattaccaggcagcagcatactactaccatggtctgatccttgacaagggaactgaaccatcttgccacatcagcgccgtgtgttgttttctcgccgcggaagaacttttagtagagagcaagaaagcctgcctgaccttctgccttgcaaatccagtgactaggtaggttggtcttgttgtgaaatagtttcataaaaggtctagttttttgatgttaactataagaataatttgcagacaaacccttttatgttttcatttttatacagttaacttcctttttttcttttttgtgatagtacttcttaatgtatgaaaacgttaccaaatttaagggagtattgggtgtggtaaaattggtcggagaccttaaatttgttacgttttcctacataaggagtatataacatttaaaaacataagagagtttgactgtaattttctcaaactaaaaatgaaaatcctatctgaatgtgaagggctccaccactttggggtgttatgaaacatttgcatcaaaaaatcccagaagttgcatcaaggaagtcacagatgtatggttacctcttagaacaagaaaagtaagaaaa

SEQ ID NO: 3042 - DNA, 1443 bp, Cannabis sativa
cttttagtaacagcttgtgttatttttgatttgttacttctggcttttttagtactgttaatacaggttgagttttttgacacgaaactaacacggaggcatgggcacgataagattgacacggaaaaattgtgtataagcatgacatggcccaaaaaattaagagatgtgaaaacaaagttcagttgtatgatatacatctttgtttttttattgtaacacatttaaattgtttgtaaagggaaatataattattgatgcacataattgttcagcaaaaaaataaaaaaagatgcccataattagtcatttggccagaaagtgccatatttccatgcaggcattaaagcattatttattcatttctattgagtcatcaagttcaatattttctttcaaataaacagaatgacaaaactaaggatagagcatctccattgaagatctgcaaattataattgtgattgcaaatataagaaaaagtgattcaaatttaaattgtaatataacatttttctatttattttcaatattttattattagattttaattaatttattcttttgcactaactgatattattattattattaaattttatatatttatttttatattcttatatttttatgtttttttaataagttattaagtgaaaattaaaccatatattaaatagtaaaatttgatgaaaaatgtcacagaattatatttgttataaataagggtaagataactagggatgtgtagaaagtgatacaaataagtgatagaaaatcaagcagatggttttttttttttctgggaaataagcaggtggttgttttattcatttctgagattttcagtggtaacaaattcaactaagaacattgaagcagaagagaaaatgtgatgatcatgtcacaataattaaaattatacagatagcttcttctcttcttttcttcttattattttggttgtgagatctgagctattactccaactttagatgatcaagtcggctcttaccatcaagcttgttattgacaataaatctgagataatcctctgagctaatagttttatacatagccttactctttttcactacatctggtaaagggccaatattgcctttaatatttggaccatgaaatgcagcaatggaaatacgtttcttctctgggttcactacagccctgtgctcagtgctcttgtactccccattgctcattatctgcatatatatatatatatatatatatacatacattacatggtttgtaactacaaacatcacttgttgaaatacagtatatctcacctcaatgatgtcaccaatgttgactatgaatgcacctgggacaggtttcacaactatccacttcccatttttcttgatctgcaaaccttgtacatcatttacttgaagtagcatagtcaatccagtggcatca

SEQ ID NO: 3043 - DNA, 978 bp, Cannabis sativa
ccataactttggagatgaagtgttgagaggggtttcagataagggttgtaaacacaattatatatggcaaggacactttaaccataacagaagtgaaggttgcccttaattctcaagagattcaaaagaagggagatgaaagaggtgaaagcaatggagaagtgttggaaatattattacaggatcgtattactttatatattttcattatcttgtaatcaaataaaataagaaaaaccgaaaacatatttctaatgatcattttaaaaaagcaaagattagagaatataccacatgtgcagcagaattaatgtctctttccgtcaatcactctagcccttgatcatggttgttacaaagcaataacaatagattgacctaaatcttcaactttgagcgagagagagaagagaaggagagattttttttattcaagtataggaatagctagaataattagtgttatgaaaaatcttagttgtgccttataaacatagccaagtcagtttttctttttatattttctctctttatttaattaaataaattacaagaataaatagtattttacaacccatggtcaaaccttatagagccttgtgctcttttggagcttttccaatttaagtccaattaacttaaattgagcattttatttttgtcacattttattaaacttaaattaataactataccatatttacactaaacaagtcggatctatattactacaaatatcttcacattttgcgttggttttgacattggtaaaattataaaactaacacaattaatttgtgatcgaattttgcagcggttattaagtgaagcaataggtttgcttcagtgcacaaccgatcgatgcaaaaataaactatttgcgtcggttgtgaactgagacaaacgtactagtttaaaaaaatattaataatagatttggacttcaactcttaaaaaaaaacctaccaatataaaacc

SEQ ID NO: 3044 - DNA, 1171 bp, Cannabis sativa
ccactaggcaccacctatcatcaatctccgaaagactatcatcatccaccccatattgcaatccaccagtttcttcttcctccagggtcatagaagaataatgatcctccatgtttgagtgtgtatgattgaacgtagccatatagaaaagaacaaaacataaacacaacttaatagacaaaaataccaaccttgtcaataggacaagacttcaatatttgtaaaaagatttgtgtttggagcgtttcagtaattataaaggtctttcgttaatgcttgatcatagtatatttttcatttgttgtcccaaagagaagaattattgaacaacaaatacaattttatacctagctacaatcacaatgctaagggatatcttaagatgccaagtactacaagacgtgctgttattgatgcattttaatattagttaggttccacatattttaatttaataaataatatgggaagctgctaactaattagggcaccacattaatgtgatgtcatgactcaatttttcatcaatagatctaagaaaatcgtaaacaagcaagataaatataagtgaatgtcgaccaaaatataaaaggatttatgaaaacagatttgacaatggtaaacaataaatttttatagtagttcaccccctttcaacattaatacataaatctttttctcaacttgggttaagttacatttcaaatacaataataataataaaataatctttcaaaaataaatatctttacaatttatcatttttagataatatcttcatggtaacttcagtagcacgtgtcatgagagtgcatttggtttagaacccaagtccacgagtgcttgtggtcttgatggaccttgaaagtcgactcaagtgcatggaccttacgggccggtccacttggacttcaagggtcggtcaacttgagtagactttaagggtctacccacttgagtggacctcgagagtcagttcacttgagtggacttcaagggtcgatccatttgagtggacctcgagggtaagcccacttgagtggactttgagggtcggcccacttaaatgaacttcaagggtcagtccacttaagtggacttcaaaggtcagtccatctcaattacccaacttgagtgaacttcgagggttggcccaattgagtagacctct

SEQ ID NO: 3045 - DNA, 5275 bp, Cannabis sativa
taaccttttatccttgttgagactctgtagatgacacttaggcacacaaagatttggacacattttttgacacgaaataaatgagtttgctattatattcaggtttcgatgggatcatttgaagcttgcaaagctcaaggagaagggaaagaaaaactgatagaatctgtgcaagaatctttaggttttctcgagaaagaaatcgaagggaaaaagtatttcggaggagaaagcattggttatctggatttagcattgggttggattcctttatgccttgatgtatgggaagaagttggggagatgaagttattccaagaagaaaagtttccatgtcttcatcaatggtctaagacttttctcatggaaaatctagtcgtggctaagttatctccctcgagagaaacgctcgtcgagttatattctacttatatagcctatcttcgctctttggaagccaataaatagtgaaataaatcttcgagttcgattatttgtataataaaaatttgtcaagaacttagtttttctttgtataataaaaatttgtataatcaacatgtaatttgcttcatcaagggttttagaatcgagttttggcttagatttgattgattagtttttatttcgtttgtaatatttagttttgatttgggatcctaaaaatatttgttcttgacaattacagggtttgtctaggtttagtatatgtgttaaaacaaattttatatattttatgaatattttcagttgaagaatttaggtttgcttaggtttaatcattcaaaaaaaaaacttttgatcttattcaaagtctgaatttagtttgtttaattgatttcagtttttcagtttgagtttgttttttaattcaaagaaaaaacaatagaaaagaaataaaggttaaaaaataaaaattatttgattgtatttatatttttgtttatttttttataattttttaaacatttaaataataaataaaaaaattactaacatggaccaataatcgaataagtggatactaacatgacacttaacggtcaaatatttatggaagttccacaatagtaatgaaagatatttttaatgcgaaaaatacaacttagatatttatctgttactcggcataaaattgaaatatgtatgccgcaagttactctatttttttttggtgaataggtaattttgttttcctcactttgtcattttcacaccataccttaataatatgttcataagataatgataggaatagaattttgatgtaatacatacccataaaaatgacacattctggtcatattataataattaatagtaatttagtctatttaggtagctcatcccatcaattttttttatcttattattttaaattaaacgtttatccttttgtttatgttatattatatcatattaggtacaattgtcttcttcacatttgaccacaaaaatcattgaccaattccaaaagaagtagagatggatttgagcattttctagtaatttataaaataaaaatttaagtttaatttttaatagtaataatacttaaatttttaattttttatttttttttaaacaatgaacaaaattttattgagaaaaaaattaacgttgagtacatcataaagaagagatcaaagatcctccgttcaaattagctcaccatccaccctaagtacgtgcacaactaattcatgcgtagccataatggccgaatgatatgcataaataagagacgccttagggaaattggacagtaaactaaaaaatacatcaaatagaaagcttaaaacaatcagactcaaaaggaaagagaggaagtccaatttcggcaaccaatctaatgcaaccattattaaagctacaaccattattaaagctacaacttccttatattttaattttataaacttaattttctgatcttattttttggtggcaatacatttacttttgtttgtaaatttgagacactagttaaattttaccatatatattatttaaattgtcagtgtgtacacatgtgcatacgtaacatgttttcattggatttgaatttttagtgtcacgtgtacagttgttcacattgaaaatttcatttggtatttaatagtaaaatttaactaacacttcaaatttacaggcaaaagtaagtttaaggggtattgtcacaaaaaaatcaagaaattaagtgcataataattaaaacataaacaagagatttcaacgcaaattattcaaataattaggatttttgttaccaaattttgacatgtatcaaatcatgtcccctgaacttttaagattgttaaaaattctttatgaactattgagattattaaattttaaggacttttgtccagttgtagtaaaaaaaaaaagtctaacatgaataaaagttcaagagacataatttggtatacattaaagtttaaaagacataatttggtaaatatcaaagaccgggaaacatgatttactacatggacaatcgtcgaatcagtaaaattaaatgaaattaaacaaaagttcttaaatctaacaatgtcaatagtttgatgagaatttttaacgcttaaaaaagttcagacagtataatttagtacatgtgaaaatttaaagggtaaaaatcataattagcctaataataatgggataagttaaaaaatacttcttttttgtatccattaatcaaaaatacccttatattatattttttttaaaaaaaatgtacccaccttttagggttgcccaatatacacttactctctacttaagtctagcatagaatttgcattaacctaagaggtttaatgaagatatcatctataaaagtgggtacatcttaaagaatatgaaaatagaggtaaaaattaaaacaagtaaagtaaagtgggtataccatataattttctcaataataataataataataataataaggaagaagagtaatttgcagcataaatacctaagtttaatttttagttgcaaataaatatttaagtttaatttttagcggtaataatatctaagttataatttttaaacttttgcaggtacctaattaagtaaattgcgacgtggcactcctcaattggtccaagtcattaaatttttattatttaaaaaaattagttaaaatataccaataagaaaatgacatgtgaatttaatgacttaatatttaatggtgaggtaccctatagtgttccagaaatataacttagtattattaccgccaaaaattaaacttaagtatttatttacaagtgaaagttaaagttaaacttgagtatttatcccgcaaattactaaactaatttaaacaatctttcaaaaagaaaaagaaaaagagccgttactctcttctcaacaaaggaaataaaaaaaaaaaagagccgttactccattttcaaattaaaaaaagagccgttactccatttttcaacaaagaaaaacaaccctcatacgcctaaactcagatcaatctttcactctgtaactcttttcagatcaaacaaaaaaaaaatctttcactctgtaaccatttcgaattttgttcactctctctgttggattttctggtgcaaaacccatggcggtgaacaggtctccttcgccagtctcaggcagagcaaacccaaatgcaagaagttctgaaatgggaaaccccatgagaagaagcttcacagggaacccctttagcactaaaccctccattgttcccaatccaagagttctcaacccgaatactccggctaatagtccttcagaccatcctagaagaagctcaataggtggcggcgatgttgatgatgataaagaaaacgctaaattggcggctagagttcgttctccaatggcgtcggcttcaaagggaactaaaaacttcatgtcaccaacgatttcggctgcttcaaagttcagtactccttctccaaggaagaggaagattttggaagagagaaatgaagtggttcggggttctcttgatttgaaaggagaaaagactcaatctttaccaaagaaggtaacttttaaggaaccccttgagtgtttttctgacaatgtggttattgaagaggctgaccttgttaatcttgacccttcttttaagattagtcctccttgttcttattcaattcctgtcatagctcctaatttagattcatcagatcatgatcctcccttggcaccaccaccacccccatatgatcctaaaaccaattttctttctccaaggcctcgctttcttcgttacaagcccagccctcgagtcgaactctttcttaacaacatcacaagtgaagggaatgcactctttgacactgatgatatcagtacagaggaagaggaaactcagtctgatgattattcccaaaaggatttggaagaaaaagaagaaggggttattgtttctcagccagttcttatcgatgtgcttgctcgggagaaggaggaggagaaggaagaagagctcattgtttctgagccaattctttctgaggagaaggaggagactgttgaagaggaaaaagaagaagagctcattgtttttgagccaattcctattgatggcactaagtcacattcttcaatttggagatcaaagttgacatctttgcttattgttttgtcatttgtttgtctagctatctcaatttcgatttcacctgtcactgatgaaactgtgtttgatagctcatctctattgaagcagtatgattatcatggtggtgatgtgatggcatttgctaaagcaagatttgacgaattagctagagatttcggtgtttggtatgcagacaccgtgtctgtctttttcgagttgttgctctctaaccttagaggaggaggaggagtacacaaactaggccctttacagtattacaacttgagttctctagttgaggatgcaagttgtggtggtgataatagctatgaaatgaatgtgtttgttccctcaagaggagtgacagaggttgttggtattattgcacctttggaagacaatggaaaagtgtctcaacttcctgaaggtgaagatgaatctgagtctgagtttgagtctgttgtagcagaagaagaagacttcacaaatgaaagccttgaaaatgagattgagattgagtctttctcagaagagtttacaaatgaaacgccagaaattgttggtgaatcttcactgaaaaatgagaatgaaatcgcaccagaaactattgatgctttttcaatccaagatgggaatgaaaatggtctctcc

SEQ ID NO: 3046 - DNA, 1585 bp, Cannabis sativa
tgtacacaatcaggtgcagcacacaaatgatgaaatatagtacaccagtagtcagatcctcatttatgaacacctcccctcaaacgaaaaggtgaggatctcacaccaagtttgtcaactggaaatgagaatattgagttcgataggcctttagtgaacaaattgacaacttgatcatgtaaggggatgtacctgacttctcaccgtttttgtagcactttgtcacgcacatagtgtacattaattccaatatgctttgtccttgcatggaagactgggtttgaagccagtgcactagcactgatgttgtcacaccaagtaattgaaggcagagtgggaggaaacttgatttctttcagcagtgactctatccaagagatttttgctgatacatttgcaagggccctgtactcggactcagtacttgatcttgaaacaacaacttgcttcttagatgaccatgacaccactgtttctcccaaatacacaaaataacttgcaacagatttcctatcattagggcagcaggtccaatctgcatctaaaaaactagtgaggttcagtctgttgctgcagccaatatggagtcccagagttctggtgccttttaaatatctcaatacatgttttagggaactccaatggactgtggtaggaccctgcagatattgacttagtttgtttactgagtatgctatgtcgggtctggtgaggcatagatattggagagatccaatgatgcttctttacacaaaaggattgtggattggttcacccttatttttggacaatggtttaccagctgtaattggtgtaagacagggcatgagattactcagattcaccttcttcagcatgtcctcaatgtacctggtttgtgtcagatacagactagtgtcatctctaaaaacttcaatgcccaagaagaaatgcaactgtcctaggtcttttagagcaaacaacttgttgagtttgaagatgaatccatttactctgtcagcgtcattccctgtcactattatatcatcgacataaatgagaactaagatcactattttcttagttttgtagaaaaatagagatgtgtctgccctcgagttttcaaacctccagtcgattaaggtgttcttgagtttgtcaaaccaagctctgggagcttgtttcaagccatagattgaattgtttagcttgcataaccagttttcctttcctttctcctcaaatccttgaggttgtgccatgaaaacttcctattccaagatgccatttaggaaggcattgttgatgttgagttgccttatatcccagcctcttgagacaactatggtgagtataattctcactgttgaaggtttaatgactgggctaaaggtttcaccataatctattcctagtctttggtgaaaacctttagcaacaagtcttgctttaagtctctcaacaattccatcaactcttagcttgattctgaaaatccacttgttcccaatcagattttgatcatctgttggaggaacaagcacccaggttctatttttcttcaaagccacaacttcagtgtccatagcattgttccaacctgggt

SEQ ID NO: 3047 - DNA, 1160 bp, Cannabis sativa
ggagactatattttagacataaagataagagaaaagcttacttagaaacgacaattaattgacaatgagcaactgctgcctcaattaaatcagctgagagttctgcaaagcctggggtaagaggaaacataagtgacacataaataaacagtctgggggagaaatcatcatcgatttttgcacatagcatcaaatacaagtacgacccatcaaccatgttttcgactcagtgaagtgtagatgttcacaatatattagacgtgcaaaatattaaacatctgaaacttaaattgggataatgtcctatcatccccatgaatatcaccacttagatatttgatccagaaaaggacaaaagtaaacaactgtagtaatttacataccatcttcctgatttggaaactttctaaggttctgagcacaggcaacggacattctggtggctcttgcttcaaatacctccaccatgacactaggctgtaaccaatcctcagctgtagaatcagaaagaatgttacaatttcattaatttaagaatatttaatgatgcaatcttaaatcatatataggttctctactcattattgtcctgcatggttaccattaaattccaattcttcagacacagaccaaactgaaaccaatgtcataattttaaaatatgtaaattatctactttccatgaaattttagagggagtggaaaaactagcctttatgcacatttggttgagattgcatgagatgttcaacacgccccaaatatgatgtggtaccaacaggctttttaccagacaccaactgagaaacagtcttcatgagaaaccttgcaacctgaagattaaatgtatagtgaaggctaagtacttacagtttttttagctcatgccagtaaatggaggaaaaaaaagaagaagaagatttgtcaccatatacaagtaattacagaattgattattataaaaatcctgaaactagtgccttgtggtagtgcctgcaactttgacattttcacagtcccctaaatgaatatggttctaaagaacatgaagagatattgaatggtatgcaatcatcccatccaacatcagtcaaatttccttaaactaccatttcagttggcctagccttactgtaagtaatggtactcaggacttgaat

SEQ ID NO: 3048 - DNA, 1605 bp, Cannabis sativa
tatgtttgggtgtgtttaatctttcccagacttcattactccatgttgctctgttttgtgtggtgcacaacaattcgtatctagaggagttatgatacctattaactatgaattggtgtatgtcaattaatcaagtttttaagttgttccttggcaaccacaatctgtttccaataccaactcccatggattggagcattgtaaccccaccaatcttcctctttgaggtagacagtatgaatccacctaacccataggttatcttccttattggctatgacccattgttccattcatctattttcttgaagccagctcatccctctgatttagcttggcatactgtctcccaaagcaactaaccctgccccttgcgttatgtattgacctctccataagtaagcactacatattgctttgatttcatgcattgatcacttttttggggagcttcattatctggctccagtatgagtggatagtaaggagaactgagttgagggaacaacctttcctacaaatgacaagtttttggtgctccatgatatgatttgagatgtcattttttagccaaaacattacacttttgacttgttattcacttggcacaaatgggaattcctaaatacttgaatggagtgttctgcttagtgaaactagatgcatcaataattctttgtatccactgatctgccatgttactacaatatacaacaaatatagttttgttaggctacagacctaatgtgctagaaaagagttttagcccttgtaacaataggataatgattctataatcacccttataaaataacaagacatcattcgcgaagctaaggtgattcggcttcaacatttcacatctttcactgccttgctgccaattctgttcattacccttgataggtacttcactcctataacaagatatgggatcaccttacctcaaaccatgctttgattcaaagaatccatgaatcgttccattgaacatgggagaaagcttaggggtcctcacacaattcatcaccaaggtgatgaatttgtcaggaaagagtaaagccctaaccatttattctataaaattccattcaattgtatcataagctttttgcagattaacttgatcatgcaactaacttttgttgatttccttccataatgtcgaacttgatcatgacaaatcattatgttatgtgctataaacctgcccttaacaaaaccaccttgattttgagccagcagtttaggcagtatgtatatgagccttgagcaaatcaccttggtagctattttgtagatcaaattgcagcatgctataagcttaaattcacttactgtattagggcatttagttttggggataaatgttagtacattatagttgatctccctgagaattttcccagaaatgggatcaagatgtagtttattgtgacatttcaccggaatctccttagcatgtatttagcagcttggatatcagaaatccttctatattgatcatctctttgaagacacttttgagagccttaaacttggatatgacctgatacattctggtccctgtaacagtttgctagctactaaacatctttggccatt

SEQ ID NO: 3049 - DNA, 912 bp, Cannabis sativa
gtcagctaccattaccgccgctgacaagagatggcctggttggccgggagattgcgtgttcaggctcattgttccggtggtcaaggtaggtagcatcattggtcgtaagggggagcttatcaagaagatgtgcgaagagacgcgtgcacgaattcgagttcttgatggcgccgtaggcactcctgatcgaatcgtgagtcttctttacatatctctccctccctgattggaatctgcttatttatttatttgttaatttgggtaaatgcgttagtttagtgttggatgttgagaatatattagggtaccaataaaaatgggatctttctatggacattgtagagaggttttgctatggtagtcaccagaatttcttgttttcgcatcccaagagttgcggttgacctagtttcaccagaaaagggagttcattgaatcagtaggggctaatttatcttttgggttggtttggttctactattgctattactttccttcaagattctccaatgttcattgctgtttgcaagtgtggttgtttaaataaaatttttgtggcctcttagatgattgtgtcaaattctatagttgagaacccacaagccaaaatggcaatttatatggaagaggattttcctcacaggccaatggttacaaatttaccttcttcggttaggtctttttttaatgtgaattcttttaggtgttgatatcgggaaaggaagagccagatattacactttcgccagcaatggatgctgttataagggtgtttaaacgtgtctcgggattatctgagagtgaggttgatggtaaagtgcctggagctgctggagctgcattcttttcaattcgactgttggttgcatccacacaagcgataaatttaattggaaaacaaggttcattgat

SEQ ID NO: 3050 - DNA, 1750 bp, Cannabis sativa
ttacagagaaaagggaaacaaccctctttatatagccatgtccaagtggtagaagttagttagaaaatactaactgaattaccgaactaaacaactgaattaactctaatagactccataataaaaataacgtcatgtttattttgagagatgagcaaacaaagttgacgaaatattcttggatttctcaagccccgagcattccaactaacaacaatcatggtgatttgtgaggctgaacatcaaccttcgccaaagaagcaccattgccaacatccgatagtgaaatatgtgccatttcaaaggaaggaattggatcttggtgcaacataatatttgttgtttccgtcagtggagtgatttgccgattggagaacaaagatgacaacctgttttcattagctgattcaaagttaggttctaaaccagtagctaatgtgtgagcagccaaacagttatgtgggagagtagtgacagttgtagacattatagaaataactctatcttgctgggatggggaactgttatcatgtgagggggagagatgaatgaatgctggaggagtagccattgacaggaagattgacttactaggcgaaccaggttttatttgattctctttttcttggtggcagctagaagaatttgcagttgtggtgacatgtgctgacattacaaaataagcctccaagtaggttagtggagaggaaatggatcccttgctgtaatgtttgtcaatgtcaacattaagggaatatgtagcagcagttgggcagtatggatctgagaaattggaagtttaccactttgcttagagagagtatcacttaaacactgaacaattttctttccattttttcatgatttgtgattagtggtggcaatgcaggaggcggccttgagggaggaatgattggagaaattgtgttgcatgcaaggggagtaataaaaggccacaaacctgcctttgaaaaatcatgtctatagcaatcgtaactcgattttagtaatgccgagccttccatccatggcccataaggaagatcaggttctcttccctcatctagtttctctaaaaatatagggcatttatcaaagacatgtcctacaactccacactcataacaaaaatctggaagcctttcataacgatattcaagccacaactcatcagccatccaagaaaaagtaatcatctatccacgaagcaaaggttttgacacatcaattccaacacgaactcggagaaagggcccccatcctttgttaagagaatcctcacgaacctctagaaaagtgccaattaaatttccaataactcgagcaagagactcagatttgctcaaaaatggtagacgaaaaacttgaacccaaaaaggagtaatggtgacagaattaaaaggagtattctgcagaatacttggtaggcataaaatcatatgttgattatgaaagtgccaaggttcctttgacaacatcctcctcaaattgccttcacagctaaaggtaaccatgagagaatccaattcatatgaagatacagtaacttcaaatcgacctctccattgggtagtgataaagttattcagttgcttggtattgaagcctttcttagagtaaatcctacatatcaaacagtgagaaacaaggcgaggagggatatcaacatttgatggtttgacaactttcctttctctcagagataaagcatttgaaaaatcaaggtgaaaatgttagaatttattggggt

SEQ ID NO: 3051 - DNA, 917 bp, Cannabis sativa
acagagagaaagggagaaaagataatagagaaaagaagagaaagcagggtgggaaaagttatagttgaattgtggacaaaagaagtaaattgggaaggttagaatgttggctgggtgctctagttccacattgttatcgccaaggcatagattgaggagtgaagcaccagcacagttccaagcctgccatttcccaatgagcacacagagattggatttaccatgcagtttttcccggaaagacagttccagggcgcagcctattaggccagttacaagcctttccgtagagaaaccaattgaatcgaagactagcagttgttctttgaagcagagtatcaggttgccgccattggcgacaactgctccagcatcgagtgcagcagggcagacaacattcggtgaaggaaggaaagatatcaaggaggagttttggccgagaggtaagagtttgaagcggtttgcggagcagggatcagtggacgagtctttcattaacagagccaagaggaaaaggggtatcagtgatgacagaggagaaaccaatgaggttgttcttgaagatgaggaggagagattaagtttaggccaattgggtgctgggaatttctggttgcagcctggtttcaacccccatcttcctttctcattgacatgttcgggagatgaagaagaggagaggagggtatgttatgtacctggtggtgaagtgatttccccaccattgccattgtcaaacaatccttggattgattcagttgtgactgagatcactgaccttggcgagaagggtggtgagacaagccgtcatgtgctgccgaggaaggaaggctcggcagctgcttcgagtgcttcatctgggagtcagagccagagcttggtccccaggattaatgaaggtgttcctgattatgatg

SEQ ID NO: 3052 - DNA, 788 bp, Cannabis sativa
tcaaatatgttctcatgattacatctcatgtaaatgcttctttgaatttatactatatatattaatcagattactttgtcatctctgccagagttattttgctacattatgtactcaagtctatttagtaactctagtttattttttttttaggtgtggcaggtttgggcagcaggattttttgctgcaattctgaagaaacgcagcacatcaactttgcaaacaaaaatcgaattactttcaaacacaaaagaaaaggaacaaccaattgtcgaagtagtacttctacctttattggagatacgttttgcgattttgtaagcattccagacataaatcggtaagtattcagcagactcatcattccaatgtcataattaacaaatcatgtttcccaaaaatgatggcactatcatttctttttcttcggttgcatgaggctaacaaaagtagtttccgtactctcaaaagaacagcctcattgtcctcagctttacttgtatagtacaaccgataaagtggtatcattcgaatgagtcattcatttaagaataaagggaaatggataaagaaatgaagtccttcaacttttgtttgtcactaccgaagcttccccaacttgtactcatggaacttgagaatttcttaactgagtgttttgtcactgttaagcagacttgttcatctcctcaccattagtttgatttctttagttgtttgttggaaatatagttgcaaagtaagattatagtttatagtttcaaattgagaggcttatggaggaatcg

SEQ ID NO: 3053 - DNA, 1382 bp, Cannabis sativa
atacatttgtagacatagagtcaatgaaatagttcattacttattcaatgtcagcacaacaaagaagtcaataaatgtataagcatatcacgaaatttgaaagatgaattataactaaacagctagttttcataaatttatcgaaacattagaaggaaagaccaaaagatcacaacactttcaatcaaagtggacatgaaaaaggtaatccaacagaacatacccacaaactcaacgggaaaaacggaacatttctttgcaattgttacattttcatctggggttaacacaacggcgttgggtgtaatatgtcgtgttttgtcaaaccaccacaaacttgtttcattaagaacctgaaaatcacaaaactaactatataaacaaaaatattgaacctgcaaatggaacatccaacatgtatatccaaattggaaaaaagggacaatactaaaggcaaagaataacacaacaatggagaagcataactcagtttcaatagaggcaaaggccaaaggctatacctttcattcagtatgctttcaaaataaaaaatttcacttgtctaaaaatgatttcagctaaatacaatacctgtcctttgaatggtatggaagcaagaattctgtcaaaagcgctctgccgatcagtagtgactaaaacaagataatcaccactgtcataaatatctctaacctgtaaaaaaaaaagatttttcatcaataatgaaactcaatttcttgcaaattcacaggaaaacaagtaatctgtcttaatcagagaaactcaaattcaccaaacacaagcacgattgatagcatcagtaagtataataagtctagggtttagtttactttacctttcctctggttttggatttgaggccaggaacagtgagttgcaaattggtttcggataaacagttcggcaaggatgctctgatggcgtcggaaagctcttctctgcgagaactgttaaccagcgtatcaagggacaaggggggttggtgttgatttcgaacggccataaccgagagagagatggatgggaagttcctggaaatgggtttggggtgagtgaagaaatgggttggaggaagacgatggttatggagttggagattgggtttaagggttttgggagggtttaagcctctcatagactgagccattgttgtagctgtaatgttctatttgctcactcagcccagttagactgcttttcaattgacttttttttgactatttgctgaaataatttctttcgataggacaaaatagtccttttcagattcctacaatagttccttcttataatgtttttgggaatgaaaagggtggaataggaatgccaataaaaatagtaaatttgtgtcataaattata

SEQ ID NO: 3054 - DNA, 1679 bp, Cannabis sativa
tgtgtgattttgtgtaataaatcatgacaatccaaactattttgtgttcctatacgtttgtaatctttgcgtgatatttatgcaattttgtgcaaatccttataaatgtttactctaaatattgcttgaacaattataagcgacgtgtttgagatctttgtgcaattcatgcttgttgttttgcaatttaatgtggtttttacgtattgttttgaaactatgttcgatttataatccaattaataatcaacttttgtttgtaaatgcagatggctccaaaacttccaaagtgtatcacttacaaagagaatgggtacttttcttcaataaaatctaagttcgaagcgttaagttgatcgacaaggttaaggaaactctcttttgtgtttttctggagtgccagtgatttgaaattctttagggtgattgtgcatcacatgttattaaggaaaaggaaagtgagtgaggccaaaaataatgaaatgtggttttacgtgggtgaaactgaagcctgatttaggcgatctaagtttagtttgatcacaggcctaaagatgagcatggctccttgacagaagaattgaatacacaatgcgattctgatcagatacgtaggactatctcaaaaatgcaaaaagggtgacctttaaaaccttttggctagcttttgacccatgtgatgttgcagatgatgttatcaagctggggctatgtgcttttgttgaaggcattttgttgtcaggaactaagggtgtgtatatcttgatagatatgctgaagttagtagaaaatgtaaacaatttcttttagtatccttggggcctcctttcttttcaattgttgttgtcttccacaactatcaatgtgaagtagcttaggcaaaaattcatggataaggtctcgagtaaaaatgataagacgaagaagaaacacaagaaggagagaaaggttactcaacaagaagcgaagtacaatgtgtacgaatatgaaccagccctaaaatattgggtgtttgaggtcatgaaagatttagggaagaagtatggtcagtgcaaagggactagattcccttgaatgttgaactgaagccccccgaattcggttacaaaacatgatgtgaagcaacctaatgtggctgcactattttgagaaaggggtatgtgaatctttctctatttatcattgtttttctgatatctatttttctataagtgttatttgtatttatgtgtgactgttatagttgttttgcgatatttatgggacatttgtgtgacatattttcatgtttatgcaatatatgcttaaatttgggggaatttatgcaattttttgtcttgtgagatttacattatttttgtgtgatattgtgcgatttaccccatggattgtcttcctttttggaaatttcccaaacatatttaaacgtggctgctatattccattttgagatacttcaaaacccagtccacttgctgacttagaatgtcaaaatgtttcccaagaaacaacaaccaaacttgttataacatgttgtctgttccacaaaaatcctcgacaaatagcttctatttcacttactattttctttggcaacaccatcatctagcactagtaggagtgaatagccattaataccgagtcaatgaggacaactctcctaacaaaagaaaggttct

SEQ ID NO: 3055 - DNA, 816 bp, Cannabis sativa
agttctggcctcctcttgtttattgcttattgttttgtgtttaatgttgttaaattatgttgttctgtgattgtgatcagttatcgaatataaggcctcctttatttcttcccctgtatattgttgtaacagagcttgaatttggaagtccttaaggacaggccccacacgaacaatacctctaagaactttcctcctttgaaccagattagtgcccaacaactgattatagaaatttaagagcgctttgttcactacccatacttaattcataagcccaaaatccattggcatcattcatagcatagacagaattctgcaatatcctcatacacaagctattatgaaacatccttgaattattatcaccctcattaagccatgccattttagctttttgcttcatgaaagagtaatacgcctaagaaacagtagcaaattcttttctagctagctgaaacttctgtagctaagtactcagtgtttaacgggtcgttgtttacctctttttcacagtcaagaagtctctctctagctatcttttccttaacaactatgtcaccaaaactagattggtctatctccttcagaacgcatttgagtctcttaagtttctgacagagacaaaacataggagttttcttcaccagtacacctgcccaatctcttgccaacctactttgatactctagatattgactatgaaagaaacgaagtggtttgtgaccaacaaccctaattgggtagacagaaaagtgatcaaaattcccttcaggtaaaaagttagctgcaacacttggaaattcatccatccaa

SEQ ID NO: 3056 - DNA, 1285 bp, Cannabis sativa
aattgtctaccaagactctgagaactctcttgttagcaattttgacttcaatgattaaagggtcattatggggaaaatgtacatgttttgcattgtcctccgtgaatgtaatgggcaagttcatagttcgaggacattgggatggtgattgtacaattgcacatgtttccctttctccatctaattccctcaagtaccatttctgggaatttctagtgcttcttgtaaggtgtggtcctcccaaaatcatggccacatcacatgtccatctactagtggcggaactagacctggagggtttggtttctggtctcggagagagtactactactgcagcctgagctagcaaagcaggtagggttggaagttgtgatccaagagcttaagcatgacttactctttgcaaagagtttatggtaccatgctgtcccgaaatgatcaacagtatgtgaacaatcccctgtccaggatagatgatgggatgcaaacctattaaccattgtctgctcttacaacatcttattttcatcgtttaagtagccacaatcattagttgtgtgtcccacgtctccgtgatactcacaccttatacttggatctcttttaaacttttccccttaaggcattcttgggggcttcctatagtgcaccatatttcaggtcaccttgtacacattctcctgtgtgttcaccaagctagtgtactctgtgtactttggctcataatccttccttggcttctttgaagtttcacttcattaatcctggttctttccacttcttttactttgggaatgacttacattctattttaaaacttccatttgaggcttcgactgttcgggagtgatacatccggactgtgctgctccatacccaaaaaaagggtttatgtgggtgtctacacaaatgtggaaagtccataggtagttggggtgtattgggttccaagaataggggcttgtagagcaaacccaagagtggatgtggatagaaatggttccagatggacttcgaaagcctgcttgtaagcatcttccaaattaataaagccttgtgctcttgcatgaactcgaacaatatatcggcccttcttctttgcatttctccccataataaggagccaactgcgattctagattttagggccacaagcttcatgtcatcaatcaccttagttttagctgctgcctccatcatttgttaaatgaagtttttcaggctttctcccaactgctgtttaatcttggtgatggatcttatttccatgtcatagtcacgggca

SEQ ID NO: 3057 - DNA, 1405 bp, Cannabis sativa
tttttttttttttttgatttatctttcacatctaaagatttagcaaaaaaataagcaaatgttacattgagcacaattattccatggtttgctccaatatataatagaaaattaaaatgtaaattaatataaaaccaattatcattaataataactaataaattaaaagaaaattcataaaaattaacaacaatgttacggttaaaaaagtatattaaggccactcatgaattatactatatatatatactaattttgtaaaagttaaattgtgtatttattgatgtgctaaatttaacaaaatatttttgttaaatttagtgaaacttttaagatttgctaatatttgacctaatttttgagattttctaatttagtacacaattggagaaatatcatttacaaaattctaaaatataatgttccttttatatcacaaatgtgtggtactctatcttagatgctctaaaattacgaacactttctatgcatattattattttattttttttgagaaaaatagtctcagggccgaaagctaacaaatttattgataataactagcatcaaccaaaatagatttctgaatgcaagatagatagccaggccaccagacaatactagaagtagctttcaatacaaaattagcaagagcactacattaacagttttggtacaaaaactaaaactcacaaaattaaacttggaacataaatttctaacatcatcaagaattaattccaaagaagaatctaaaactaacgaattttggagcttataaaccaatctttgacaatcatattaaacattgagaattccaaaagagatacatcgggtcagagcactctgaattgctagtgcttcagcccattctggtatgaaatttccgtctactctccaagctgtcaaagcatatataaactttgcattcagagtctcttatcaccataccactctatatcactttgagagagctgcaaaatataattgctaacgaacgcgaaaatgtcacttacaatcatatttggattaccaagcttaaaagaacaaagctttcgaatggaggcaagcttgctacaacttcaaagagcatgatgatgagtagtttctaaatcactagtacaaataggacacaaattttcattgagaagaccatgtctttggagattaatcttagtaggaatccagttaaacgacaacctccaatcaaaacttttaaccttgagaggtaattttaaattccatatagtttgccaccaaagggatataccattcgaggttgacgctaagttgtcttttacattacgaagagctagccaataaccacttttaactgtatagaatccatgcttttcaaaactccaaacgagtttgtctagaacatcttgcaacggccaaggattag

SEQ ID NO: 3058 - DNA, 1281 bp, Cannabis sativa
aatatattaattgcacctgtaaaaatgtatattcttgtagtgttcgttagaagggtgaagttttcttgagtgtgatcgtccctctcatgtgttgctatggatttggaactggtgaatcaattatttgaggtgttacaccttgatgatgaagagtccaattttatctttgaataagaaaagagtggtagaaggcaagaaacgattggatttatacttattgcttggttggaaaggtgttgggaagacctgtcaataaaaaagggattgaaaaattcatgaatattgtatggaagattagaaatggtttttcaggttgaggaattgagttctaacaacattgttcgttttttctttggtattaaggaggatcgacatcaggtttatagtggcagactatggactttcaacaaaaaactaatctatttcatgaaatcaatggggttaggtgaaattttttcaaaaatgatgtttgattactcatcattctggatatctattaataatgttccccttgcatgtatggctgatattttgctagagaatagggtgaaagaaatggcaagcttgaaatattaaaattcagaatgggactgtgaaagtgagagtccgcattaacatcaccaaacctctaaaacaggaacttagggtggctgttgatgagtataggaatgaagcctccatcttttttcaatataagaatttgctagatttttttttatgattgtggaattataggtcataagtctctagatttctcgctaaagaatttttaaagttggtgaatagtctaatgaacggagtggccaatatggctattggatgtgtgtcccaagttcccctcctcgtgatcacctccttgccaatagaaggggtgttgactcgcatggaaagcgtcctatcatgtcaatgggtgaggtctctctaaatttttagagctagatatttgggaccagctgagaaattagctttgacgtttgcgttggaggctagagaatgggaagaggatgaatgggctcaggcgatgaaaatcggctaggaaaaataataggacagcaactattaaaccagtaatgatggatgagaagatagatgatgagagggctaaggttggcggtgttcacatgttgttggagaaaaacgttaggttaggttgtgaagatcttacaatttaggaggttagtagagatgttagtggaccacttcccatttcaagtacaaaatctattatgagcatgcactgtgactcctattgatttgtgtacatctgttggtgcatgtgat

SEQ ID NO: 3059 - DNA, 2101 bp, Cannabis sativa
tgactatgaagccaaggaatttttctgagcttactttgaaagaacatttgaggggtttagcttcatgttgtacttgcagaggatcttgaagcatttgtctagatcttccacatgccccccaacctttttggacttgaccagcatctcatccacatacacctccatattgcagccaaggagatctttgaacatttttttctcaagcctttggtaggtggcccctgtgtttttcagctcgaagggcatcactttgtagtagtagaagcctaagtctgtcatgaagcttgtgtgctcttgatcgggtagatgcatcttaatttggttgtaacttgagtacgcatccatgaaacttaggatttcatggccagctgtggcgtccactagctggtaaatttttggaagcagaaagaagtcccttggacatgctttgttcaggttggtgaagtcaatgcacactctccactttttgtttggtttgggcagcggcacaaggttagatacccaaattggataaaatgccttagttatgaagtcatgggcctatagcctctcgacttcatctctgagcgcttgggcgcgttctttgtccaacaaactcattttctattgtgtataggtcaaaagtttggatcaaggttgaggtcacaaagaggtctactctgaccatgactcgatgtgcccatgcaaagagatccatgtttgcccttagaaattttattagaacttattttatttctggtgctaaaccttttctgatctttagtctactagctggagaagtgggatcaacctccacttcctgcagctcttctacaagtccaaaactatctgtaggatccccaaaagcagttttctagatcatttgttaaattaaaatttatgggaactgatattgaaatacactaataaagttatgtcacctttatagtatatcaattatttaagatgatatttagtttttattttattatatatacattttttggtatgtatacatattttattattggtacatataggttttctctctcttcgttcttgcatctctctcaagctggtgccatggcgaaaacaagatcaaaggtgttggggaagctgaaagaactacaaaaaagaagaaaaaaggtcccaattccttggcagatatgaggaacaaaatcgatggaaggggtcctaggtttgagcctttagatttctctgatgaagatggtaatcaattggataaaactctggcaaataactctactttccaagatgtaatttaggagcctttgtcaccaaggtcctctctgaaatcgatcttgcaacaagaagaaattaaatctgactttaatttcttcttggaggctaatcaaacttgttcgaaggttgtgtccaaaggtctccctgctactccaccggtgttgagatctggatttgtggtcagaaacttagcaacttcattttcaagctcagaaaaatagagtaagatcaaaattacttttgatgacattgaagaggaagtcttgtactttctttggtgtgctatattcttggagctaatccaccactcaatgtcctggatgattttgcaagatgcatctggaaagagaagattgataagtttggtatgctatcttatggcatctttttaattcaatttaataatattgaagataggaatattattcttaatggttaatacatattcttcaataaatgactggttattatgaaggcttgggatccacatgttgattttaagaaggaggatgtaaggatggtactagtttgggattctctagatgacctagaactgaaatacttaggataaaggtctcattttaaaatcattgatcatgtatgggatccaattatagttgatgaagttagaaaggaaagagacaaactcaactatccgagagtcttgattgaagtgtctattcatcaagattttccattatatattttgagaatgaatttggtagtaatgttcctatcaaagttacttatgagtggaaacgaatccttagcgaaaattgtaaagatatgggtcatgaaacaaaagaatgaagacggaaagaaggtagacagcaacaacaggtatagagaatggaacaac

SEQ ID NO: 3060 - DNA, 1306 bp, Cannabis sativa
aatctaaattaatatttacccttacctataagtaaatttaaatttaaaacccaaataaacaatggaatactaaataagcatttttcaaagtactaaatctatattctagtagggttcttctactaaatctataatttcataagaataataataaacaaaaacaaaaagaacagagcaccaaatgaacatttacccgaaaaataaaacgagattcgattagattcctcctctttttcgagtaatcggatgaatggaacaaagcaatcccatcttaaaatttaagttatttgttcaagctctcccacactagtgtggggaaaattattaacgaaatttgcagtttaaaattatatatgtaagtagaaaaaagaaaaccctactctaatcgaagtatcgaaaagccggtgctgatcaacagcaattatacagcaataaaagaaagcttaaaactgcaaaaattgatttggtctttttaagttttttttgttccttttttaaattcttaaaatccaacaaagacattattaccaatgtcggttgccttcttctcttaactctggttggcaaacttgatacccttctcgatcgaagatttgagctccggcttcaagatttctaatccttctttctcgtagtctgagagagcacccagacccaaaacctcctccacaccgttctttcctagacgaacctgcaatagtaaacatcgaaaagttcatttcttgtctgctaaggccaatgttaacacaataaattggtgataaatctacaaaagcatgtgtgacattgtttcaataggtggttgtaacagttattaatgtacaaaactatgttcttatgataaaattggcgaaagaatgatgcctacaaaattttttttaagaaaatttgacaacgtaatgacaaaaacatctcggaaaaaacctttgttgttacctttgaagcaaagaatggaaggtcggtgacacttgattgcacaaaggaacattccacaacatctggaaccccattaagacccttaagacaggcatcagcgaaaagtgctcccgcatagctgcaaagttgagaaaagaaaaaatcaatttagtctccaaatgaaagcaaagatcaaagcagcagaaagagacaaaacatgatttaatgcttacgccattgacaatgttgcagatccctttccagccttggcctcaacaacttctgttcctccatcctgtgttctctttgtaagagccacaatttgatcgtgtggcaaattagcttgtggagtggcctacagatattaaaagaaacaccgacaagttagaca

SEQ ID NO: 3061 - DNA, 626 bp, Cannabis sativa
agagagagagagagaggagttgttttattaacaacctttgacacaagtagggcagcaagttgacgttggtgctgatcgaattcctcatcttcatacaagctctctctgcaaaagaatacatcaaatgaataaacaacccaataatgtcatatgtgccagtgtgattcataaggctgttcaaacacgcaaaacaaaaaatgtcccaaactaaataaggtaatgagcttctaattacaagacacaatgagaagcaatcaacttcaattctgaagccaattcccaggtgagttaacaaataaactgataaggtttcaaataaaaaacgaagttccatagtgagcacataattctagtgaaattgtaaagaatcaacaaataggtaccaatggaggttaataaaaaagaccaaccggatctcaatgctttgtgtatcactttcttttacagcttcaaacaatatctataattagtattgtctcctaactacaatgtacagactaaaattcaagaaaaaaacgtgcccccttagtcataaacacgtccacaaaacaatcaagcccaaaattttaaacaaatgactctcaaatacgataattcaagaaacaaatcttaacaaaatttcaact

SEQ ID NO: 3062 - DNA, 1116 bp, Cannabis sativa
ttaaagtcatcggaacagcctactcaatagccacgatgcgagtcttggcttgtctttatgaaaaagatctagatttccaatttgttcccgttgacttgagtactggtcaacataaaatggaacccttcctttctctcaatgttagtatcaacactttgattttattaattattcttattattattctttacctagctaattctccaagtaatcaatttatactatacagccttttggtcaagttccagcttttgaggacggagatctaaagttatacggttatgttttgaaatttcactcacaattttcccaatttttttcccagattattgattcacatatttatgtattgttttttttaatgcagaatcgagagctatcacgagatacattcctgaagagtacatgaacaaggggacagatttggtgttcaaggaaccaaagaagcaggccgttgagtctgtttgggctgagattgaggcccatcattttgacccagcaggtactattctgaactgggagctgtccgtgaagcccagattactgggccaagaagtggaccgggccgtagtcgacgaaaacgaggctaagctggtaaaagtgctagatgtgtacgagaagagattgtgtgaatccaaatacttggggggcgatcggtttacgttggctgatcttcaccacctacctacggcggattatttgaccgacacgagtattaagatgttgttcgagtctaggccacgtgtcagtgattggttggctgatatcactgccagaccagcttggaggaaggctgtggaattgagaaaccaagccttgaagaaacgggttgattcttcaatgcagggatcacaaaccaaataggagataggatgtgtgtcattgtgtgtatgttgttttctaataggaaaaagatatctgtagtttatatgtttgttattttagcttttgtggtctgcattttttttttttttggcttatttgtaatctatgttcttcaactaggatttttatggatcggtttgttttgaatttttaattttttttttcagattaaatcagtattataatttttaaaaaatttaaaaatttaaactagaccaattaaatgatcaa

SEQ ID NO: 3063 - DNA, 1239 bp, Cannabis sativa
tcgggtgtggctgtgactgcggctgcggctgcatttgggcctgagcttgagattgagattgaggttgaggttgaggttgcaccgattgatttttgtttttcccctcagtagccttctggcaatgtaattgatgcccattgaacatcttgtgcggctcctgaagcgcctttctgagcccctcgggagtcttatacacaaacaaagcaaaacccctcgatttcccagtctgcgtatcgaacccaatggggcctgtttcaatttccccaaatttacaaaagaaagccctcagcttctccgggtcggtttccgatggcacgttgctaacgtatatcttccgaggcgccggtgtggatatcacgccctgggccggaggaccgccagaaaccgggcccacagaggcaagctggcacgaagcgatcctgttcatgatcctcttctggggattcttcagggctttaatagcggctcgccgcttcttgtacagaacgaagccgtaacccttggctttcccggtgttcttatccaaaaccacgttgcactcctcaatacagccgaaaggttcgaaaatggcggttagggtttcgcgagtggtgtcccagctgagaccgtgaacaaagatctttcggtgggagacgtcgcggtcggcaatgtcttggactcgattcaagaaggctgcatccttgagggaggcgtcgcagatgaggtcaatcaactggtctctggagtaaggttcgaggagactagagagtttttcggagttggactcgtccgagtcaacttcttcgttaaagtcctcttcttggaatttttgctcggcgtgtttgatggtgactttaggtgtggcctggttcttggttttgagcttcttcttcgtgcctttctctgatttttttattagtgtcctctttcttgtttttccagtaggcgccatggaagagggtttagctttaggttttggtcggaaaacataatagtgatggaagtctcaaaggtttgtaaaaaatattaacttaattaaactcatttataattaatataaatataaaatgtaatattaactaaatatctgtctgggtggtgtagttggttatcacgctagtctcacacactagaggtccccggttcgaacccgggctcagacatttttaacctttttctgtttttcacatttttgcaaaatttagaacccaaacaaaacccattaatactttttgtatttccttattataaaaagaaaag

SEQ ID NO: 3064 - DNA, 1283 bp, Cannabis sativa
aaaggaaccattgatggttccacttcgaggagaataaggaaaagaagaaaaaaaggaataaaaaaagaaaaaaagaataaattttaaattttcattattttaagtcattcatattaggttgattaataaaaatttgtcattgtacatttatatatatacaatttacttttgtaaaccaaaagtattataaagcaaaacgtagagattgaagagttcagcaacctttttaatctaaaactgtgccaaattttaaaattttaaaaaaataaccgcaaattaccaaaaaaagtttaaataaaaaaaatatattatctctctaagagagacaaagacaatgcctactattttgaatggaggaaattagattatatacctttttcatattattttttttttatttttttttaaattttattatttttatcttttttttttaaatattgtaccaattttgttcctatcatttcaagatactctctatgtcactcgatattttgggtacaatacatataaaaagaaacatatttaaattaactaaaaatttaaggtaaatttaattaattgattgataaaagatgtattttttaagttatcccttttgaatgagtcagcaaagcaatgagcgaagtggtaaaggtccttttgaatgagtcagcaaagcaatgagcggagtggtgaaggtcccttttctagtacttcggttgttaaatgggcatttacttcccctagatctacttcgatcgtcatataagtgaaaagcaaagtaaaagtgggcccaataatatatagtgcactaattaacgtggtgatgtcatatcataccaaaatgatattacataagcagtttgccacgtcaagggcacgatagagtagcttaaaatttcagaagaaaaattgcgatataagtctaaaaaacattaattcgatgcaaaaaagttttaatttaaaaaatttacagtaataatttccaaggtgaacatatttgtaattaagtttgttagtcatttttgtaaaggatgtgtttactcattcaaaatatcacatgttgacatatatatatgggtccaaatcacatttttttttttttgaaaagaataaataaattattattctttttttttcctattcttctttcttttcacgctgccctatacttcagcttgaaattgatagttcatgaaaaagaaaaaaacttgaaactcggtaatgctatggaaaaaagaaaagaaacataaagagaatgatacacatacaaatttaataaaggtaaatactattttgga

SEQ ID NO: 3065 - DNA, 580 bp, Cannabis sativa
acaaaataaaataattttatttaatagtttagtaaacactataataaaatattaaaatcgattaatttatattgtaaactcgttcatttcttccattatattctaattacagcttaataaaagatgccagatatagaccatagaaatgaattgaagaaaagagcatagaaatgaatatgagcaaagattaataaatgaatgataacaatgaagactttggatataaatgataatgaatcactttccctattggttttttgaataacttcatggctcatattcctttcctcttaccactaaagtaaatcaacaataaaaaactgtggaggagtcaaacaagggaggtggagaaaacaaacaccccacatgaacagttttcatgaaaactatatctgtggatcttaatcttctcttcaattttgagttttgagattaaaaaagtaaatggtaatggaacaatcattacagtttacacactgattttagtttcaaagggctacacaaagccctaatatttatatagagagttacttgcattgcaagcaaatgacatcaatcttatgattatgaagtactattt

SEQ ID NO: 3066 - DNA, 1120 bp, Cannabis sativa
ctggaggtaagattgtcattgcctggaatctagatagatttaccgttgatatccttaaatacactagtcaactaatgcaattgaagttgtcaacaagagaaggttttaatagtctactgactgtggtttatgcttcaaacagtagagctgaaaggaaagtattatggggagatctgtgtgagttgaaaacaaataagaattggttgttaacgggggattttaatgacattcttgccaaagaagagagaatagggcatagagttaaaacacatacagacacagagtttctacaatgtgttaacacttgccaagtggaggatgtgaaagcaagtggaagtttctttacttggtcaaataaacaacatcgtgaagatagaattttttcgaagatagatagaattatggccaaccagcatggattgacaagcatgagtttgctgaagctgtgtttctcaatgaaggtattttcgatcatacaccgggaatactgactctttatcctaatgtggttagtgggaagaaacctttcaaatactttaggatgtggaaatcacatcctaagtatgattctgatttgagggaggtttgggggcagcctagagtaggctcaaaaatcttccaaacagtgaccaagatgaaacaattcaagatgagacttaaagaaattaataaggagggtttcttgaacctccatgcatcggttataagagctaaggataagttggacatgctataaaaccagatcaacaagagtcccatggatagtatgctgcacctgcaagaaaaagaagctcgtgaaaaactgatcaaagtgcagggttattacacctcctttctgcagcagaaagctaaagcagaatggattcagcagggtgattgtaatactgctctctttcatgcttgtatcaaacaaaggttgaggaaaaaccgtatcctttcgattgaacgaattgatggtagcagagttcatgatccagagctaattacggaggcattcttggaataatacaaaggattacttgggtctaaaatggagcagagaaggaaagtggatgctagaattttggctagaggattgattttaacagatgagcagataaaaggccttactcagagtttc

SEQ ID NO: 3067 - DNA, 2620 bp, Cannabis sativa
ggtgtactcggggagctccaccttgcccgatcttttcagatgggcagcgtaggccttgacaaactcatgtggcgaaacatctttcactgtccttgctgttgccatttttgtcaagtgtcagagcaagggatcctcttctctactaaatattgaaaaatatacgagtattagatgataccaacaaatatcaagaaataaagtttaaataacaattaaaaaaagggtcatagacacaacacttagggactttaacacagagaagcactaaaagaaccaaatctcaaaaaaaaaaaaaaaattagaagaagaagattacaactcgtatatctgagtaatgtttctcttttagagaatgaacataacaccaagacattgtaaactaacatcaatgatgagatgtgttgcaataatataaacatgaaacatgaatggtgagtcactaataatacaacaacccccacccacataacatgtttcagtaactaaaatttggcagatgttctgacttcataggtgtaactaccagggtacaaaatcaattctttttcactaataaatgcgataagcaaggtctaactaggcacaaaataacgaaaattgtaaatcctaacaaaggtagtgcaaacaaattccaaagagagtttttaactaagaaacttcacttttaagcataaacaaaactaaaacagagagcagttttataatggacaaatatcaacctcaattaatatgcataataaagctaaaacagtaccaaaacaaaacaaaatcagattttcatatccagcacttattagatagagatcacatctctctacattatatctcttttaacagaaacctgtcaaatactaacaacaatgctgaagtggtgcaaatgaataaacaataattgttcacaaattctctaaacagtttattagttggtggctattcaatgtattgtcaattttggttgaaaacttttctaaacaggatataaataggtaaccattcaatgatgcattgcctaaaattttaaacaacaacacaacattgttccagttacttgtttgtcactacgagtacttaaaataatctcaattcaacgcctatacagtacctagatatagatttattccaaacataaacacaataccacaaataccatacaaataaaacaaaaaaaccatgtacgaacagataccatacaaacgtgattcacatgaaagaaacaaatttttgtaatcacattgaaccaaaatcataaaattatgaatgtttcttaggtttgaaatggaaaatattgagaacaaaatctccgaaccaaacagattagaacaaaatctcgtataattatcaacggatgcgataagctctacacatatacacaatttctaaatcttagaactaagaatctattctaaacagagagaatcacttgagaaaactcaaacaaaccaacaaattttcgatagtatttgcaacaatacatgttttcagcaaagaattcaatagggatatcacaaaatctaagaggtgaaaatatgaattaccttggcgattgagagcggagaagatagagagagatgcttccgccgacgagagagaaggagagtgagagaggttgtggtgtgagaagtaggtttttagtctgctgctctgctagtgaagaaaccctaattcaattgggccgaaatattgggcttatgatattagccagttgatacttttgaaaaaaaatattgggcccctcagcgggactgatcatattaagggattattttataaatacagaaataataataaaatttataaaaatacaattttacgaattttttttatatttttatgactttatttacagaaaatataatctttttgatgtattttttatattgtattcttattaatttgttattatttgtatgctactttgttattgtttgaatgttatctttatagatttttttattatttttgtactatttttataaaacaccgtaacagtgttaaaaaaaattgttaaacttcaaaatataaaattttacaaaaatcaatatcgtaattatcaacaaattaggaccttgccaaacaaaaatcaaaatttttgcttggagagtcattaataatgcacttccaacggctgttaatttactgcacagaaaaatctcccctactgtggaatgttcgttatgcaagggaatgtgggaatcatttggtcattctttgtttcgatgtatcagagttgacgttgtgtggaaacttactcatttttgggtgagtatcccaaatattggcaaccttaatggacatgatatttatgcatatttggcataggctcacaaggattcagatctggaaaaaattctttgcctcatgtggagtatatgaatgttcaaaccagatgctctacatcagctgtgccattaactatagattccaacacttcaccttcaattaaatggcttccaccgccaccaggtttctacactcttaatgtggatgctgcatataatgaagaagctgcagttataggtataggaggaatatttagagattatgtaggagacgtgattgctgccttttcgagatcattaaagggctgttaatcgattaaagaaatggaagctaatgccat

SEQ ID NO: 3068 - DNA, 873 bp, Cannabis sativa
gttctcttttccatgtgaaaccgtggcctgggtatgggtagtgaggtgcttttggggcatgatgagtgtgggagatgcaaggctagtgtttgtaggagaggggtgaattggtggtgggtaggtagcaaaggtgtgattgtgaagaccaggaatgtagacatgggaaaggtcggcaacggttcctttttgggaaacatttgttgtaacaacagagggtgaagagggtgttaagtgagtgatatgcagtggtttttgctggtttatattgcaggaagccgaagtggaaaagtggagtgagttcggaccgctagataagtgtgctttttgcttgtctttagtgacacatgttttgtccaaatgctgttggtttgatagatcactaggcattgtatgaagtggtgtattttcattgatgcaattatctatagcagagggaaccgagggtgtgtaaggttgctggtttgagagtgaggatgctggtgtaaaaggtagtcggctagttagagtgttagtggaagtggcagattgagtggtaggcaaggagttagtttgattatttggggaagtagtgacactgggatgagtaaagttcgtatgtaaaacaggaaattgagaggaattagtacctgaagtgagtgttaggacagggtgtgatgttgtgggattggtcattggagatgaaatgggaatcgagtgggagagatgctgatgcaaagtgagtgggttttgggaagattctccttcaaatagagttggaggagaggctatgtctctagtgtgtagggccagtagtgtcgatgtgagagtagttcgagccaatcgggtgaggagtggtcaagcatttcccttagcgaaatcagttcggtaccgatc

SEQ ID NO: 3069 - DNA, 829 bp, Cannabis sativa
  modified_base (602)..(607): a, c, t, g, unknown or other
tagtttatttgggagattgactttatgtgtgtttcatctatcattagtgctttaattaagagaaattactaataaattggtaacaagcccatacactgttttcatggtgtaatagtaatacaattaaattaaatacttcgaatttagatttaatatttatttataataactaagcctccacacgttcataagcacatcccataaagattaaaaagagattttcataagctagagataggatgaaaaaaaaaagtaaggtaatagaaaaaacgaaagtatttttttcttaaaaaaaagagattacttgtagtccattttctattccttataattctagagatcacttgttagagccttattcctcatccatccttcagggtatgtaccttgagaattttcatcccatgacattaaattatgaaagggtttccattctaagtttgagtttttagattaacatgttaataataaataatgaaaatcaatagtaacatagtcattgttttatatttatttatttactttattaaaattaaataagtgaagaaaatatttttttaccaatttttaaaggaaatagattttatttatttttattttannnnnnaatattaaatatataatgataattttatcctttaaaatatgtctttaagatcgttttttaataaattaaacaaaataaatcattattattttatttttaaacaattttaataaacaacacattataaatattaattctaattattttttatttattccattatatttcttgtggtcaattcaattccattaccaataaaatatggtgtaacgttagcccctg

SEQ ID NO: 3070 - DNA, 1507 bp, Cannabis sativa
gcttagcaccttataacatttagtagagtataattaaatatttggatctcatataatttaatgtaatgatttttatagaatattgctaacaaattgtaaggtccacctctaagtatggtgctggcctcttatagtaatactcataatttatttgatggtaagctttcactatagtgtgcaaacatgaaagagaaaaaaaatgaagtaaaaccatgaattattctcaaatcatttgcacatttggtagtttgcgtggtacttgttccatatcaatctttgtcagctaaccaattcatgttgttgccaagaaatgtcacgaatagtttaattgagagactcggatatttacctgacttgctattgtccattgcaaatctatgggtagttggatgaaatcatcgaactttgttccaatcaaaactggaattgccgtctacgaaaacccccaaaacataaaagagagggaaaagaaaatcatttaggcaatatcaaccacaacccataaagataattagaaaaagaatccacttttataaaatataatacataattatggataatatagtatatatacaatatattcatattacctggttccatttccttgcttgttgataccatccaatgacactacaataattgagtataaaaactataagataaagctattatattaaataacaaatttaagcaaaaaagaagagaaaaaacatacatacctattcaaggtacaccgacttgtcagatcgaacatgaacagaatagctacagaatctttacaggcaattcccatatgatcctggtatttcgtatcacctacacacccatttaagaactaataaaattaaatcacacttgctatttattattaattagctttctaaaattacattaaataataatgaataataaataaaaattacctcccacttcccaaatggaataggaaattcgtgcatctccaacgattaatatcttatcaattgagcttaacccattctcattttcatgtttaactacctcttctttctcctcacccatgtatttttcctaaataatcaattaaattagaaaaatgaaagtgataattatataaagtttattcgtaattattattaattaaagcgtaccaaaaagctagtcttcccaatattggaatctcccaagagactgatcttcaaggagactaaatccgaatccattgcataattacgattgatcaccggcgtcgaaacaggtacttccgccggcgccggtacagcttgagtggattcgaaatcagtaccgtccacaacaatcggtgaaggcgaggacgcgatgccttgaggaagcattctgtaacggacagtttttctaaggcaagacatgaggagtcgatccatgagtcgacgaatgcaccgccgcagaatcatcatacgccgttgaattctccgcctgaggcagaactgaaccatattttggaaaaatcaaacccctctaatcccgaaaccaaaaaaaaaaaaaaaaa

SEQ ID NO: 3071 - DNA, 696 bp, Cannabis sativa
tatgatcaaatttgtatttctactctttttgtatggtgagttaatataggcaagacaaatacaagaataattgatttgaaaattcttgtcactatctgcatgacctctcctttttttgggggggggggagctgataaaagggaggtgtcaaatgcacaatatattaaaaaaaacaatgaactacaagaataaaacaacctttgaatgcataagaaacaacaaaaaataacaaaaacaaaatactgaaaaacaaattcagagcaacacaaaaaaaagagaattactaattagtgattgataaattctgctccaagcctgccaatttcccttgtcagccatgagtcctagccccattggccaaattgtgagtcgcaaaatctatctcaaaaaatggataatatctcaaagcttgaattggttgcaggccctacaaaagtgagccttagcctccaccgaatggtagtccacatagcgtgagtcctcaacttttagagaacgagccacctaggagtcacaaccagaagaagggcctttatcttcagtttttagacgagttagtttttggttataaaaaaactcaaaatcgaaacatgaaggtgaagacatgtaggtgttgaaaaaccaaagacacaggtattttatttaaaaagatgatgtttattttttaactgaagccacaatttaatattgttgtcg

SEQ ID NO: 3072 - DNA, 763 bp, Cannabis sativa
gatccatcgggatttaacaaagaggtgattttgttttgagctcgccttgaggaagcaaagtgatggaagtatttcgtatttttgtcccctagtttaagccaattcactcgagatctttgcttccagtaatcttcctctttgtacaaaagatgatcaagctcaagctcaagtcgccgcccaagttgaagctgatgctctgtgggaaaagagtaactttgcaccttcttaaggttggactgtagagctcgaattttggaagctatggggggacccagagattttttccaagtttgaaagtgtttcgaaacaacgttgaagtttctcagataaattgacaatctcatcagtattattgcgttgtgaatttgaaaaccaggcctgttttaggccgtcttcgaacccaggttcagccatccacagtttgtcgaaaaagaagcgattttggtgatgttgagggccaggaatgtggtggagattcaaaaccagaggacgatgatcagatccaaagtattcttcatgggtaagatgatagtttggaaatagaacatcccattcagaattggaaattccccagtcgatatgctcttgagtgtgagagtgctggctttgtttatttgtccaggtgaacggattgcccgtaaattttagatcatggagggcaaaggaatcgagaaaatttcgaaagtgtgttgaaggcacacgagccgcgtctcccccaattttatcagttgagtttaagtagtcattaaagtcgcccaagatt

SEQ ID NO: 3073 - DNA, 1276 bp, Cannabis sativa
atataatatatttctctcaattgtcataaaatagtgggttattcgaagaaaaagaaaagaaaaaactgaaaaagatttgtgagtttgatatgtacaaaagaatccgggtctagtattaggtctgaccatttcatcatcaaaacagaaacatagtgattgtttactattttttctttttgcagaggaaaagccataagtggccagtgaatcccgtgatactttaatctgcccacataaagataaaaattatggcatttttatcatcacagtcagtcactcctctcactctcactctcactctacccccacaccatctctctttaatccttcttttgtctctatcctcacatctccactattattatatctcataacccatttcaatctacactattcacaacactattctttctctttctatctataggaccgtattcctataaaaactctcgtttgggtcaaaagggtagtagggaaatgacaagttcgagctcatttttgaggcagttgagtagtgggaagagtgaggattggaaatcgacatccaaaaggtggggtgggaacagcaagtgtaggagtagtgtaggtggtggtgtcaaaaccatgggttatggtgttagccagtgcgaagggggtttgtcccaaatggaaggtatgaacatgtatggtggatttgggacagaaaatggtggtgggttggttatgaggaaaagagtgatggttgtggtggatgagtcttctcactcgaaacatgccatgatttgggcactcactcatgtggccaacaagggtgatttgctcactctccttcatatagttccttcttcccataaggtggttgtctcctctgaaagggcttcttctgactcttcatcctctgcttcttctgactcttcatcctcaacttctccttttcttgccaactcacttgggtcactttgcaaggcttgcaaacctgaggtgcatttccccccctctctctctctcaccatatttgctgctcaagatgagagttttaccaaatgggtgctcattgttttctgcattaagtcatattgtcttcactttgcttaaataaagctttaggtatgtttcgtggatatggtaagaacaagatatagcaagaagaaatttttgttacatacatttggtagatccctcttgaacttgaatctttagtttcttgctttgtgtttttttggttagttcttttagcatttgtttttccctgtcgttttctcttctttagaggtagaagggcaatcatttttttttt

SEQ ID NO: 3074 - DNA, 1485 bp, Cannabis sativa
aatgtccttgaaggttacattgacggttcaattgcatgccctcctctgtatactgatgtttcctcatctcaaatcaacctaatgttcacccattagcacatatacaactggttgatcaaggggtggctctacgcctctctatttgatatcattctaggccaaattgttgggtttagcactgctgcacaaatttgggtatcactagagcaaacatatactactgcttccttcgctcaaaagttggaggtacaaaccactttgcaaaatcttaagaaagaagggatgtctaccttggcttatttacaaaaattaaaatcgttatacaatgttcttgcctctattggaggccctgtgtctcttcaagaccatcacatttacctattcaatggaataggatctaagtataatgcctttgtgtctcctattcaagcttaacctataaaacttctattgaagaggttcattctttgttactcatctatgatgtcagtttgaatagacaacatactgcaacccaacttagcccccttcaagccaacctagccaatttataacttcccaaatccaagataacttctgcccgaatcattcttactcgcaccagaaccatccaaattcatccttcacccatcaatttcatcaacctcgtccaccattttttccaccaccacgatcttcctctctctggtccacactcgacctccttataaacccaaatgccaaatttcctacaaacttggtcacactactaatacctgttatcatcacactaatcttcaataccaatctcctccaccacactaaaaccctttcaatgcttttctcacacgtcaaacccctccacctttgtcccctacctccactcttacaaaccatgtgtggtatatggatttgggagcctcccatcattttccttcggatttaagcttgttggaatcccttcaacagtttcatggtggtgataaaattactgcgggtaatggtaagtctctctctatttctcatgtgggcaatgcatatctatctacttcttttcctcttaaattttgtcaagtttatcactttccttttcttttcaaaaaagtactaagtgttttgaaattatgtcatgaaaatcatgcttatgttgagttttatccctcttccttttttgttaagcaccaggtcatccacaaaattctcctcacgtgtcttcttgacaatggcatctattgtgtttcacttccatcttcgtcttcacatctcaaccccctttagactcatcttcacctaaacttatacttaccaccaaatcttctccaatagtgtggcactctcgtttaggtcatctctctacggatgttgtttctcaagatgcgtctctatgtaatgtttctttttctaagaacaaatgtaatacttttttctcttcttgtcaactggacaagtcccatagattacctttttctatctatgtatctcagacttcacaactctttgaattaa

SEQ ID NO: 3075 - DNA, 777 bp, Cannabis sativa
tctctctctctctctctattctcttcggttagctgctgccaaaactcccagcaagctcctccagtgacctccctttctctccgccctgccacgacaactagcgcctccctctcttttctctttctttctctctgacggcttagacacacagaacgcctccccttctatctttgcctagacgcacgacctgtgtctccccctctctctcgaccttgacacacgaccaaatctcgaccatgttggtcgaatttatccataaaatcaagctctcctccccacaaaattccagatctaactttgcgaacttctctctctcactcagtcactcactcgtatttttctcattacatcggagaagacaccagtgttaatggcactggtctcaggtatggttttccctttcactctttatctatataacatatctctctatctctttgtctcgcttctttatagattgggtttggagaggcttgcattggagttggtcggagtcctgattcgcaggcctagggtggtgcacgaagaggtccgggtattcctagttgaaatattttccattttgtatagctattatatattgacaaatttaaatcatgttatcctattttttgcactatgacgtggtagttagttggatgacacgtgtctcacactttcctacctaggctgaaggttacactcctagcagcccccaaggattagtagaaaggtctatgttatccatacatagcaggatgtccgagtagagtcatcaagggacatctgaccaagctc

SEQ ID NO: 3076 - DNA, 1091 bp, Cannabis sativa
caaccatccatctgattgccttggagatttgcgccatgatctctcgaatgaataatagatcagctcgatcaccaccacattttcaacaaggcataggacatttacccttcgacataacacgtcttaatggtggttgagcaagtggactctatacgaaataccataatatatcaaaagttgtatatatgatttgtaatgatgatttctaggaaagaaattttacctcggatgttaaaattaagtatttaggccaaggaaggaacatattcgctactttcttaacatatttgcacccctcaattgatactgggatttcaacatcttgtagcatttctaaaattagaatgctggcatgtgaatcatatagtccaaggtgtgaactttgataggaccctcatgtttgtacaaataagttgcgaccactctattgttggtaatgtctaagcagagatatactatctcaactgctttctgttcaggaaaattttacatgagaggtggctcatagagggaaacaaactcccactacttaaaaatgagcttcagtgacactcgttaagtgactataatattttaatgacttttcactgcgcgtcactaatgtagatgactagaaagacaatgtatctatttatttatttattttaattattttttcttgattatagcaacacgcaaagcgttgcactatatcatgcttttattagaaaaaagttaataaaccaaccaaatatattacataatttaaattacatttttaaaagattattttctttctaaaaattacaaacaaattaattatactaaattaaaatttataataaatgacaacaacaatagaaattttttaatctcaataggcattaacaaattattttaccaaacaaaaaagataatatagtttaagtacaaatcgattataaacacaatgaacattcatacaaacattttgaatacaacaaaagatatatggacatttgaacatacaaaaataatataaacatttggtcacaaaaaagatgaaatactaaaaaaatattgcaactcacaaaggaaataaattccttgatacaattttataaccctttatg

SEQ ID NO: 3077 - DNA, 3282 bp, Cannabis sativa
  modified_base (1893)..(1893): a, c, t, g, unknown or other
tcttttaaaaaagaaaaatagtaaattaacatagtaataatattgctatctagtttacatgttaaaaaatggatcattgccttctgtaacaattatctaaacagtaatttgttttattttttaaagtaaaaagtatttttagaaaatatatttagaaaaattatttctcgttattttttatttttaaaataataataaattattttaaaatttatttaaacaattttttaatcattgcctattttataattttatttattaatatttttctcattttatctttcattatcattttctcatcacttaaaaaaaaacaaaaaatacataaaaataaaaaaattaccaaacactttttcattttcgtttctaaaattaaaaaacaaaaataataacaaaatatgttttcatttttaaaaacaaaatattaaatatttttctcgtttaaaaaattcaaaaacaaaagttttactgaacaaactcttatatatttctttttctttttcattttgatatacataaacatatataattcaaaaaataaaaatttattttcaagaaattattattattactatatatgaatcaccatatatggtatacattatatatatatctcaccttgaaccattcaaactcttgtcgaagctgtaatatttttctcatcccataatcatattcatgacttgaagccacaaatgttccagcaagatgtaataaattattaccaaatttgtcttccatagatgtaataatatcctttttgaagccaatttcatggatgagattaaagattcttttatggccttttagagctgcaacatgaaatattgtttgatcatcttcatttctttctataagtaaatccggacaaaccctaatgagctcaaacaagaacatgaaatttccagattcagttgcatcaaataacagttttgaaggtgtatcaataatttgtctaaagcaattttcatctttattgtttagggtttccctccaaagctctctcacaagttttagggcttcattactactctccttcatgtgatcatgatgatcatcattgtttgatgatttcatcaaatgtttcatccaaatatatttattttgctccggaaatgctttaggtttcccagccaaaatatgaagagcggtgttgttactcagatcgcgagccctaaccagcgatatgtcctctttgaacattttcaaagctaaatctgcacaaagagtttgtcttaatgtaaaatgttatatggctaaaatatatttctaattacaatatttatggtaggatatatagtctcctaattttatatatacaacgtgcataaccttattataagcacataataaatcaaatataattttttttgttttttacaaagttcactttatagtcataatatgtcggcctctttggaatttttcaaaaaatttgaatactttacgatgacaaaataattgttcagaagaattaggttcttcatgcgtatttgaaaaggcatgcatggaacatgcttttgaaccctaatttgaacacggtaaattattcgaatttttttaacaaattgctaaagtctaccaattctacaataaacaccgtaaaaaaattctaaattaatttatatatgcctaaaataaagtcataccataccaatacaaaaaaggagactatcctacacaaaatatatatatttttttgtaaataattaattaaaatgaataaaatagtgacaacttgtgattaagagtacaaatagttgaataatttagtcaaaataatttctcttatctaaacagtactgaattttcttaaaatgttataataatattatttcccaattattgaaacattaaaatgtatatgtatatgcttatatatataaatatatntatatatatatatatttataaacacaacttaccatatatgccaaaattgatacattgtaagaaaaggcctctacgttcaccaacttgtaaaatatgaatggttttagggtatagaaaagaagccatttgagctctaccaaaagaggcagccaagtaaagtgggctcactccttctcctccccgaataaaaggcaagccttcgtttttcctcatcaacaattgcgcaatcattacatttccagaagccgcggcataactaaacgcggtattttccctactatcttgtaacaatacatcttcgtcgctcaacaacttcaacaatttctcaacaaactcaacattttgagctcctacagcgacatgaagaatagtttcctctaattttgtaatagcagctgttttgactcgagtgtccgcgcttatgattttctcagctgctttccaatcgttgtttagagcagcattgtatagggctatacagatggaatgatttttctcttgagcttcttctaaaaatgtaataaatgaattactaattaagatcgggcaatcatgatcatttatttttaattattattaattagttgtacaataaacttatttggatggaagaaatcaatttatttattttattttattgttattttaagatcatagtctttctaacaaattaaacaaaagaaaaaaaaaatttataccaaaactcatcattaattataaagaattaaaatatatatgtacttactagaatctggtgatattagataattcaatggcctcatcctcttataattagctcccatttctaatgtgtatctttattaatattagctatagcttaattatgttatggcttttaataagctagaatttgtatgaacagatctctcatggaatccattgttttatattacccaattcccagataataataataaaataattattatagaaatgtgtaatataagaccgaattaaagataacaattattcaatatcgccaatatgtaatgtacatacgtatagcttaaaatttttaattgatttcatttgttgggatatgattttgtcctgttattgtactttcacggattgtaatccgtgatgtatggcagccgttagatgagggaattatttgatttgacggctgagattgatctaggggtaattaaggttaaaaagtaaaaacgtatccttatactcatttaatgtaccctgagacccatctaatgtaccacgaaatacattccgtgaaagtacgtcacgggacaaaatcatatccattcatttgttatataattttaattataattgtatcgaactatgactataataatagtacaaaaatgtaacgtctagagatctgtggtctcatacagaaacccataa

SEQ ID NO: 3078 - DNA, 1205 bp, Cannabis sativa
tcctcttcctcttcctcctccaacaacaagttagaccgtcgaaatgtccttctgggactcggcggtctgtatggggcggcaggcttagcagtctctgaaccatttgcctttgccgccccagtacaggcaccagacctgtctaaatgtggggaagcagatttgccagaaggttctcttccggcaaactgttgtcccccaaactcatcacaaatcataaattttaagccgccggttgtgaaccgtttaagggttcgcccggcggctcacaaagctgataaggagtttgtagctaagtacaacaaagctttagagcttatgaaagctttaccggacacagatccacgaagcttctcgcaacaagctgatattcattgtgcttattgtaatggagcttatgatcaaaatggtttcccaggtgttgagcttcaaatccacaattcatggcttttcttcccctttcatcgttggtacttatatttctatgaaaagattcttgggaagcttataaatgatcccactttcgcaattccttattggaattgggataatccaccggggatgcaaatgccggccatgttcacaaacccgaatactgctcttttcgacaagttaagaagctcgaaaaatcaaccgcctaagctcattgatctcgattataacatcgacgacattttgacaccgacgtcagtacctaacgaccaacaaattagtactaatttgaatgtcatgtataggtcgatggtgagtaatgcgaccaacactgagctcttttttggtggagattttcgagcaggagaactgcccgaaaactcacccggttccattgagaatattcctcatggaccggtgcatctttggagtggggacgagacccaaacaaatttcgaaaatatgggaaatttttactctgctggtcgagaccctttgttttactgtcaccatgctaatgttgatcgaatgtggagtatttggaagactttgtctgggaagaggaggaaagatattagcgatccagactggttgaacactactttcttgttttatgacgagaatgcccaacttgtccgagtcagtgtcaaggactcacttgatactaaaaagttggggtatgtttaccaagatgttgagcttccttggttgaagactaagcctaagccacgtggcaagaaaataagtgacaagataaagtcaaagttgaagtcaaa

SEQ ID NO: 3079 - DNA, 596 bp, Cannabis sativa
ctgaatttggagactgccacgtcagcaacagcttgacaatccataccaatttccattgaagaagaagaagaagaatgatgatttttgatagtgttgtgaaattggggtgttttggattgggattgggatagtaataagatgagtttttcaacactttctaaaccagcagctgcttctttaacagcagctgattcttcaagtttagatgagaaattgttgttgtttttcttttcatttctatagcccatgaaatcaactgccatttttgcattaacctcaaagaaagaaagaaagaaaggtttggaaaaagaagaaaaaaaaaagtgttatgagatgaagaaagagagagaaaggagggagagagaggggttgtgttgtgttgtgttttgatataaagaaaagaaaaagaggaaagagagtttgtttgtgtttttgggtttggtttggtcaaagggtaatgaaaaatcactttggtttgggtgtcattttggcccactttcggtgacatacctgtcacgctaacacttgccgtcaagtataggtaccaatcagatccaaccacatcactaattaacattataaattaggctaattaa

SEQ ID NO: 3080 - DNA, 653 bp, Cannabis sativa
ttctactatcatatattatatatatataggttaaaattataaatttagtccgaatttgtgattgaatgcattcatatattgagattaaatatttgatatatgcatgcacgtgacagtttacaaggaagaaatggaagaactggagatggatatggaaataggaggaccaactgatgtaaagcacgtgacacacataggttgggacggttctacaacacataacgacgccgttaaaggttgggagaatcttatttctcctgatttgctcaataatgacattgatgttgttccttggacatcatcctttcagttcccatccatggctactacacatcctcataataataataataataatcaaccacctcttgttattaagggctctgcctcttaataataagaaacatcaatccatcaccaccatatatttaaaattgtatctaagatcattcaggactaatacatatacttaagtcatattgaagtactccaaaattctctctcttttcttttgtactatttttggggtgaatatgtttgaacctttcatttatatatatgttgtgaattgtgatatatatatatatgtgattattattatagtgcctatgcgtaattatataaatttgtagattattacatcacctttctct

SEQ ID NO: 3081 - DNA, 1109 bp, Cannabis sativa
gttagaattttctgatgcactgtacgaggaagtcgtagcctattgtatggctttagaagtggctaaagacaaaggctaaaactttactattgtggagagtaaaatagtagtaagatagaaagaaagaaagaaaggagaaaccctgtgtgtgggattttctctcaagtgagagtgttggaattccaactagacggtcatgtcttgtcctagaaaccctcctatcctaatgataatacagtggttattctatgtcttttctactgttcgattggtttttcactgttctattgaaatcccactgtttgattagttacactgtttgattgatgataaaacctaaagtcccagccttttaaacttttatcccattttttctcgtttttcttatcctcctgttgtgtgattcccctgtttagttttctgtctttgttgagttccctgttctgtgctctttggtaagtgattgctatattctactggaggagatgggagattctagtagggattcacgtgacccttcggaaagcggtcttgatacgtcacatggggcccctgaagttaatgcaagtaatggtggccaaccaccccaatctccgaatattaatgttttggagaatgatgagataatagaagaagctgttgaaccagcaatcaacgttattcctgacaagtcaaatgaggaacttgaagcacttagaaacaccttcctggagtctatgaccttggacttggaaccagattttgaactcactgctgaggtcgtgaatactggggttctagtgagctttttagatggtaaaggggtgtccagaacaaagcttaaagacatcctgaatcacatttggaaactaaaagggcactggaaattcaagactttgaagcctggggtgtggggcatcttttttgatcattctgaagattgtgcggcggttcttcgtaacagaccatggatgataaatggcaagcttctgattatccgagaatggccagaagatggcgactggtacaatgcagacatgagaaaagcggctttctgggtgatggtttcaggactacccactccttatctcaatggagtcaatactcgtacactagcggcaaaggcggga

SEQ ID NO: 3082 - DNA, 1069 bp, Cannabis sativa
ggaaaaggatgacatgtcaataataaccctagtagggttatcctcgcatgatcgaaactaacgagaaggtacaactgagacagggtctaccgcacactatgcataacataataaagtaaaaagcaagacatagagagaagttaacatagtcgcatatatatatcgattatatggaatgactaaatatttctctcttgtgctctacataaagattgcgtctttgcaagcgtctactccaaatgactaatgtccacgatttagaacttgaaagttctatgttgtcagtacatgaatacccattacgcaattggtatagtcacaggcgttctattttatgaagaacccctagatgttcatggatcgataaagactctaagaggttttttatatgtttctgaatggccctaacacctcatatgtgagtaacactagagagcctacaagtttatatgctactcagaatgtggatgactaatgtgcaacttcattagtcgcatccatttgaatattaaataataaaggtcaaaattgttctatcatttatttataaatgttttttttatcttaattgaatgtaattaatattataacggtcctatctgtctggttatgtaaattgaaggagcacttgctttttatataaaggagtgatctaatatgaataatactaatcacaatgtcctttcaaaagtagactaagtagaccaagctttggctaaagcactataattctttatgttgtttatttgtttgatgtttatattctattaatcgtgtttttattttgagtattcaccaatctaggtcagtactctcaattatgtatgtggatgttcttgcttagctcgaatactcgtggtttttcggtgttgtctaattttctccaacaatatttggcgctagaaggagggtatttcaagcaagatttttgcgattcttaaggacaatcacaatggacatggaccaaaatgttaacaacaacattaatgtcaatgaaacttctacgaatggaggagtaaccaatgatctacccaacaacggcggaacttcgagtttgaaccccactatt

SEQ ID NO: 3083 - DNA, 2269 bp, Cannabis sativa
atattaagaaaaaatatataccactataaaacatttctttttcatgatattttagatgtaaattatgtgccaacgcaaaatttaatattgatgttattatgagagagcaaatggtaagcattgaggaagccttttgatgaccttcctatgtctcacgggatcgattggtagagagaggccgatgcaaagttgctaagctgcaactctctagggcttctcgatcaatcccgtaatacaacatgactcgagatgctttcagaataattgctccatatttcaaacatgtatgacactagctatatagaaatggcatatgtttactttttccaaccaaacaaattaactaagggccggcaggcaacactaaaaaatttcacctagttagcctagatacttggacaatattgtgtgtgtagtgttgatagacagctaatttacaaatacatttataaatatgctttgtatattctagtaacaaaggcatagaaagaagtagcctatactatatatagacacacatatacatatactcatatataggtatagatatatgctgaagacttcttcatgatcaaacgaattaaaactctatatgagcttaacttcatttgcctaaaccatcaaactgcacaccttacctatatattagacactcaatattaattccttaaatatatatggagagactccccacaattcaaactaaaattcaaagcagcaactataggaatggcaaacaggtggttgggtacataagacccgacccgacccggtaacactttggccaatcctgttagaatttgagataaggtgaatgtagttccatctcaaaatcaattggtaatgggaggagtaattcattcatcttatatattttattatctttctacacattaacaatgtgatactctctaacacatcccgttccgcccctctccctattagcaaactggatcaggtcaaactcgatcaagcaaatgtgagactaatcaatacgcatatgaatatgttaattaatttgcgattgaaaagaaatcctagcaaataataataaatagggtttgttttatttttatattttaaagtaattttctataatttaaatcgcaattaaaatttacatcactacttaattacttaattatcggaataactcaagtaatctaaactataaattttaaaaaaaataattaaaaagtaatatatagataatttcctaagaattaatcaatacgatataccaatctcggaaacgatatatatatatataaacatagttatatgatgtgtactatatatatatgtcataataaagttttgcattgtatatacatatataaatatgtatgaactcttctctagctatctcagcatgaacatttgatcttttttttaatgttttatatttatagcactgaaatattggtcaaaatatgctatttattgcgaatcactcctttatatatatatatatatatatatatattaatattaatggttaacatatagtacgtaatagctagtctagtgtttatcaggacatgttataactactatatatttatatacttgatccggaaatcatataaaatttgatatgaaatccttataatatataacttcaattccaaaaaaattatatacctgcggtagacaatggaactttttatacatgttgctgctccacccttttgagctagttatgagatctgtcaccctgtcaaaaaacacttgcaaatctttgaatcattacattacattacaaaacactcactacagtttgtatatattgataaatgttgtagatttatacatctatatatgatatttatatggaatatttctgaataatatattattattattataccaggacagaattactttaatcaagtagccgcatttcagcgtaatagtaattagaatagtagaacaacactatatatgtaaataaatattataactgtcatttgcagagtaaggaattctaacaatatatatggtaaccttagaatcatttgactagtttttttttttcttcttgatccattcagttaattctgaacgtttttcttaactgcatatacacatatctatatttgtatcctgtcgtacttaatatatatgatcaggtgtttcagttaatttcatacttaatatgtataaaatgatttgaatcctgtcagcatgaagaactatatatacatacacatatatataataataccaataaattagcaaaaataatacattagattttttttttcct

SEQ ID NO: 3084 - DNA, 1447 bp, Cannabis sativa
ggaataagatgagaggcattcatatagaaaagggtcattagagacttttctggagtttctttgtagagccttggttcaagaagaaggcaggctctcaaatatccacgacagttgtatttttttcacattttcccatcgagcttattcttttcttgccgtttgagtcttattagatggatatgaggaaaccttgggtacaagcttatttaagatattaggctaatgtctaccttctcttcagtaagaaaaacagctgagagcagtaaatttggactaacctcatagtcatgaatcttttgcataccgattcctgtcaaataatcaattgctgcacctaatcctattgcttctccaattgctggtgtgccagcctcaaatctgatttattgaaaaggctaattatcaatacaacagtgcatgtatcacaaagtaaactaacctgcaaaacaattactaacctggatggtggttctgcataagtagaatgatctagaaatacatcagagatcatctctccaccacctagaaagatcaataccagaatgagtttcaaaaagcacctccaacccctacattgtgggcatagacacgaaaaactcttgcacacagaatttcaaatttcaaaacagacaagttctcatctcaactttcaaaggagtaagttacctaaaaatggaggcatggaagaaaggagatgactctttccatacaagaatccaatgcctgtaggcccacacatctgaagcatttgcttaacttgatatacttgcccatgaccttaacatttagaaaaagtaaagcactaccctaaccttgtgagaagaagcaacaaggaaatcggcattgaggctctgaacatcaaccaccatgtgtggaacactctgacaagcatcaactagcacttttgctccaacatcatgcgcccaaagaacaatatcttcaacaggaagaacagaagctataaaggaagaaaaaatatgtcaatacaacagtataaattgaagtatgattccttgagaaaaactacatagaatatgaacaatgtcagtaatttgaacaaacattccgaaatccaaaaatagtaaattttatgtgagacagctatggaagcctgcttctggctaaccaggaaaaccaaaaacaaatagacagcataccaagaacattagagacatgatggaccactacaagttttgtttttgtggacaacatttccttcaacatgttgatatctggaacttcatcttgatttaagctcacaaatttcagaacagcaccagtcttttgagctacaagttgccaaggaacaatggaactgtgatgttcagcaactgtaagtagaatctgcaagataaaaaagaatgagttccgaacagtcaagactactaagtaggataagtaatggggtcaaattacagtttttagtagaaaactatcaaacaatgtg

SEQ ID NO: 3085 - DNA, 977 bp, Cannabis sativa
ccaaaacagacatgcattctgaagaatcttataatacatgggcaagttgcttgtctggtgaggctatatatggtgatgcaattttggcatccattggatatacatggaagtataaagagctttttcatgaagatttaaccatgcaatcatattacaggtctcctatgattgattcttaaatcaatatttcttccttttttgtggttatagacttcgttcaactgaaacttttctccacttagcttttaatgctgctaattttttttccccattgatttaatgtttttaatatgttaatgccttagttgtctagaaacggcattgtatagttaccccttggtttgcaactacaggatgcttttgaacaaggtaccaagtggagtttacaagttatcgagaggagcaatacttgcagctcatttaccttcagcatatactacgaggacaaactggaggggttcctttccaagagaaatcctctgtacattttgccgccagcaccgtctttttgaacctgtttactcattggtcagtatctctgaagcaccatctgagacatcggggtcacacaaaaaattgaagttgagagactcagctgtggaagggacagaccatgcaaatggtagcatagttgctgctggttctaaggaagcagtggaatcaggaggcacctttcgatgtgaagttaagatatactcaaagtttcaggatttgattatagagtgttccccaaaggaatcttacaagaagcagagtgattcctatcagaatgtatctttgaaagttcttatatggttagatgcatattttatgaatttcaatactcctctaatcagactaaatagttctgccgatgaacttgacattaaatttaatcccacaaacttttttaaagcatttgcactttgtcggcctattcaatctttcttatacggtgatactgtggaagccagaggagatgaatcaaatgctatgcc

SEQ ID NO: 3086 - DNA, 2197 bp, Cannabis sativa
gagagagagagagagagaactctactatattagaaaccacaagtgcattggaccaagttgagaataattttctcaaagagcaacttttatcttatttccccaatgacacctgaacaaccaactcattttgctctgtttaagctatcaaacatttctatagtaaagatatacaaagaccaaaacaaactgggtaaacaacaagcataaacaatagtcaggcctgaataatcacattgattttcaacagcttccaaatagtacttttaacctatcaatatttcataatttacagcaattgaacacagaaaagagaagtaggggatcgccaaaaattaaatgtcaaactcagctgtagatacagaattaatacagtaaagatagaatccatcagcagactccagactattgaagctaaactctcttgatacgaattgggcgtgcaacaagtcatgacctttattatacgtaagcaagtctttcaatgcttgttagcattaagacatgcctactttgaatactaggttacctaaatttactgttaaagaaaataaggtagcaactaactaattaactacagacaaagttgtattaattaaccaaatccacttgcacatttgcaagaacacttaaatttagccatcagtgaaataattcactcttacccatcacccaaagacctccaaactcctcaactcacatgccaattaaccaaatcctcatagaaatgattaacagaaaccattacctgcctagaacctatctgctgatgttgatgttgatgttgatgttgctgatgctgctgaattgcatcgaaacccaagtgcggagtcgacacggcagaagacgaagaagaaggcgatgcagccgaagatgtcgatggtgctcgaccagccggacctcccggattccggctgggacctcctccagcagctccaccaccagattgcatgccaattacaccggattcaaacctaccaagaagcccaattcacccagaagaatacaaaaacccaccagcaatagaaaatgagggaaaagtagaataaaccaaaaagcccaaaacccaaggaaaatcaaaaatccctccaatttcgacaaaaaccctgtctgggccctccgatcgcaacgttcaaaaacccacaagctcaaaaatcttttatttttttctctctccctctacgttccacgaacattctctctctaacaagcgggattttcggagtgggcatggatggatccttggcgagctgacaagccgagttgatggaattggcgattccactcactctctgttagaggggttttcgcacgcgattcgcaaaaaaattcagtcaaaccctagccagtttcctttttttcttttttttttttaattattttctttttcttttttttttttcttttttgtttttggtaaatattctttttctcgctcaggttggacaatggggtcgcttttatggctttatgctaactatgaggcactctcactcctcctctctacaattagcgttttacataaatattacggttacgaaatcaaccccagattttccacttatttacgtcgtgacccttacgttttcaataaactattcattattacaactacactcacccaatcccattttgcaaagtgtaaataaccgaatatgaataaaccaaaaatattctctaaataataaatctgactgtagcggattattacatgaataactcctaatttaatttttttttttaagaaaagaaaaaaacttgtaatttgattcttcaaaaaaaaaaaaagaaaacccttctaaaatataaaatatgaagcttattaaataaattttaaaaggatttatactaaaccataaaaggacatagatcttaatagattattacctttggtttggaagatagttcaaaaactatacagttactattttttttccttttaacaatcattgttgacaggtacattacatgaaataatttaggattcgtgtattaaaggtagtttttttattcgaattgataaattagtcacaaaaaaaaatgtaacgcatgaattagtcaaatttaattaatttttctgcaattacctccttgaatttgattgaattagtattatatcattttctttttttaataaaatgttatttatatcatttaatcttataaatgcataggtttatttctaaatatatataggcat

SEQ ID NO: 3087 - DNA, 1195 bp, Cannabis sativa
gagatgttatatttttctacatgcacactatgcgtatacaaatatataagtacatatgagagagagagggtggaagtgattttaatacaggccaatcacagaatatagggtttgagtttgaaagagaaattcaagaggaagataaagaatttcaatacaggacaatcgcaaaatataaggtttgggtttgaaagagaaattcaagaaaaagatgaatagtgtatttattattaaaaaattaacgaacgttaactctgttaaaattaacagaataaaataaaataacgccgttaaactaagaattttgttacatattctatatagaataaatatatttatagatgtgaaattccaaaaaaaaacatgataaaaatataaccatttgaactaccactcttgataggaatattagaccatatattagtaacaacacttaggtttgacagccaccaatagtaataagttggataaataaagttctcaataaaagttgtttgggaacgtccatgcaaaaccttgccttcccaaccttctccatttctggtgaccaacaaaaccgtaacattttctgcctgtaattaatatagtaagaatggtaaagtttttcatctcacaataaataaagtaaaacaaataaaactcagacaactgatttcttggcaaatgtttctgcaaccagcagcggaaaggcgattgttgcatcacaatggacctaatgattgagaacaaaggcccaccaaatgagtataaatacatgaaaatgacaaataatcaagcttgtaatttgcaagttcaaatattttaatggagtgttcttttgtttgagttgatagaacagaaattaaaaatcaagactataacaggagagaataaattgatagtaccttgactgttttagcagcacttcggattttaccccatgacactgcctcatccggacgagcaccagaatcactcccatcaaactcttgtgcagtattgatgaagacagcataatctgcaccattacgcatcatattggcattgcatatgtgatgtttgggcagaccccctccgagtacaatgattcccgtttttctaggacttgcatggacagcttcaccattcattgccctaatgtctgttcaaacaaaaaagagcacttgtattcgcacatgagactgttataacagtgctaactataaaaatacataaa

SEQ ID NO: 3088 - DNA, 2025 bp, Cannabis sativa
gcagcccgccaatggctagcgaaatcattgtcaatagtcctcttcatcttagtaaatctccattggcgattgttgtggaagttatcatttctgaagaaccataattttgaataaagcacagcagcaaacacggtaaattcctccctgtcaaacacctcaaaagcatccatgaattgcgtcgaattcaaaatccagtttacaacctccccacaagtacgaagagggatattctcaattctaatattccatttactcaggaaccacatcttgcgagtaatatggcactgggtaaagaaatggtcagaattgtcaccaccatccgtattacaaagatagcaatttcccaccacattgccaaagatacggctaagtctagagccaaaaggcaaacaatcatggctagccttccacaaaaagagcttcatccgatcatgaaccgcagatttccaaagagaggagtatagtttactatcatcattccttggaatgatgagatcttaataggcttgtttcatcgaaaaatctcccgacggagtagacttccacaccagacgatccgagtcccttagctccgagaggttagtatttagcaaagcctcagcagccgtaggcttaaaaaactcttccaccttctgtatatcccatgcatcgagggcctcagtcgagttcaatctaaataccccgagagtctcaaatgccctgattctcggatttatatcagcatgaccaaaaaccttcccatcagaacaggaccattgacaattccaaatgtccacatgagagtgttttccacatattgacacactattcttcaacaagaattggcgggttttccaaattccccgcactgccggagatgcaactcgaggcaaaggagcactccagaaactctcagagctgcaatacttactcaagataaacatggcccacaaagacttagaattagtcagcatcctccaccctagtttagcaatcaagcgaaaattcatatcatggaatttttggaacccaagacttccacaatacttcggttggcaaattgctccccaacttaacagagataggtatctcccaccatccatctcgccagtccaccaaaatcgtctggttaaagcatccagggcatctgtggttttctgagggatcagaaaaacagacatggtgtagatgggaatagaggacatgacatgtttaattaagactgatcgagccgcttgcgagagaaacttggctctccatccctccatcctatttttgactttctccacaatgaactcaaagtccttcgatcggtttccagtgacaaacagagggtttccgagataagtttcattcccatccatgatattgaaaccaaaaaattcagcaatgttgagaccacagttaatatcacagttcttcgacaacaacactttggacttactttcattgattcgttgtcccgaccattggcaatacttatcgagggcttcccaaagagcaaccgcttctctaaccgaggctttagtgaaaaacagggcatcatccgcgtacataagatgggagatggacgagccattagccgagaccctgtaccccgtgatctctcccttctgttccttgtctagaattaatcgagacaaaacttcagcacatacaatgaagatgaaaggggataacggatcgccttgtctcaatccgcgatgaggtctaaacgatttagttagcccttcatttaacagaacttggaagctgacggtggagatgcattccatgataagatcacaaaacttgatattgaacccgaaagcccttagcacattgtttacaaacttccattcaagcctatcatagactttcgacatgtcgcatttaatccctacaaaagcatgtttcccacttttcctccccatatcgtggacaatctcttgcgctataacagagttttcagtgatccacctccctttgacaaacgccgattgataaggggaaataatcttttccagcactgatcgaagtctagttgacaagatagtggcttgacaa

SEQ ID NO: 3089 - DNA, 2172 bp, Cannabis sativa
agtaaacttattctggtttaatgatctgcatttcgtccatttaaaaatctattcattaagatggtatgagcattttggttaggatttctaacctttcttcatttatgcatgattcttcatcatcttacttttatctcatttcattcccatcaccttcttttgatccttctggttcatccattccttcgtaattttcccaattataagttttgattaagggtcacaagctcaacgattacattgatcatgatatttatcttcttgtgcgcattcttaaccgagtttctaaacgccatgcaccttatacctaaatatctaattagttgacatggttaggttttattgagaacattaactatttatatatatatatgccaaccttagctaacataaaagtcaagttctttgattttattgatttatttataaattcataattcgttgattcatcttgatacatacagcgattgaaacttgaaactgcagacatggcaaagaagattgaactccttgaagtctcaaaacggttgatgtggcccatcctatttctcttcccctataatttggcttttgtcaagattttactaatgtcttaaatattttctaatcagctttgattttatattataaatatttataggaagtttctgggtcaagacataagctcttgttctcatgaggaactcctcaacattgagcaccgactagaacaaagcctacgcagcatcagagcaagaaaggtacataacttatatgataattttgctagtttatttattgatttttttttaatgctaaaatttcttgcctaattatcaggagcaattgttccaagagcagatagaaaaactaaaagccaaggtgacaatataatatacttaaagtaattattatatatgttgagatgactcagtgtcattaatattggttttcttttcggctaattcaggaaaggcttcttttacaagagaatatgcagttacgtgaaaaggtgaaccctctacctctttcaatcactattacttgtctatccaaattctgtggaggcatgtcactattataatagtaaagaatttcagaagaataccagctagctctcattcaatattacgagtaatttaacaagttgaaaactaggatcatacatagagtattaattttataaaaattgaagataatatatgctatatatatattatatatgttgatgcaaagaatccaccgtaacagcgatcaaccgtaaacaaataaaaaataagatatatacagtacatagtttttttttttttaaaaaaaaaattatattctagggaatttacggaaacagtatacataaggatcaaatactcgaaaattataatggttttatgatcctatatgtatattcttcaaccttttacagtgtccaaaacctatatatttatattaagaaacagttgtggttacacatgtagaacttaaccacaatttgttgaatggtaatgtttattatagttaagaattctctacacgttttaagataatttggaatatctggagtagtctgaacttccatttctatctaagtgcaatattttatttggattatcttaccttgtttgtagcaccctaaactatttcaaatttattgaaaacatgaagagtatctgctctctaagtacaataaactattatgtaaaaacttgagaaatataactttggcacatgtgtaaactggagcgagcaacacctcaataccacataaaaaaattgtggtactactccacacacacatagatatatatatacatgtttaggttgttttaatattctacactcataacagttcataagagataaaatgtcacgtgtaatctatgttaaatgtcacacaatttgaagtgtggatcattcatcattcatcattttttaatgtttggatttgtatttgtagttaataatagcattgtatgtatgacagaatactagtggagaaaacctattgcgagagtcaatgtttcgagagaaagaagtggttaggtactggagtcaaagtagcaatagtactaatacagaggtggagacaggactcttcattgggctccctgaaattcggtgttgatcattaattaatgaatcatcaaaggcattgccactcgtataacatttgtatatctatagatcaatatttta

SEQ ID NO: 3090 - DNA, 932 bp, Cannabis sativa
ctctctctctctctctcaaccagcaacatactaccacccaaacctcgctgctagctctatgccccaaacctctctttttgcccccaaaccccattgctctctctctgccctaaaccacgctgctctcacaatatatttattgttctagcattgattcactactcccaccaccatcgatttagattcattgaggtcatctctctctttctaatttcatcttttcctttgtctttattcttggactttatacctttcatttttctcattgttcaaattcaaaaattcttatattattttatttttctttctgtacgatctaaatcaaaaataccatcatttttttttatttttgtataaaaaaaagcaaaagaattggattcctaaccctaacttatttcttttaatttctcaacagaggacttcatcaacaaatttctcatcggtcgttgttgtcatctcctccatcgaagtctatctttcatcaaaattttcaacgtctattttcctttgattattattattctttgttttgaaaaaaggtattcctttgattctaaaatggcaataattgatgagtcgtcgaattggttcctcttataaacttagggatagataaggtgtccacatttaaaccctgttgtaacggaggaaagatgatgaatcaccaattttttttttatttttttggtgtttgaaagtgttctatcaatgtatgatctgaactcgtattaatatcattttaccgataattcattttatattaaacaagtgggaccgatcatggttataagagctttgtctttcctagcttttcctttatataagttaaattacatggaggtttctagttatgaagattgatgcagttcattttatggcattagtaaagttaaaagggcttatgtttttcatgctctatgaaagtagtattt

SEQ ID NO: 3091 - DNA, 660 bp, Cannabis sativa
cagccgcaaagttccagccaacaatacaatgggcgctagtttctgcttctcgattacacctgggacaagccaaatcaatgtgtacacgacgatgaataagttgcactcgagtgggaaggcagttagataatgttctccaaagcatttccttcacttttggaggaatctttaaactccaaatctcacgccagggacccgagttggtagattggactgaggcagatttcaactcttgtaagagagcgtaggccgactttaccgagtaacaaccagaattttctttgctccaataccaagtatctacaacattggaaggagaaatgggaattgagagtatcaaatccttgtccctatcattaaacaagtcattaatgatctcaatttcccatttagttccatccatagttaataaacacttaacctttttgtcacaaatggaaggatggaaagatgtaataaaaggatttccaatgtcagggagccatggatcgcttgtaatggatatattctcacccgagccaacaagtaatcttctgccttttaccactaaatccttagcttcaagaatacttatccaaacatagctaggattattccccaattctgcagtcacaaaagagcctctaggaaaatactttgctttgaacagcttgccaacac

SEQ ID NO: 3092 - DNA, 1913 bp, Cannabis sativa
acatgattttatttattttccccgaaattcgtttactctataaattttaacatgacatccaagcattttaattcttttgtaatgaaattttattatgagagaagacatgctactgaaatggaggaaatatgtgacctccatatagatcatgagttacaattgaaaacacgtgaaaagaaaactaaaaagactcactacttactcgggtgaactagagcttgcatattcccgagactcaataatattagacacaatttgtacaggatcaaaagaagtgcctttggtgaaggtaaatagaagcaaaccgctccctgtcagcttaactagtgaaagaacatgattgctctcttcaattgtatcattctttgtggataacacagagctacctttaattgtaagagacacattaggtattttacagaattggaaagaaaaagaaaaagaaaaaaaaaagagttaaatgctaaaacttggaaggcatctgatccaagccccaacaaaattcatgtactatctgccagaaattaccagatttgtcctcggaaagattaatcgcatctttgttttcctcatcattgacatgttcattatctagttcctctgcacatgttttccttttcttagaattagaagcttcatcagacgcggagctattggaatttttattactgctaccagtaaaatactgcaacatataaatatagaaacagaaggccaaacatattaatagcagaaatatagcaaatcaactttttatgcagttgagaccttcatgaacatacaatatatcttttcaaaaaaaataagaaagaattagaatgcattttcatcgacaagttcaactaatagatttatgagtgttcaaatgggaatgtcctttcttacacaaaaacataacaccatccatcccagagatgaataagggctataaatatatagagtattatagacccaagaggaatgtgattgcagcaaaaactataacaagacttaaaattaagaactggttttcgtagtctaaattacaatagggtgtgaaaaatgagagagcataaaccattttcctcttagcaaagttaatagccacttagggtgcatttggttggtagtaatggagtgaaaaagaatcaaatttcattacattcttttgtttggttgcatgttgaagcactagaatgtcattccaatagaatgattttttccactatttttgtggaaaggccattctaaagcaagatgaaatttttaaatttttatatctacttttatatgcatattaaatttagttcaattttcatttctattctcactcctattcttatcttttcaaccaaatgtagccttagtttcagaagatacagaattcaataaagagaaactaacacaaatagtgttctgaatgaaaaactaaccttcccaaggatagacattgcttctttcgttgcgcttttctccctctctaccaaaaaccaagaaaaaattaaaaactttataacttgaatataaaaaaactcagcatgtaaatcatagaaccaaaataaaaaaacagattcaaatttttgcatcaaaccactttcaacaacgaattacattgaacacaacttataagctagaatttcacagtcccaatagtaaaatactacttcttgattcacaattacagacccagttgagattagttcaacttcaacagatttcaagaaaatcccagttcccaattaatcataatttgaataattacatgagaaagaaaaacactgactgatagtgcaggtgatgaggaagccagtatgagagtattgaagaagagaagaaggagcgttatagtcgaaacgaggtaagtttatgactcctccgtgctgctcccatggcttcaaagttgagggattggagctcaaatccttagtctcagt

SEQ ID NO: 3093 - DNA, 2545 bp, Cannabis sativa
attttagaatgcacaccctactccaagcaatagcaaccacacctgtcaagtgttgcttcccactccaaaggaaacctctacaaatagactaaatttccttaataatgctcttgggaagaaccattatttggctcaaatatgagtgaattgccattaagactgagtttataagcacaagtcggcctgggaaagataaattcccatagctctaagatctaatccgagcaaccatcttttcaactaaaagagtgcactcttttgttgaaatattttttgggcaaatgggaatacccaagtatttgaatggaacatcttgttttgaaaaaccagaggcatccaatattctttgaatttccacatcacccatgttattacaaaatacaacagttttagaggggttgggcttcaaacctaatgtttgtgagaatagctcaaggccatgtagcatgtagtaaatgctcttgtagtctccattgcaaaacaacaagacatcatctgcaaaactaagatggttgagcttcaattctccacatctctcgtggaatttaaagtcctatttgaatccaaccttcttcattattctggataggtattccatttctaatacaaacaacagaggggacatcgggtcaccttgcctcagccctctttttgcttcaaagaaaccgtgcatagagccattgaacatcagggagaatttgggagttctgacacaaaccatgattagcttaacaaagatggttggaaattcgaaagccaaaagcatctcttcaatgaaatctcgttccactgtatcgtatgctttttgcaaatccaactttatcatacaattcgccttagctgattttcttccataatgtcttattaggtcttggaaaaccattatgttatgtccaatgaatctcccttaaacaaaaccactctcattttgcgatatcaaatctggtaacactaatttaagccttgaacaaatcatattcgttgcagctttatatagcacactacagcatgctattgtcctataatctccaacaaagtttggacattttgttttaggcacaagggtcaagatagtgttattcacctctcttagaatctgtccagagtgtaaaaaagaggtaatggcttcataaatgtcattccccaccaaattcctgttgtcttgaaaaaagaagcgacaaaacccatcaagtccaggagctttatttctagggatttcaaagatagctttcttgacttcctctcttgaatactgcataactaacatctcagcttgttgagtggataacacagagccttgcttgacaatgctcttcatcaccgatctcctattgttcatcttacttcctagaatatgattgtagtaatctaaaaacaaagatgttaccccattagaattcatgatagaaagaatctggttctgacttcttctagcatggatactattatggcaaaaggctgaattggtgtccccatccttgagccacaaccactttgctttctgttggagaaaatatgtgtaagctgcttggacagtagcgaattccacccttgcagcagcttcaagattctgcaggtctgggttcaacgggttctggtgtagccttacttgacaaacatccaactcctcctttgccttagcattagcagcaggtaaatcagcaaaaaaaaaatgcttattaagttgcttaagttttggctacagacacttcaaattggatactatctgaaacattttcgtacccttatcattttccttccatcgatctcaaaccagactattatactcaggatgagaagaccacatcctcaaatatctaaacggtttctttcctccagggagagatgtgaagacagttagaacagctagagaatggtctaacaacccctcattttgaaatatgacttcagcaatcggatgtaaatcacgccaagttggatttgcaaggactctatctattttagatttccatgttggaggagctatatatagtggtgtattgctaaatttataggtttccatgttgattcacgagctagccaatatggaggttgtcactcatcatggtggtctgggcgcattcccatcatcttagtttctatattttttgtgctatggcgtggacgtacggtatatgaagcaattagtttggttgaacgagttttttgtaattttattagtatattaataaattttccttaaatctaagactataaagaaacaaattttattattatttaaaagtgtaattatatttttttttatataaaatgtaataattaatttctttttttaatatattttagtttgcttggtaaacgtttgttaattttacaatgattttcttaaagaatattaggttgagatatagttattacgcaagatttcactttgaataaaataaatctagaagctgcatgcttttaaaagtaataataattgggacaatttggggccacaccattaagctttattgcatataaatgactaattgacattcaaaattttatttatctgaatattaatattcatgtttggtcatat

SEQ ID NO: 3094 - DNA, 2780 bp, Cannabis sativa
tatgtgaaattttctaaaaatttacagattgtcttaaaaaactataacatattcaatcatgaaaagaaaatagactagaaaagtcttatggatgctaaaacaaataagagtagtgttaaaataatttttttaagagaatgcattataaaattttctaataatatatattggatcaataattagttttgataatttatgaaaccaaacaatacttaactgaaatattcaccagaaatggctgcatggagaattgtatcaccattatttcttctcacaagggattcttctttatctttagaatacagataaagaaaagtgtctttcttaccattaagagctgccaagaaaacaggagtctcaccgtagtgatttcgaatggcggttaggtttggattcttctcaatcatacttgtgcaaacaaccaagtttccaagtgcagctgcaatgtgaagagttgtgtttcctcttgcattttcaacctccaaaatactgttttctgaaatactaatcaattcaattgctgtctcagtttgtccacttgaaactgctatgtgtaacacagtgtcttctaatatggtaatttttgccttttgtgcttcttggctcttcttgtagattctcaaaacttcatcccattgccctttcatggcattcgaaaacaaattgttgagttcccgactcgaagccatacttaatttgcctatttttgtttgtgttatgtagtattagtactagtaataagttatgttagtttaaatagacattgtttcccttttaaataaagctatatggaattttaatgttattaactaacataaagaacaattttaaggcaatgacaaagcaaacatattgtaattaacaagaagcatctcttgatattatggtatgtttttttcttcagggacaagaaaaggcaaagattttgttttgtataactaatgtgctcctaatggctaaatcatcatcttttctactagcttcaagttatttattaatttaggacctgttcgggaattattttattttttgtttttttttaaattttacttaaccaaatcttgtagtttactgctagcatgtagttcaagcaaatatatttatttttttcaaataaataaattagactataaaggattccattcttaaaatgtgtattgtgttatacagtaaaagtaaatgtagattttgatgaatcatattaacttgtgaggaaatatcatttttatgtaggatgattcttttcctcatctacaagtgggaagacactttttgtaatacaccaaagagatagtaattctagaaatgtaaactctacatgttaaggcccctaatgatgtgttctactaatattagtataacttaatattcaattttacacattttaattaataattaaaatgaaagagcaataactaatcgtaaaatgctagaagtagtgataattacaatatcttattataatcttttagtcaatctccatgtccaaaatcacatgtcaaattttcatagcagtactggttatagatatagcatcatccttgtaaatttttgaaaaattctgaatagtttacagtaccaaaaacatagtttctgatattctaatttaccagacgtatttaaaaaactttaaatgtatttttgacattgtaaactattcgattttttttaaaaaattgacaagaatgatgttataagcataacgaacagcgtcatgaaaaaaattaaaaaaaaagctggcatgtgtttttgagtaagaaagttaactaagagattgtaataggagattaacgataacactactctaataataataaactaaacaattactaacatagatgatgcctcttataatagtgcccaaagagaattccttttatttatacaacttaagacttttactttagcacacacaatagaaaaggtaaaataactaatagttaaaatttttaactaagaggtaaaaatagtaaaaaatagtgctctatcaaatgagttatcacagctcataaataatacttagctatatgtagagaaacactattcattgagctataaatattatattattttttcaatatctttttagaatgtatgggtgtgtaattttgttgtatttatttttgaacttaataaaatatactaaaataaataatttttaaatgatatagagaagtcgatgtgtagtgtattgtgtaaggtaaaataaaaaaaaatgagattttgatgaagtattataaaaaataaagtagagaagctgatatgagtgctttaaaccataaatgagcgggttttgagttggacccgatcaacccgtcacccgctcacttttattaattattttagtacacaaacttattatggagtatgtatggattatagactatagagtgtgaactttagattttttattattttgagactttttaatttttattattattatgaaatttggtgaatgacttttggtaattggttggttttggattgatttttgaactttgaatttgaaattaatattttttttcccttataaagaatataaattaaggtgttatgtttaatttcataaataaataaagctaaagaaaaccatgtaaaattttagttcaaaaaataaaataaaaaatgacccgatcaacctattcatttcacgggcgagtacaagtttcattctttaaacccgaaactcatgaactcgaaactcggtcaatccgttcatttcacgaacgggtacaagtctcattctataaatacaaaacccaaaacccgatcaacta

SEQ ID NO: 3095 - DNA, 1447 bp, Cannabis sativa
atatatatatatatatatatatatatatatatatatataaatatcacaacccatcataatttgttactcttatttttttttattgatatgagcattttaataggagaaataatttttgtttttatatatacaaagtcataaattttttaatgatttatacattatatatgtttatatataatttagttttggttgtaaaatccagaattaataagaaagtaaaatgtaaataataaacaaaaatgaagaaatatatctcaacacaataatatctcaataatatatctccatataatattattaaataatatataggtgagtaaaaaaagataatcaaaattaatgaaactcatataaaaaataataaacaaagctttctatgaatctactaaaatgatgaagaatcatactaagtattagaagtaaaatcccatgaagagttattttataagacctagaaaaaaaatacattaagaaaataataaactcatacatgtattattattttttctcaaccaagactctcaaaatttgctaaaaaataataaaaaaaaaataataaaaaaaaaaagaaaaaggtaaaaatacattatttgtaccttaatttcgtcaatcacgtgaggagaggagttctttaatggctttggaaaagaagagagatgcctttgggaagaagaagaatttttttttttttttttattttatttttttttattttgtggtaaagtaaatttggaaaagaaaaagtaagaaagaaaaaaggtaacactatctttttattatttagttgtcatttcgtgaggtgtaagagtgtcatgaaaattcataaaattgttataatgcccatcacaatagaatttcattacaaagtttagaaacacatacaaaatattataattataatgaagcatgattagattatggattagtaaaggtaattagcactaattcttgacatcttacaattatatacgattttatatttattgtgagtcccatttttagaaataggcattataattataatttctcaattttagatttattaaactctaagagtattatttatgttaaatataaaatatgtaatttttatgattttcactcggtgacaataaaaaatatgatggatggccattagagtcacatggataagtttagaacctttttcttagtaggacaaacctaagagatattttgaatgttgagtttcagcagggtcgtggtatttttgaccattttactcctaagcctttagttgcttaagtatgaagcaagggcaaaactgtaatattgcccattattagttttgtcttgttgtggaagctagtagtaacataggttttattggctcaagtaataaataaataaaataatgatttaatactaaggatatgcacaattagaaaatcaaagaacttaaccatttactctctctctctctctc

SEQ ID NO: 3096 - DNA, 1990 bp, Cannabis sativa
ttcataaggtaattttttaccgtccataataataagatcccttatacaaatctaagcttttcgaattggaatcataactatacatataatatatccttattataacatatacatgaaatacataacattcaaatttgttatatattttatacctaatctcttatacgcatataataatatgacataatattgatgtactacgtactacctatagatctatgctaactaaattcttgcgcacctcaaaaattataaccaaactatgtagtggatcactagcttattgggtcccatatgccatgccctaagttctcatccataggcataattttatcgatatatatatacacaaactagaacaatatatataggacccgccaattgtttctatatggaatcagtatataaaaaggaagaaaatggatcaagatgatttaattgattattattattattattaagtgtggattcttatgactttttttattgaacatactgagaactaacatatacttatgtgtatattaattatatataaatcatcagcaccttttttcctcgataagtttgatatccaatgtatacatatagatgtgaagagattgaactagaatcatggaatttgcattagtgtgtctccacccaattaggaaacttcaaaattctttcttttctttctttatctttcttgcgatcatatatatacatcatcacttctccaatacacgtattattaatttttagtgtttatattatataaaatatctcttttgcccacccacacaagaagacacaagagattgggccctcatatactcattggacacgttgcaaaatgttccatagtagaaaccatcctccacaaaagcataattaataaaattagatatatgtgtgtagtgaggacagtataattatgcagcctaagaaaaacagatgatcatagcagacagtaggttgtgaagtgtgtaataacacttgctttgaaggtgcactgatcttgtggaggattgaatcatgaactaataagggacccatttctatattcaaaataataataataaaaaaacatattaaaattgtgtgacaaattatatagtatatatatatatataaagtattttataataaaatattaagccgaaggtgatcgaaataacattttcgtgatagtggcgggaccgaaattggggtgtgatcgattttactttgggtgggaatgggatgatgtgagagctttaccacatatatgtgtactagcattaattacattatatgtatatgtataataattttccagtaataatgggaagcctgatgattagtgaagaaaagtcatgctagttggacggaactcatataggtttttgagcctaaaaataataaaacaaaagaaattaatattagagcaatgatactttcacacaaaatatgtactaaatgataaattatttagatataaatatgaaatatatattatatgtttgatatgtaaagtggaataaacaataaacatatcgaaaccgtataagtaatgaaataattgaaatacctttagtgattgatctttgaacttcaatcctatcaatatagcttcggtatgggaaattaggcttctaaactcatctctttaattagatggattatgttgttttcacagaatgagtgaagagttcgggggaccgagaccctatatttataggtgagatattccatcaatatttgcgccacattaattatcaggatattttaacaagtaattaggaaaatctaatcgggtaatgaatatttggaacatcaatctgaccatataattgtgaccacatacaataaatctatgatatatattttgttacgcacatgcaatactatatatagaaaatattcttatatttttcacttggtcagtatttaaatttaccacttaagcccaacgtttctcattacataataagtagatgaatcatatcaatttatcttacatgtattc

SEQ ID NO: 3097 - DNA, 633 bp, Cannabis sativa
ggacgttacctcccagtaaagttgcttacagtccatgcactgccaaaacaataggtttttgtcaaacaagcaatctggaattcgttggaaaccttttgcagcttccacagcctcttcagtcgataatggtttttggataaatctaccattgcatttggggcaccttgacaacaattgatcctcactgactttcagctgaaaagtttctatgacctacaagaacacttacaatttcagccaaccgcagcatgaactctaataatacttcagaacaacaagaactaaacaacttacctcaagtagttgttcatttttcagaagactcttcaccctatatatttgattatttagtatataaccatatctcagaagcttagcatcccgtgtcaagagcactctattctctttgagcgcttgatctattaactccctacatagatgaaacaaaattacgtctacctaaacgtgtatttatacctataatagcattgtatatttgacatattccggagaagaatacctgggatcaggttttcttgaacatgggattgcagcatccattccaacacatcttaaatgttttgccaaccctgcaacctgagtgaatgttccattagctaccaaatgacatta

SEQ ID NO: 3098 - DNA, 1288 bp, Cannabis sativa
atattagacttaatagaatagaagaacgttatatattaaaaatttaattaaataattatttttattaattttaaatattgcatcttgctagacgtgaagtttacttaaaaaaatgtaactggtgagagaataatcaatcagcgtataacctagcctactactattattattattattttataatttagtatttagtatgcatccatctccattattaatataaaaagtagacaaaataactttaatttcctctctccaacgtttttattattattattattattatattattattaaaaaaaaatctctcaaatattgtattactcatttctcgctctatcttattctcatcaaatgaagccctagcagagcagccgcctccctctttttctcttctcatctgggtttcttcttccaaagaagcatcttcattgttgatagttgacaccacaagtatgtagtggtgtaaatagttcaaagccggtgagcatgaggctgtggttgggagcgaagaaggcatgttgtggagatttaaataggtagcagtatcatgaaaggagtccttgtaagctctaacaaccgacgatcaactcggatggtggttcgactaaccgtgtttgtggagttttctttgacctacatctgagttgctttagatttcctatttgctactgtaaaaaaaatttgagatttttttccttatctgaatctgagattgttgttttctatgtaagagtattatctgagcctactctgctttttttttttatatgtatagtgcttagattaaaaattatattagaagtaatggtagatgcaaggaagtcaaactactaaaaagttgtcatcgtttagacaaaattgttgataatcggcttgccgcccaagaggtcatccaacgccctgcctccaccgtgacagagttagtcaagaacagtcatcacacccactcctctgtaaatgttttcgttaaggacggccgcctgtagctcatacaagtcactgcctaagagggattaaattatttatttattttcttatatctatttgattatagttatctattgagatatattggtattaatttgagatccacgatttgggcttagtttttagtctattttcttttttttatgttgcaatgtattaacctcaatatgttattaaaaaaattttgtgtatattattgtttctataaataaatatgtatattattgttttactttatctatggaatatatgtatattattgttgtggaatatcaagaaagtattttttatgtttatt

SEQ ID NO: 3099 - DNA, 3291 bp, Cannabis sativa
taatggtgtttgttgtagtgcttagatagtaattaaatttaaatttggaacttatatattgagagtagactgattattttaattttatttaatgtatcaaataccatttaaaatacaagatgtcaaaatatagagtaacaaaactttactgtacagaagcacatatatagtaaccaaatagttatgacctacgcttaattttaaatttgctatagctagaatgaagaaaatatatcattttactctaaaaatttacacatataactatttacacgttgttgatatagttactatcaaaatgttttagtaattttataaactaatatacaaaattatcttaattttatgtttgattttaaaatattatccattattgaaggtaatataaaaatattcctgagtattcaaataaatttgaacaaagtcaatgcctaaagaaaaattttttatatataatttgacaacaaaaatgtacaataatgttacaaatattgacatttaaatatatatctatttttaatattgtgggaaaattacaactaatgtgtagaattaaatcaacaaaacaattagcaatatgacaagattaacaattcacaaacagtaatcggagataaaaaaacaggaatgaacagatcagtattaaaactagaaacaataaaacaataaaacaataaaattaacattaaaatatatactggttcaaatcatatatctagattgatatgatctatgtctctactctagttctggaacaccgccaaaatcttctttattgattgagcaagaacaatttacaatacagtggagatcgattcacttttagattctcttaattctcttaaagtgtttatctctcacactctttcctaagaatctttttcatctacagaagattcttcaaatcccaaacccaatccctctcttttgtctgtacctctctctacctctcaatctctttcttcgatctcaatcttcaaccacgaagtcacctttcaaaactcttttgttcttctctctctctctttttttttaatctctgattactgtttgtgaattgttaatattgtcattggtaattatttctttattaagttttaggtgatttttttttttgtatattagttataattttcccacaaataagagcttggtaatcgatcaagaacgaaaacttaagattctttccacgaaaattctttaagaaataattattttcatgaatggcaagattcgaatgggaaaattcgatggaataggagacttcgcaatatggagaaaaagtttgaagggatcctagtgcaccaaaaggtcttcaaagtttttggagatgagaaatcattagctgagaagaaaccagacgagataactgaaatggaagagatggcttattacatgatcatcatatacatgtccaatagtgtgagaaaaagcttgttgcagaaaagacgactaaaggaatttagaacaaggttgaagaattctatatgaagacatcaattgctagcaagattataatttgctagaaaggttatatagttttagaatgattttttctctttctttagttgataacattgacaggttaaatgagattattgtaggattagctaatataaatcataaaattgataaagaatgtcagaccatcattttgttgagatctctcccaatcgtttatcaagaactcaaggttgccatcaaatatggcatagatgtgattacgatggaagatgttctttttacacttaaatcaaaggattttgaattacaattagaaaaggaattgaagacgaaagaagtgtatttggcaagaggaaaattacccaagaaagtaagtttaaagagtaaacaccatcactctcaacaaagatcgacgtccaggcctagggagaaggaaactcaaaagtgctacttctgtggaagggccagacacttccaaaatttttgcaagaagtacaaggagcaacgaggcttcgacaaatctcaaaatggagataggaaggacaacacgcatcatcactacaagaaagattcaactgctatcacgaaggttagtgatgactgcacaatagatagagaattattttccatctcagaatcctcaattaatagggagtggattctggactcccgatgcacttatcacatgtgtccaagccgataatcatttttgatcataaatcagttgatggagttaaagttctaatgggtaatgatcattcttgcagtgccattagaaccgaaaaggttgccatcaaatagtatgatagtggaatcaaagtagtgacgaacgtaagacacattccgaagttcagacgaaatctcatatccctgggtacgcttgaagatgaaggatacatatataagtctatgcacaaaagcttgaggatcaccaaaagttcactgatagttatgaaaggtgaaaaaaccaatgatttacatattttccaaggagaaactgttctagtcggagaagcaagtttggttaaagggatagaatcagatatgaagttgtggcatcacaaacttgagcatataagtgaacaaggcctcaaagaactgcacaaataaggtataattaaaattttaaattcttgtatcttaccattttctgaagcttgtcttttagggaaacaacataaactgaagttcactccaacaaggcatgcaactaagaagatactctaatatgtgcatgctgatctttaggggcatacaaagttcctacggactccggtaagtaatattttctttctgtagttgatgattatagtaggtgtgtttgaacctatttactagcaactaataatgagtgtctagagcagtttagagtttggaaaacttaggtgaaaaactaaatagaccttaaagtgaagaacctttggattgaaaatgggttagagtttattaactacgagttcaataagttatgtcaaggacatgggattaataggcatagaactgtagtgaggaccccggagaaaaatggtgttactaaaaggatgaatcgtaccctgttaaataaagttagatgtctactcttcaattccagattagagaaacaatttttgggggaagctcttggtactgcaacctaccttataaatagaagcccaaacagagttaactacttgaaaccccttttgaaatgtggcacaacaaaaccccaaacctaatgcatttaaaaatatttgggtgtacaacatatgtacaccaatctattgataaactagaacctagatcagataagggaaccttcctatgttgtcttaggtaccaagggttata

SEQ ID NO: 3100 - DNA, 1659 bp, Cannabis sativa
cagcaaagcatcttaaagtcttcgactacatatgttaccctaacattccaaaagaaaaagaagataagaaagtttgaagagaagaccgagaaagaaattttcttaggctatagtactcagtcaaaaagtcacggagtctataatttaaagtcaaataagctcataattagctgagatgtatttgatgaagatgctgcatataattgaaagacataagaagttgaaagaaagatagtcaatattcctccactgctaagacaagaacctggtcaaaatgaattcctacctcaaccaaccacggaagaaccgatacaagtcttagaatcgctactaggctcacctgtaaggaaaacacgactgctagcagaaatttaggagacatgcaatttagtacttatggatcctgaaagctttgaagcaacaaagcaaagcacatggagttaagtgggtctacaagaaaaattgttgaacgaagatggctctatccaaaattacaaagcaaaactagttttcagaggatactcataataatatggagttgaatacaatgaaatatttgctccacttgcacttctcaacactatcaggcctttaaatgctctagtcacagagaagaaatagaagatttttcaactcgatatgaagtcgacattcctaaatagttatattgaagaagaaattcatgtggagcaacttcaaaagttcctggcataaggacacgaaaataatgtttccaaattaaaaaaggctttatatggcctaaacaagctttgggagcttggtatggcaaaatctatagctatttcaccaagcaagaatttagaatgagctaaagtgggccaacactatcaaaactcaggtacgaatgaaacacttattgttttcttatatgttgatgatctaatctacacgagcaatgctgaaaagatgataaagaagtttaaagaagacatgataaaaaattttgacatgactgacttgggcttaatacactttcctcggaattgaagtaactcaaaaagaaggtgaaatttcatctcacagaaaaagtatataaaaacactcatgaaaaagtctaaaatggaaggatgtaagactgtatcaactacaaagctttcaagaatgaacacagctcattgaaagttgatgaataaaaattttgaagtctaataggtagcctactctatctaattgctacaagatcagacataatgtacgcagtttgtctccaatcaagattcatgcatgatccaagttaagttcattacggagcaactatgggaatccttaaatacttgcaagaaacaaaattttatggaatatggtacggagtcacaaatgagtcaaaattgattggctacacagataatgaatgggtaggatccatatggacgaaatgaaagtacatgaggttacgcctgcatacttggatctggaatatttttatgggcctcaaagaaacaagcagcagttgcacaatcatcagcagaagtagagtatattgtaacagtaatgactacaagcaaagttatatggcttaaaagaatactaaaagacatgggagaatcacaaaaaggaagctacaaaaatatattttgatagcaaatcagttatgacaatggctaagaatcccatatttcacaacagttgaaagcatat

SEQ ID NO: 3101 - DNA, 1383 bp, Cannabis sativa
gtaaggtaaaccaacagaagatcgaaatatacaaggtgtaaaagcaaaccttggatcctgcaatatagccaccacacgatccaaatgactttgtaaaagttcccatcatgacatctacatctgctggatccacacccaagagctcacaaacacctcttccagacttccctactgctccaatactgtgggcctcatccaggtatgtatatgcctatgatgcaagaaaaagaatattgagatacagtagtttaaaattttgacaaagtaacacattcttagtagaactgaatataatagattaagcaagcctgtaataagttgatgtaattatataagaatttatatcaagtatgaatctcttaatacgaagaatattcgcccataagaagccttaaaactattcctgaaggaattaatgtgcacacatcataagaaaatccatgtgaaccatgaaaagcatgaattctaaagttattcataaatttagagcacatgagagttcattttagcaaactctgttcctaaaatatttagacaaacaagaagaaacatagaaaatataaaataatgaacagaccaaaaatttcataggatattcaatatataatttatgaagtctacaatgtgggcacaaccttatattttttgcaaattgctattatctcaggaagtttacaaagctccccttccatgctatatataccctccacaataaccataatctttttccatggtctgccagtcctaggttgtccatccgctatttgttccttcaaaacttcctctaagtgagcaggtgctataagcaagataagaaggaaaattataagagaacaaaattctgtgatagatgaactaacacagtatagtaaaattttttgctacacaataccaaaatcgtagatcttgtttagcacaccttgttaaacatcctattttatattgtgttaatgcaattattgtctttcaattggtggaaatcttaagttgtatagcttaatttgatccttagaaatacactaaggctaaagggcaccacactaataaaagtgtgggggttccatgtgccaatttaattgtgaggttcacctgtattagtgtctggtggtcaagaacaataatttagcagccaatacaccaaaattccaacacacagaatgttataagctccgtgttctcaattttcatttcaatcatgaatttctttcatcatcctttcactctctcatattcttttattattttctccattttctaattatattcatcattgttattcttctcattgtattagattacttttatgtctcatataatacatttacagccaaacattgtattcatagagcaacaatataaataatttaatacaatacaatacaa

SEQ ID NO: 3102 - DNA, 1070 bp, Cannabis sativa
cctaagcatagacgggctaggctcacttctagggcccactcattttaggggccaaataaaaaaaataccttttaaaaaatatgtatatttttttaataattttattaaaaaatactatttatctttatagtaagggcctaaaaaatatttttttgcctatggactatttcaactcaggaccggccctgcttgaatggaaatatgctctccaaagttttctaattggtcttttagaaaaaattagaaaaaagaaaataaaaaagagaaaaaaaaagaacaatgttttctaattggttttagttagttaaaaaaaacaaattagagtgaaggtattgtttaagttctagtgttggcaatgagtcaaagagagtcatatatatacaaagttacacaaagaaaatgcctaattaattttcaactttcaaggttagttgcaactccaaatactccaatgttgcaactgccagaaaaaattcacttaacgaattcaatatagactgctttcataaattgttaaaaatcaacttgggccatttctaatcaagttctcgaaaaagtgttcgaggtattttttttttgtcattagagataataaagattaaagcaaactcggagagaaaactacaaatccgagaccctagaaacagggcccaacgcctaggttgacaatcaaattggacctgaagaaagcatatgatacggtggagtggaagttatacaagaaataatatctgctcttcaatttccttccaagatcattaagctgattatggtatgtatttaaattcctatattatcttggtgtttaatggatcgatgcattggtgttttaaggccaagaggggtttaaggtagggggatcttacgtctcttttgtggtttaattaggaatggaatacctatcgagaatcatgaaaaaaattcaggagaagaggaactttcatgacagatgcttgcaattagagctaaactacttatgctttgttttcttattttgtaaaggggactttatatccatttatctcatgttgcaagtgttgctaaatttatgctacgcaagtgcacatatc

SEQ ID NO: 3103 - DNA, 731 bp, Cannabis sativa
tacttggcgatccgaaggtcccgagagacatccatggaaacaaagcagagcttctctttcacatcgtccattagaaaagtctcatccataacattaatagatcgatacgaaacgagctctttcaggtaattggtcaaggctttcccacccaaatcgatgcgtttagcagcgtagttaattgtgaaattctgaaacaccggagcggcgtgagtaaacgagaagccacaatcaacgacaaggctacattgggccctggagatgaggctcgtgggccggcggcgactagcctcgtagagatgggtcagagaaggggaatcggcgacgtagagagcggagaagttgaaatcttcgaagacaagctcgtcggtggtgcgttgaatagaagggagtgtgaagaggggttcagtgaggaggagtgaggactgagacggggacacgtggaggagagaggagaagaggtgggcccagatgtcgcgttggaggtctgggtttatgaggtagccacggtcgatggggcggcggactggggcggaggtgaggtcgatggggtcggcggtggcggtggtggtggtgattggagagggatgaatccattttttggaggagagtgggcggtagaggcagttgggaatgatcgtagacgggtcacggtcgccgccgaggcccgccttgattagacccccgccgttgtctaaaaccacgatgttctgctgcatgtcgcggtgttgact

SEQ ID NO: 3104 - DNA, 940 bp, Cannabis sativa
accaaaattagtgattaattttaattgtctcagctcagcatgacaaattaattaacaaccaagataagccatatatattataatatgttaatagttattattgatgttcaagacatatatataagccatattaatacattattgttatatattagaatgtgtaaggaatgtttagttgcagcaatttgaatcagttatgataaattaatgttcatgtttgtgtgttgagagttttagtgttgaatttgagcaatatatatgatataagaataatgattcacacactcaaagtgtaataatgtataattaatcagaatccgaatcacacaattaaaaatgttgtatggtcaagattcaatatgcaccattatatgtaataagtgtgtatgtactagtagtatactcgtaatataaaactcaaaaaggagtgatgaaatgaaatggtagccattgtactaatttgagtgaccatatcagtactagtagtagtagtaatagtactgacaaattttgtttgaaattaatataattaattatgtgttagattagattattattagggtagataacgtatttgaccacctatatttctgaatgctgagttctgacacttattatttaattcaattgaattcacttcttcttcctttttacctttcctacatattttcttttcaattatatccattgtattaacatcttgaacttcaaaataagtaatatcattttctcgaaacacacggttaaaaattagatgagatactttgctaaattgtgagcaatttatttgcaaaatttttaataaaagagagacacgttaggcataatttgtaacaaaaacttacaatcctcaactaacccacaaaaataagaagacaattattctaactaagcccaattaccatccttaattactttaaatacctaattattttaatat

SEQ ID NO: 3105 - DNA, 1869 bp, Cannabis sativa
aggtcttatcttaaatacatcattataaagcaagcaccaaaaataaaaatgattaatatgattgataataggagtggcacatagattgtttcaaagaccacaaaatggcatcaactaacactgaaaccaaaggacaaaatttcctttttaaaaaataatttgtattggattttgttattaagattaggttagtttcattattttaagcaatttataattaaaaatgataatgacttaataattgaagcaaacatggtaacttgatctttcatgataccaccataactcagataccaaacattaaaagatttatcattattgtttttattgtataactatttgggtttggttggaagttatcctttctttattcccttaattaactatttttattttttatttatttataatctatttttttttcttagccataaaataggatgtgagattgttgactaaacacacatacaggtgtaaacaagagagacaaaacaaaagaagtagaaaaatctgaatagaagaggagcgtagttttactatactagccagctactacataaaacaaggagaccactgtaaaaccctgttctgtgctccaccatattagtccacccaaaagggagggaatttctctctcttctctcttactactgccaacttccggatcagtctctttttccaatctcttctattacaagcaattattcatcattattttacttcttcatctttctcttcctagttcctcctcctctgtcatatataaataaataaccgaaaaagttttcttctttcagtttcactcttcctcaccaaacccatccattggactgccttcctccggttaccggagaccgccttaaccggacagaatcccctttaacggctgagtagaatagactaaagtcaaagtaagtaattttttttccaaatgggttgcttcaatcttcatcttcgtgtcgttttcttcaaggcttcttaactttatccattcaatcttactgtagatgaaaagtattacgctcccaaggaagaaaaaaaaaaatcccatctttccttttgtaactaacaaaacgattttttttccatatattatacatacccgaaagctcaaaaggctttcttttacttggtttgatgtattttacgcttctcaaccaactgggtttagctaatttggtcccattgttgtttttttgttctttcttcagatctccagcattttgtcgtacagatggggaactgtttcgccaagccgaagaaactttcgtctccggtaatggcgccggtttcagtttcggttccggtaacgttggctaaaccgaagaaaaaatctacggcggagatcgttccccacgaccaccactcgaccgtccggctctacggcacgcccatcagctcccacacggcttacatccggttcgcattgcaacacaagggagtcccggtccggttcaccccatcgatctccgacccgcccttaattgaagtcgggtcggagcgggtttcgggttcccgtgagtctcttctccaatacattgagtcaaagttccctaatccgccgctggccgttaaaaagtgtaacggcgaggatgcgaagccgtgggtagtgactttaacggcgttacagcacaggagcatgacgtggcacgtggagaggcttttgaggtggtcagaggacctgggggcgcgtgggggaaagaagagaggcggctgtggtggaggaatcgacccgcgcgtggggactccgaaaatggaagtgaagaaatttaacaggagctactctcagttgctggagttgatgcttgaacacgctcagatggaggaaagagtcctctttccaattctcaactccgccgatccaggttt

SEQ ID NO: 3106 - DNA, 1811 bp, Cannabis sativa
gacatgccctttggcacattccatatcttcaaggtgattaggatcaagatcaagggcctgagatatcaaccgaaacagagtgtcccctaacttcttaagctgcttagagtattgcaccattatatctctgccattccaggacaagagtgtataaaaacaattatggattctcatgctagttttagacaaatgttgacaagtaaaattgaatatttaagcaaaaatttcataatcattttcaatgggatgaatgtacgtgcaggctgcttgatattcttcttgctttggaggattgggagccatgagacacattaaagtgtccctccaatttgcagattttgccttttgaagatcaaagttgcgattgaaccggacttttttaatcttgtcatgagagtagaattccatcactgcctgctgttgctcactccatcaatcatttcatccataacatcttgctgaatcccatggttaattactttgaagaatccccatgactcacaagcttctctgatttcgtcaatgattttcttttgacgccaactatcatcatccatgtttttaaggtctacagttggtacctcgaactggggccaggccaagtgatcatctgacatgttagatgaaatatcttcaggtggcataacaaagatttgaggaagagtatcaatcccagcatcaacaagtcctttaacaccagcctttgtgtcatcaaaggctttcaatgcttttgctctatcataaaacactaaactatcatcttctaaattctgtcctgtgaaatccatttcattaaagttagaacgttctttccttgagcttctgctaaaacttgatgtagaatcaagtaagacagctcatagatcttaccaaccaagctaaggttgtttctgagttaaaagatgaataatactaataataaaaataaggcattttttgtggttttggttgtcctcccggggctctgtgccttgtatagagaattgtcattattgatgcaatgtggataagagaaaaattccttaaagcaatcatcattgtgagattatcaagggaaaagtcaatattaaatttattctccgaaatttccctaatcacctatgtggttttcttttttctttcccatggcaacatcatgtagcttgacactaaagtcatgaaatatatatgagtttgaaacccttaaaattcattttataacatcagaacaataaccatgagcatatatacttcagttaattgtgaacatttttattagttaatgactgaagaaatagttgtgagcattaatattagtaactgaatgaagaaacagttgaaaacattaatatcagttaaggaatttagtagattcgactccttttatctcagcacttaaatcatggtgctttgttgttctatcgtaagctcgtttgaaatgtggatactctctcaactctaccttcaaatttgattgcttgtaatgattttataccaacttgatagtactgcccaaaaacagtgacataatattcattatatcaaggtgaaaagaagcaacaactttcataaatgctgccaaagatgacatttcgtgaaaaattagacaacttgagaaacggacataaatagacttctccaatcaagccatataatgtgttccaatggaattgaatttggaaatttatatttttaggcatgatggcaactggtgagtctgctaatctctatgttactaagtagttgtttttgccttctcatattttttaagttcttaagaaaatgagtttattcgtggttggttggtgtagatggaaaacttgtaactattc

SEQ ID NO: 3107 - DNA, 1137 bp, Cannabis sativa
agttggagccggtggtaaatcaaatctcacaactctcccaattactcctaccaccagggaagacgccgccgacagctgcggccaccagtgcagatcgattccgtcgagctacagaaggaaacgggtcatcggtaggtgaacccagctcggttggatttcagacgaatccccagccacctgctgccccaccgacggggatatctcctccgaattttgcaccagcaatgacaccgatccaactcggatcgttttctccaggacaaccgcacgtgcaggactccagaccaccacgaatggagatacccctattcaacggcaataaccccgatggttggatctatcgcatcgagcgatacttcctcctctcgaggatgactgaatccatgatgttagatacggtgatagtgagtctcgacggcgacgccctatcgtggttccagtgggaaaatcagaggcgaccgatcacctcttgggcgatgctcaaacatctcgttctcctccgatttcgcgcggtgccggtgggatcaatttcggaggaatttttatcggtgattcaatccggtactgtgaaggagtatcgagtgcgttgggaggtgctagcttctcgggtcgttgatgtacccgatcatatcttggaagggaattttgttaaaggccttaaggaggaaattaaggctgtgttgcacattttacagcccaaaaggtttagcccaaatcatggagacagcccagcgtattgaagaaggccactacttattgggcccgacccaaaagcccaacccacctaaacaccacttaagccccatatctcccatcagaccaagttacaatccattcactaccagaccccattactcgactacaccagctaaaacccacagcttcaacccaacttccatagcttcaactacttccaaaacaggtagcagccggtcatcctcaatgaattcgtacaaacgcctcacggaggctgagtaccaggataaacggtctcgcggactctgttttaaatgtgacaagaagtttcaccccggccatgaatgcgagcacaagcttttgcagattatactcactaccgacgaagaggaccatgacctttccgacgaaaatccgcctctctcaccagactcacatgaa

SEQ ID NO: 3108 - DNA, 2126 bp, Cannabis sativa
ctttttgtactttttaagtttccctcaaatattttcggaattagtttgaaaaaaatcacaaaaaaacatttgaaaagcccacgaataagaagaagagggcgaatgtcgaataaagcccaaaaaggttttggatctgattttactcatgcgattagggttagcaaacaaaagataaaacgacgacgctttggtcaggggagtttctcatagaaaaaccctagttctaaaagcctcccacctctcatcttcattcccttcagtttggtagttggagccttttgccgctagcttcgtccgactattttcagtctcggtttcatctctttcgttttgattcgaaacaatggtacgcacctcgggcttgttcgatttacccaccgcaccttctcatcttttcttctatctaatggctaacttttttatgtcttttctgctctcaggctccgaagaaggacaaggctcctcccccatcctccaagcccgccaagtccggtggtggcaagcagaagaaaaaggtcatcttcttaattctacgagttttcctttttcttagataaatatacaattctaactagttaaacgatgtatttcttttccaaataattcagaagtggagcaagggaaagcaaaaggagaaggttaacaacatggtgctgttcgaccaggctacctacgacaagctcctttctgaggctccaaaatacaagctcatcaccccatctatcctttccgatcgtttgagggtacttgtttatctatcaattttaaaatctgtttcattccaatggttttgtttgtttctttatcatcaatttcacagttttcaaatcttctgcgctctaaatcgttttgcaaaagattactttctaaaggatgaatccgaagcagtccctgattcccaaactagatgctatatattactaaactattaagtttacagttcgttgtttagcttataaatgcttcaaaatcactatatgttacatgtaacagttctggttaaagtattccctaaacctgctggtctctagttcttgtttttctttgggtctgttaataattctactttacttagttttttcccattaggtctagtgttaaggaattacacctacattattgaaattctgttaaaaaagatgtttttcaatgttgtgataatttttcttttacctcaagtttcatatgggttttgtttggtgttatagattaatggatcactagcaaggaaggctataaaggatttgatggcgagaggtttgatcaggatggtgtctgctcatgcaagccagcagatttacacaagagcaacaaacacctaagatttcttatttgtcccaacctatttagtttaaatcatcatgtgtttgcccagtttgaatgttactatactttttgttatgtggagttgtttcactttagaatgagtagagctctatttcagaaaacccgttgtctttattgatttgaaaattaatattggactaatttgaagtgttgttttttgagctgttaatgacttttgttagtagagaaagttttgttgcttctcaaggagaatgacaactttatcgtttgctcaacttttacgagtgatttttttttttggctgcgtcaatatatgaatgaaattttttactcttattctataatatgaagatttgtgaatcttgggtatgttttttcagaagtggtaaaagaaaccatttggcatatgttttgggtgaaacatgccattactcctttagaaaatactcatcctagcttttcactcttaacattaattcgtttgtattaggcctatcaatgcttctcattcgatctgaacttatattcttgcagctcgtttgtttttaggtgtatctaaactattatcatcttttgctggtcgtttattggttccctgattgttttgctggtcgtaaatgtgggctggcctatacttttcaacattcagaaaaaatgtatgactaatatatgacatttacgttacataacccaatcaattcattaaaatcatatataaaagagatgtaagatcacttttgggaaggagctttgtcccacaattggcaagcgtgtgagaaatctttaatggtttctctttcaaatgtttgcttccgggg

SEQ ID NO: 3109 - DNA, 1880 bp, Cannabis sativa
ttttctttttaaataaagcagctaatagtgttttattgttttcttagaaaataggaaactggttatcttgcacgacacatatattcatatttatcgaagtatttaatttttgacgtcttcattgcaaacccaatgcgtatattatgctagcttctttctttgtttttcttattctctccacttattatgtactttaataaatacttgcataatttccctgcttcagacaccaaataaaatcttcaaacgaacaaacttggccaataatggggaattatctgactctttcgtcttgccctataagggatctctcaaagagaagaaaggctttacctatagaaactatcttcaagcttccttcttcaacaccttcgtggcctcaaggtacatacagcataaagcagtttttcttttcccactatatattttaataaaggtgaacgggaagataagatgattcttgatattcatgcacgtacgtagctctttcttgttggttgacatttatgcaaaaaccatgattgtcgatcaaccgagaagataacatgattcttgatatactgctcgtgctgtgctcaaaatcaacatcataaattaatacatatatatataacgatcataattaattgtcatgtgacatatatatatatatatatatatagagatatataacgatatttacgtaggcgtatgtgtgtatatgttacacaggcgaaggttttgcaaaaggaaccattgatttgggagagattgaagtttgtcaaatatcaaccttcaacaaagtttggtcaactcatgagggaggaccagataaccttggggcgaccttctttgagccctcgctcatacccgatggctttcacatgttaggctcctacagccagcccaacaataagcctctcttcggatggacactggcagccaaagacatctctaacggctcatcaccacttactgaaccgatcgactacacccttgtttggagcagtgactccctcaaaatcaagcaagatggcactggttacctctggttgccaactcctcccgacggttacaaagcagctggtctagtagtgactgcttctaaggataaaccacctatagataaggtctggtgcgtccgttcggacgttacagaggcctgcgagaatgaagcttggctctggggaagtaatgggtttgatgtccatacacttcggccaacgagccgtggaacgcaagctctcggcgttagagttggcacattcgttgctggtcctggcagcaatggtactctagtttcgtcttcgttagcctgtttaaagaacgttaatccgaacaagaactcatctatgcctaattctacgcaagttgatgccttgtgtggagcctactctcctttgctctattttcatccaaacgaaaagtacctcccttcttcagtaaactggtactttgcaaacggagcacttttatacaaaaaaggagaagagtccaaacccgttgggatagaacctaatggtgcaaacctcccacaaggtggctcaaatgacgggctgttttggatggacttaccggtggaccaaaacgccaaagagagagttaaaaaaggtgatttgagctctgcccaagtttacttacacgccaaaccaatgctggggtccacattcaccgatttagccatttgggttttctacccttttaatggtccagccacagctaaggtgggacctctgaaaatcccattgggcaaaattggcgagcacataggggattgggagcacttaaccctcagagttagcaatttcagtggggagttatggatgctctatttctcggagcacagtaaaggcgaatgggtcgaagcctcggagctcgaattcgtcggcggcggcggcaac

SEQ ID NO: 3110 - DNA, 619 bp, Cannabis sativa
tttgagtttggtgacttctggctcatagctcatctttacaattccgacccattggccaaacaattgggtgttctcaaaagagtgcctactctcatcaagactcctgagctagtgaaacgccgccaagcaattcttgagctcagcagcctcattaatgtcaccatgagagtcatcgctatctttgatgagtttgagaagctctctgcttatgacatcaaagacattcccggattgtccattgccttggaccatatgccagtcgatgtttattggtcaattctaagtattgcagcttgttctaccaagctcaatattctcataagtgatcagtacgtagttcttgctcttattataatatatataatctcatgttttaattgtttttaacagaaaagtgagtaatttattttatatatatatatacttgtaggccagacagagcttttgatttggctccctacactcaaaaaatcagcttcgtcctcaaccagctcactatgcagttgaacgtatgcagaaggcaattgagtacgtaattaagttcttaataattataataaaataatcattttctataaaattaattttatataatctgtctagtaaatatctttaactc

SEQ ID NO: 3111 - DNA, 1219 bp, Cannabis sativa
ggagtagagagggttggcttgagtgtttgttatatgatgaggttgattagaatctggtatagaattaggagcctgagatgcttaagagtcaacagatgcagggtgtgaagtttgtacagtagtatcaacaccaatcacagcagcagtgactgatgcagttgcagtagtagagggaataggtacatgaacatctgttgtgggagtgacaatatgagagtgacaagtgttgcattgctcacgggatggaacaatatggggagactcagaaccaccagtgttcaatgcattagtattatgaaataatggagttgtgtgaaatgtagttataggaaaagatggagggtacacttgtaatacctgctgtgatgttgtggacaagacagctgggaactcttcttcattgaagacaatattcctggtgatcatatatgcacggctagaacttttttcacagaggtaccctttgtgctgcatatagtaccaataaagatacacctttctaacttcactgttattttgtgagtgtgatatggcctcaaatagggaaaataggtgcacccaaaagtctttaaaaaaccatagttaggttgtttgtgaaagaggcattgatatggagaaaagttgtctaacactggtgtgggtaaactactgattataaatgtagcatgttgaaatgcacaccaccagtaagagagatctaggctagattgggccaaaagtgtcacgccagtttcattaatatgcatgtgcttgtgctctgtccgtccatttttctcacgatcatggggacatgggtgttgaaaatgaacaccattgttaactaagaaggaggcaatggacctgtactcacctccccaataagattggatagttttgatgaggagattgaattatttttcaacaagttttttgaattgtagaaatgtagaacaggcccgagattttaaagtgagtggaaatatctaagtaaatccactaaagtcatctatgaagtggatgtattaccagcctttcttagaagacacatgagagggaccatataggtctgtgtggacaagttccaagggaagggattccctacttttggatatttgatatggtaacttgtgacttttatcaatttacacgcatcacaaaactttagactctttaatgtgcctgtgtgattaatggtggatagaactttggcaagtgttctaggatcaaggtgtcctaattt

SEQ ID NO: 3112 - DNA, 1116 bp, Cannabis sativa
atatctttatttagttatagttcatatatctttcagagaataaccattttttgattattttgtagtgcattgaaaatataaatcttccacatatcttggagtccaattgctcaacttttcttaataatgataagttgcatagccaaagatcactcttagaaaagtcactcaaaccaaatttgattcaactagaccttaatatcaagaatctacctccaccacctgaagcttccaaatttggatgttgggtaaactctcttatgctacctttcaatccatttttctaattaaaaaaattcttgttagatacatatatatgtgtatatagtcgtttctaattaacaaagatggtttcagacttataaaaatctactagtgtattattgggcaaatgacaagactgttcaagaggcactccatattcagaaagtaagaaattattcttattatagataatgagagaataaaatgccattaaaatatatgctgtcggtttagattaatatatatatagtggttaatttctttggttttgattgtgaaaatggataggaaacgatacagatatggataagatgcaatcggtcattaccttacgcaaaagatgtggatagtgttgttagttatcataagcaactcaactcaagaggttatagagctctaatatacaggtactctaataattaatgatctaactaattagacatttatataaaatagtgacattataaatttttattttgaatatagaaaatgtgggttaatattatattatatgttaatatgatatgcagtggagatcatgacatggtggtcccctaccttggaaccctggcatggatcaaatctatgaatctttctattgttgatagatggagaccttggttggttgataatcaagttgctgggtaaaatcatctaaacttaagactcatatatatataaataaatatatatatatatttatatttgtatgtaattagtccttaatcaaacactaacattaatgtgcatgcagatatgtgacagaatattcaaaaggtttatttacattcactactatcaaggtaagattataattattatgattaaaagttaggtacaatagtactaagc

SEQ ID NO: 3113 - DNA, 648 bp, Cannabis sativa
gatatgtaaatcaagggtgccacaccaatttcctgaacctacttttgttaattggcccactgaaagcagcctagaggaagttgttgggcaattagtggatccggcccaaatggaaaaggagaaggcccaagtggtggttactcatgatagtacatttttttctaataatgggccctctttctcgggtgctaagaaaagataggctgctctaaatattgtcccagtcatcacttcgaatgacaaaattaagacactgggagacaagtctccagcttcgcctattacttttcttcccacaatggagcttaacacttttactcctgggagtagcaatcgacaaggagatggtgcgaagagaaggggaagttatcgtaaaagagggggaggttcgggtagtggccgaagaggaggaaaacaaggaatttcgaattgtaagagtaagaagaacaccgcttctggggtgttacaaattgaaggtacgtctagcactaatttggatgatgtgttagttgatattatagttaatgaagcaaaccatttgttttcgggcgaggaggcggcccttatcaagcctcctccgtcgccatgaggcttttatcgtggaattgtcagggggtgatgcgtaccccggcaacccaagctctcttg

SEQ ID NO: 3114 - DNA, 1536 bp, Cannabis sativa
atgggcagtggttaaaggctggacttagtgcaaatgtgggtggtggataaaaaaaataaaaatagagcaaagaatgtggtcgagagagatagagagacagagaggtaaatgtgtttctcaaatgtaagatttgttaaaaaatatgtattcataatattgtttaatgtgggccttttattttatttttttaatatatttaaatcaattcaatagtgtcagtttcaaaccgacacttatgagttcaatagcgtcggttctatacaaatacttaatagtcaaattttttgtttttttggcatcagtattgtgtagtgtttgtcagtggactgatgttattgagtactcataggcgttggttcacaattgacgccttaaaattagagtgctctatactgttagtttttaacttgaactgactgtttgactaacactaaaagtgctttttgtagtccttaattatattaaacacatattcatctaaaacaaaacgcgtgaactaagcgattgatagaatgatataaaatattttgggtttttattattaagtaatgagattacaataaaatttttatttaaggcataaaatccaacaacaacgtcatgtgatcatgctacattaggatcaagtgttgaaaagttgctccaaagttcctatgatttgcaattaaaccacatgaccaataatgagtaaaaaaacatttaagacattagccaagatagaagaaattgatgtagacgaatccattgagaaaaggccaaagtacataccatgttagaggaaccagaagtttcgtgaaagtatggagctcatgacacaacaagagattgggggtatcacccgcacatagttacccacatataacatgtataagaatattttgacatttacatacacatatggataaaatatgtgtgcataattcatgtgcggtgcgaataatatttaagtatttagtggtatcccttcatcttttttttttcttctttttgatgtaaaatttcaacttttattaggattacttggaacgttgatgtggaaaaaaagtattatttacccacacatatatggccacatatggccagaaacacttgagattaccaaaaaaaaaagaaaatagttgcttcgacctgacctcgagaaaggaagaaacatagttgtaggaatcacaattgagctggaggattggataccaagtttattaaagaagaagattaaaagtagagaaagagaggaattgcagagaagtgtttcttgtaattcatttctctgaataatgaatgcaatagaagtatttataagctaaagaataacacaatcaagaaaaggatcaactgaatcacaattacatctcaggcaaagcaaacaaccaaaacagaaacactgactaactaactaaaattaagtcttaataactgtcacaagtggtctcaacacaaaaataaaagggtataccccaaatgatcatgaataaattaatcataccatgggttttgattcttttgaaatatatgtgtgtatggtgatgagtaactttc

SEQ ID NO: 3115 - DNA, 1066 bp, Cannabis sativa
aagaacatataaaaacaccaagcttcacataaataactcagttttgacaatgctataattggtaccaattttgtttaaagataccatttttgtttttctttctagtgatgaaaaggtgattctagagtaagttggcagcagtgtagctactggtttagtcatgatttattaaagtcccacattggttagtgatatatatactcgacctacttaataaggtgagggcaatctttccctaacatgtcggttttgttagattgagttaagcccaataacttttctaatatggtttcagttcagttttgcaatgtcgggtgcccctaatatcgatttgttcacaattttttggcatggtccacgtgaagggcttattaaagtctcacattggttagtgatatatattctattgagtgcaattctcccctaacaagctagttttgttaggttgagtaagatgattggctatttggtacaacagattgtcaagccagcaaatgattgagggaattattcattttgtgtgtaatttctagaagccttaaaagtggggaaaaagaagaaaagagtaggagtgtggtctgttatggtgaggaaaaagctttgataaaatctctgtgtttgtttctttcaataaggttgtgattaaagtttcatcatataatttcggtaggaagctattttgtagcattttccatttgagtaaagtatgtctattgattttgtattcataaaacttgtgtgaaaaccagctgctgcattaacaatgagcaacccaagaaggttatggaagagaacttgcgaaatagatttcagtcactaacagcgaaaaggatgatgccaaggaggctgcttttgcagtttatggggttcagtcctctcatagccatagcacaacccgattttgcagcaacaggaccaatgccggaaatgaaggaacccgaagtcattcggtatgtgtttgtttggttggttggtgttctttccttaaaaattaaaacttttagtctaaaattggaatctagaaggtgattgttaagcttcttcttttgtttcgatactattttca

SEQ ID NO: 3116 - DNA, 1098 bp, Cannabis sativa
taataatttttggttttttttcttctttcacttaaagctaatttatgtgtttgtttgttgttttgcagcttcaaatacttggaacagagggtgattatcccaaggaaatttatattatgctaaattatatgcactaaaatggtagttgcattaattaataaggaagaaatttcatgtactgtgattcaaaatttcatatgtaagcctaaagccaacccatcatattcaatattcatatgttattcttaatatatataaatatcatattttattgtaatgaaatacggatactctaaacaaaagaggagattaacttcaatctatgattgtttgtgtattctctttaattaattactttgtataagtaatagagttacgctattcaaggtcaattaaaatatcaaaagcttcgttaattactttgtgttcttttattccaaagataatactaaaccaatgctcgacaattgagctggaaatgtatgtgcatgccaatgccatcagtgtccggtattttggaaagtccacgacaatacgagtcgtgccatgtcaggtcataaaaatataaaggttagtgtcgtatcaacaattttataggatagtcttaggattctcgtgacgtacatagatttgtgtcgtgcgggccaacccaactgttttttatagaatagcccgttttcttataaaccatgctagttttgtgttgtgtcaaaaaatctcatccatttttaacgtgatcttgcattgtctcgtaaaagtgtgattttatttaggtaaaattatatcaaatacatgtttaacaatgatttccaagttctacgattatttgcgatgaaaatagaaggaaaaaaattgagaaagcatagataagtttgaagtatgtattaccaaaacttttatccaattttattgcacaccgtccatcattaagcatcgttgtttgctaaaaaaatctaatttttgtggcaccattattaatgcatcgatttagtatcttgttgccagattaaattttcacaagattatcattaagcattaattttaatttgtttgtttgcgaaaaaagttttcatgatactatcattacgcattacttaa

SEQ ID NO: 3117 - DNA, 1117 bp, Cannabis sativa
tacagctaatatgcatctctaacagtgacattagaatttttcagctctgatgctacatcagtacaaatgcggaatgtctaagctatcttgttaccttcattaatgcgattctctttctttctctatttttatttttattttaatatatttttgcagggtatcgctataaaaacacctgtccagtggcctctcagtaagggtttttctttttcatgctggcttagagtagaaaatttccctagaaatggagcaatgggtattttcagttttctgacagataatggaagaggatgcttggcagttcttgctaaggacaaattaacctatgaggtaaaacatacgtattttatgtatggaagtgttgcccatgtattctaattgcacatctatgctttgtgctgttctattaacatactgtgctcctaatttttcttgattctctttgtgtgcttcatgctttacacttgctgttttaaactttctgccattttcacgctgataatcatttttgtattttgtagtcaataaatctgaagcgacaatgtgttcacctacctatcactctggttaggaagaaatggcattttctatgtctaactcatagtattgggagagccttttctggaggcagcttattaaggtgttatgtggatggtgagcttgtatcttctgaaagatgcaggttggtcaaattcttctttttttttttccttctttataaaattaatatcttgaaacaaaatttcgttactctaatttctctaatttcttggttcagatatgctaaagttaatgaaccattgacaagttgtaaaattggtgcaaaggtttatatggcaatgtacgaagatgacattccgcaggactctgtaaaagtcagtgctccattctttggtcagattggtcctgtttatttattcaatgataccatttctccagatcaagtccgtggtatatattctcttggaccaagctacatgtattcattccttgataatgaagctgtcccttccagcgataatctaattcctactggaattcttgatgttaaggatggtcttgcttccagaattatctttggaatcaatgcacaggtttttacttttctgttattttc

SEQ ID NO: 3118 - DNA, 1419 bp, Cannabis sativa
taatttcttggtgtaatatttacaagccgaaagcacatggtggtttggggtttaagaatgttgagcaatgaaattttggagctttggagagatgtgtgtgggatattgctcaaaaaagataatttgtgagttaaaatggatcaattcggtgtacataaaagaacaagattggtggagctataatacttctcaagatgggagtttctattggaagaaaattattgaagtaaagaatgagattaaaggcaaaatcaattattctaaatccatttcagtgaagttcagcattttattttcaccattaattaggaagaaagtaagggggtgagctaaaagcacagtaagaaaatgctttaacacacattaacatttaaaatatcgtacatgtcttaaatttacaacaatacaactatatacaataccatcatattcttaatgtattaagtatttcaacatcatactttaactgatagcgacaagtaaataattctatacatgaaaaattatattccatgtgtccatgctaatccaaaaccataacatcatacgtagagattataactcttatatcatactcatagaataactattatactatgaaatagccatatcacaaccataatggccaggattggtgcccctagtgttgggtgtcatgcccccagtggagatattggggttacttccatgtcaattttgtctaaagggcccaccattgctgttgaaatattgagttttcaaagagaaaaagccaacctttcaccacaacgctctcaataaaagtaccaaattgtattgagagtgctctctaatcctcaatgaaagtatcaaactgttgacgcaatttttcgtcaactgatttaagaaaatcataaaaaataataggactgcaatgaattgatttggctaaataaaatcgcaataaaataaaaggacaccatggatttatagtagttcaccccccatgtcgcgatggtgatggggttacgtctactttatttttattaattggatctgacacactagagttatgttttcaaaagtgtatgaataatagtacaaaaaaagaatttctaggtgaaatcaatatcgaagcttatgggtaaaaggctcatgggagacccaataccataaacttgataacaatggcatggtattgttcttgggagcaatataccaatgggagcaagaaaaaagagaatggtctctctcccttggtaaagatgtctgaagtaatggtagtggagtaatggagcttggtgtcgtactagtatgaagaacttgggaaaaagatgaagaaaggaaatctcattgggtgaagcgttcttagcatccgtccaataagcaagtgatgccctataactagcctatcaccacctttatataggcttagggtctgttagtgattccccacatgtc

SEQ ID NO: 3119 - DNA, 680 bp, Cannabis sativa
gctgaaccgctcttccgatctgtgtgataggccctacggatgatgtggatttaattgggcctagttgtaattttaattcaaaccatcctggtaaagtggggcagccggttgatattttcattaaatcaccacttcagatttttgggtcaatatttgggtcggctattgtggagccgggtcaaggaagtgaggtggtgggtcaacttgaggagaaaagagctttatctaactttttcaaagcgcaagaagactacatccatgaacttgaagctcttgagcactcgggtaaacttaaaagaaaaacttttgcaattaatattggagtacaaccgtcatcggagtgcaatgaaagaacaactccggtcaaaaaacagagacttgatctggacacgtgctctttggggaaaaaaccgtttttgtcgggtcgtagatttaaaagtgttgtaagggattttcccaaaggaaccagagcatgtagtggatccgttaaagctagtgccgtccatggctccgatgagtcctcggaagagccattggatagtgaagaagttgccaagcagaggtgttccaggacctccgcaaatgtttcaccactggttcctaatccaatttcgtcagggttatccgccagactaacagcttggaaggccagggcccgattgcctgatattgttattcca

SEQ ID NO: 3120 - DNA, 2033 bp, Cannabis sativa
ttataatgggtagcaacttattttaacaaattcttaattttctttcatttctaacaatttttatacttttttttttttcggttaactaacaatttttatacttgatatccccattttatctttctagcacttagttatgaaatgtaaatcactcttaacaaaatggaaactaaactacaagtcttcttctaatgcaaactactcattttttaaaatataaaccacaagccttctagagttataataagatatttaaatattatttattttaaatagataaatatattttttttgtacaaataaatttattatagagtttttagcttttagtatagtttcttcataaattttttaataaattgtttttaaattttttaccaaatattttcttatcacaatttttttaaaaaataacttttaactttgaggatcatagaaaaaaaaattatatcagtgattaactataataaaaagtgaaagcagagtattattattagacatcaagttatttagcgatattctttaaaaattattaaattatatagaagtatagttaattggactaataatattgacaactggtattgccttttagcactacgaatcaaaacattcagctgacattttgtcaggaatcacagcccctgcttgaaacatagcatagataatcaaacagcataacaacaagtacacttgactttgtttctttctttatgctctgtaagactataacggtaattaacaataataataataataataatgaattaatgataattctattcacaactttcttctctctactctctattattaatattaatcacccaacccaacctaaccgttgaccaaccaaccacaatctaatcattataaaattaacaaatagtcatcacacgtcagcaggagcagcctcatcaacaatggttatggttgttccttttcttaacttttccaaagcagccttaacatgagtctgaatcgactcaagccgttttgaataaatctccaaacccctaatcttctcttccctccatttctcatccccatttcttcttcttcttcttcaaacgacgccgttttcaatatccatttctctatctcataatcctgctgactcagcatctgatcattactaccactaccgccaccacctctgccactccatatcttctgtgaaatctcgaaaatgcccctctcgtgcggattcctgaaccggaaatccacgcccgagttcttcaacttgctaaaggttatttggtactttctcctcattctcctcagcttatcagccagttggttctggttgaatcggccccttaactcgggcttaacccggtcattgtagaacgagttagccgttctccggtgcggaccgagtttccgagttacggtgtagtcgaggaagctctgtaagagctcgatttcgtcctcttcgctccaaactctcttttgcaaattaactttcttagcggccgccgcgtttgggtagtaatcgtcgtcgtcgtcgtcggtacggcgtcgtttcgaagtggagaaagaaggatcagcgtttcttgtaacggctacggtaacggaatcaacgccgtcgtaatcgtcttcttgattgtgatcatgatcgtcgtcgtcgtttgttgatttggggtcattaatgtctggttcgtcaaatatgtcttcgttgtcgtattcggaggaggatgtggacgaagacgaagaagaagataaaagccaactgacgagtggccaagtcatgatggtctttttgtcaatggagaaagaacaaggtctctccttcttcttcttcttcttcttcgtcttctctcctccaatggctgaaggaagatggagattggagattgtggagcttgaaggagagaattgatataaattatggaggtcattggagaaacaattaatgggttgattttaattttgatggttacagaggtacggacgccatagaaaagagccatttttatgtgtccgataatgactgctgtccctcagctcaacaatctttttttttttttttt

SEQ ID NO: 3121 - DNA, 927 bp, Cannabis sativa
aatcagttggtgagtgtcttgagttactgctggagctgtttggactgtgagtaataccagtaggtgaattttcgagaaaaccagaggaaatagcagatggatcagtttgcattacctggttttgatcactagaatctgatatggtcaaggtgtcttctccaggaacttgagatgcagctgcttgtgtcccagattgctcagagtttcgaataccagaagagttatttgactgaaacaaagctgaccaagatggaacactaacacagatggatttttctggctgataattattgagaaaaccagtcctaaatggaaagtcatcttcattaaagatgacatttctggatatgtagagtcttccagtggagctaaggcacttgtagcctttgtgagcgtcactgtaccctagattaacacacttcacagaatgaaattggaatttgtgtgtttgatatggtctaatacaggggtaacaagcaactccaaagactttaagaaatttataatcgggtttcctgccataaactacttcataaggagactggtttttcaaaactgttgtaggcagtctatttattaggtacacagcagtttgaaaagaatcccaccaaaatttcaaaggcatgtgagcttgagcaagaagagtcaaacccatctcgacaatatgcctatgttttctctcagctcgaccattttgagctgaggtatggggacatgagtgttggaaatctattccattttgcacaacacattcagcaaaggattgaaactcacctccccaatcagttttgagagctttaatctttctctcaaactgattttcaacaagagttttaaactgaacaaaagctgaaagagccttattcttggttttgagagggtatatccaggtataccgactataatcatcaacaaaatgaatgtaaa

SEQ ID NO: 3122 - DNA, 1272 bp, Cannabis sativa
taatatacctgtagacccatattctaaggcctgctgtaatgagcttcttgtatataggaagaacagatggcttggaatcaatccactggctaaatatattgtgactgaaaatcaattaagtaataattaattaaaacacatatataatttaaaattatgaaattaaaaataataattattaattaattaattacttgcaaatggtccaatttctagggtgaacaccatcagtgacatgaagagctttttgaacatctaatctgttgtaaaatgctttagcataatcatctaggcatggatcataatatccacccaaaatcctaggcatctgcacatatttatttataatgtttaattaatatatcaaataatataattatatagtaggaatattattttttgtccttactatgtgactgtgcatattgtagttatatcgtagatatttcatctgtttttgaaaaatttaaaataactcgtagtatcgaaaaggttcaaacattcatttgcactattacgatgttaaattattttaaatttttaaaaatttataaaatattttaaataactacaatgtacactgatacactcctttcatgtttctttaattttataaacgtgtgaaatagattgtttgaatcctattttttatattgtaataaactattctgaattcaagtctgaccttggacataggcaagctagttaagcctgtgcctaggacccacctagtccagaggcctaaaaaaattctttttaaaattacacatttttttattaattttgaaaaatattatttttttaaaaataagggctcaaaaataaattttttcttatgatcccactatttttaaacattagaaacacaacaaaaagtgcatcgtagaagcaccctaattagtaattagggttagataagttatttaaaattaccatagtagaggatcttttgatggtcatgatttgatagagagaagtagtagtattattagtagttgatggtgagtcatgatcatgatcatgaggaatgcaaagaggtgtgtagaggctgtaaatatcaatctctttatattgtttgagtacttcatccacaccattggtacaatcttcattatcccaagtcttattgctattgaaatcacatttttcctttattattttgtgagtttcatctgatatcactgcatggctccatgcataatccacaagccctttccaatcctcagcatcacttgtttcaggattacccaactgtaaaaaaattaattctac

SEQ ID NO: 3123 - DNA, 1107 bp, Cannabis sativa
taaaaaagaataggctaaaaaattcttctaatgagtgcatctatagatctagagtgcattatagaagtatcttatatcttttattaattaaatatttttatttttatttatttttattttttattttttgagagggttcatttgtagtacggatttcttcttcttcttcaacacttcagatctcactctctgcaaataaaaatccaatctttcttctttcttcttcttcttcgccctaattttccaaattcaactctgaataaaaaccccaactttccttactctctactttctctccccaatacccatttccctctccacaatcccaatctcaagattcaatctttttcccctctcttgatccatttcaatggcttctcctggcaatccaaatccccaatctcaatctcaaccccaacaacagaccttcgatatgcaatctttctttaaacccacaacaacaacaacaacaacaacaacaaacccaaattctcaaaaccctaataataattcttcttcttcaacaacccatttcccaattccaccaccatcttcatacccaccaccttcttcttcctcctccgccgccaatttctcttacccacctcaaacgtcgccgtttcaccaccatcaatttcagtaccatcatccccaactccatcaccatcatcttcctcctcctcaacaccaacaaatcccatactctcttgaacaacaagctcatcaaattcatcagcagagatctctctcttaccctactcctcctcttcaaccatctccttctcctcctcctcccaattcaggtgcacgaatcatggctctcctcagtgcttctcctcctcctcctcctccttcttccaactcttcttcttcttcttcgccaatcattgaattgccgcctatgattccaatgggaattaacccaactgggcctattcgaatgcccagcagtaagcttccaaagggtagacatttgaatggggatcatgttgtttatgatgtggatgttaggcttcaaggtgaagctcaaccacagcttgaagttagtccaattactaagtatggttcggatcctcaactcgttttgggtagacaaattgcggttaa

SEQ ID NO: 3124 - DNA, 1228 bp, Cannabis sativa
taatttttttaaatcttagttaaccttcattttaaaattttgctaaatgaattatattatattataccataactaattagctttcaaaataattaaaaggtatataaaataattagtatataaaaatagtagcttattatattacatgataattcattagtttcaaaaataatttttaaggttatctaaatgtatcttaaattataagctaccataatataacttaaaaataactaatttattactaagatgtatgcaaataagttttacaggtaactaaaatgtatctcaaattatataatatacaaataaagtttttttatgtaaagttaactaattagtttcttatcaatactattagaattagtaatcaaaatattacttttaaaaacacaagaaaataacaaagaatacgttagatttagttgacgtgacgtcaataaaaatagtaactttattattataaattagatgtaaaaatatgtatttttgtaaacttcccactaatatatttatttttaattttagttttggccattaatgaaataaggtggtattccctaagttaatagtcacaaatgttgtaaatttgtgtgtgtcaactcgatctatattttttgtgttttttaaaatatggataatattgtgttgtatcaaaatttttaaagagtagccctatagatcttgtattttcatgatgtatacttggactggcttactttttttaaaaaacagaccaacttttttcgtatacaaactcaaatttgtgttctactttttcacattttttttaattaatgagctaaattactaaattatatgtatttttttttatataaatttagttatttttatataatttttcaacaatattttaaagacgctacataaaaaactcaatagaattattagaatttgaatacgacttaactaataatactcaaattttaaaatcacactctacaaataaattaccatatagttttagctttacattttttttaatgtttttaattttagaattataatattaagtgttatatttgaattttttttttattttatttataattgaataaatatatttattgttattattatttgcaaattataaagtcttttaatgtggcatgctttcggattaatttatttgtgcttacatatagtgccttttagatttgtcgcttcgtgcttaagcacataattttgtgtcttatcatgccaattt

SEQ ID NO: 3125 - DNA, 726 bp, Cannabis sativa
aagacaagtattgaaaagcttggcaaacaaccggcttgggacaaaatgcaaagttaccaagactattgaaagtatcatatctcatacattatacaaattaccgactatagagaactcggccatgtgcactaaatttagtaagttcaaccactacgttcacttactagtaaatatgtaaacatttgatataggtgaggaaaaaagaaaaaggttttttttaagtgctaatcaaactagatttcagttcactccaataacagaacctcagaatttaatatctacgcaaatgtgcccaagtgaaaattacataccgaaagacaatgcatcagtgaaaaaaaaaatcagtattagtagttgcgttttgggggtttcacataatgacataatagcaccccaaacgaaagtttatgtagaaaaaatggtaccttttctcgcctccagtgtagtattcttgtggctcatcgtcgctgccagacccatcgttggccggccggttcagatcagccagagtacggatgccacgtgaacgactaccggaggcctttttatcagccttcttgtctatgggacgcctcgatcgaagctcgtacggagggcgggacagggtcggcgagggtgagcgagaccgcgagggcgaatgcgagggagagtaatcaggcgaaggagagcggtttaacgttgggatagggtgagcagcggcggcaacggcggaggcaggaggaacgg

SEQ ID NO: 3126 - DNA, 1720 bp, Cannabis sativa
aaaattagtaaaagatgatatactgtttattctgaaaattaaagatgaaaaaccccatttcttgtctcttgaaactccaccgacccttctctctctctctttacaatttttgttttcaaactttgaatcttgagaaatatttggaaattgaagaggatttagttgtaaaatgtgtcgggttagcttggaggagtacctaacgtagttgtaggaaatttcactaatatccttacacaactcacacacacattaattcacaaggtcaatgttgacctttcttctttctgaatgaatgaacataaattttacacatcaatttgtgttttatgttttgttttattcttttaactttaccaacttattttgtctgaatagatcttcaaaggacaacaagaattagggttaaattatcaagagtggaactcgaaaggacaataactatgttcttgagaaaatgagaagataagagaaaataaatacagagagattttacaaggttcaccaccaaaatttggggctacgtccttggtgagctgcctcatagaagaacagtcacaatccactatcaagatcagcaattacaccaagttttagagctccaagacacattgaacaactagtagctcattttcttcatcttaggtatgaatatctctctctcacacacttctctttctctctggatcaaactaattcaattacttttctctctctaactctcttctgttcttttcttaaacacgagagtaactctctaggtctaaacctcctagatcttcattctctggtttaaggagttgtgttgaagttgtaagtcttctagttctatttttttttgtctatttatagagattgtgtagctgagtaagttagttaggagtaactaactaagtcttggttcttggattgtaaaccgttaggttagttaggctttgacttatattttaactaacagttttaatgctaattgtgacaggtcaacttatttggggaattatttcaacaaaatctacctaattcctcatataagttgatctatatcaacttgctcttctctaagggtcctagctcttatctcctttaagtctttcctccattgtctactcctaacaaacccatgcataacttgaatttgtgaagggtaacaattttagttcccatatcagcagggttttcttctattggtattttctgtacagaaacacactcttgtgtcaatttatatatgataaaatggtatttgatttctatatgtttagtcctgtcatgaaaaactgggtatacaatataatttctaagggatctcatgggaacatcatctatatattcaaaagaatatgaaaaatggaaataaaaattaaaataaataaagtaatctgggtatacaatgtaatttctttttaaacaatttttaagttaccaaccaaacaagccttaaaactttagtaaatatgttttcattttctttattttttttccttcttcatctccatcgaagatccgctcctccactccttctctcaccgtcatcatcacaacctccatcaccaccaccatcactactccaccactactgccaccataaattcaaataaaataaagaacaaaaataactaaaaccataccattatcaccactgccaacattaccaccaccacaccataccattgtttcagatctgaatcaagaaccaacaacccaaagaaaatctcaaaaagaa

SEQ ID NO: 3127 - DNA, 1540 bp, Cannabis sativa
atcattcaagaagctattggaagagggtgaattgtatccaattgaaatagagattatgtcaacaccatcacggatggcatcatctatggcttttaatatagatgctgttgaacaaccagtactataacacaccttatagctggcaatccttgctgatggtgcaccacctcttgcactcccattgcctaaacccatacccatgtctgaagctctgggtactacaccacccgctgtgatcgacgacacatgtgttccatgcccagttgaatcccttggtgtcatttcttcattcctcgaattttcaggaagaggaaggtagtatcttgcacctatcaacttcctatatttatataggtacaagtcaacaaatataatcaaattatgtctacaacaatatcgcatcttagtcctaaaatttagtgggctatacaaatatgtaattgggctctaaactaggtacaggtttaatccgcttatgttcaagacagatcctgtctatatatatagtatgttatagaatatacatgtataatttaaataaattaaggcttaattgttttatatattgaaatataattttgttatatacctattacaattggaggagggattgaagtctgatgcactctcacaagttcccttccattttgaaggtattggccctattcctttgtcgttgaaacttttagcctccggccagatccctaatcatatatatatatattcattaattttttttagcaattattattgtcatacatatatatatatatatcattatcatgtaaattggtgtgaatatatattgatactgcattttgcattatcattttagttcaaccataaataactataaatactttttatgatctaaatagcatgcataattgcatatgcattaagcctttataattattaatttaataataggcgacatgcaagtttttaacacataagattatatattatttgtggagttaattaattgtgttatatttttaatgaatggttaattagtgaagctgttatatatgtattaattaataattagtgtgtacaagatttatatacatgcaaaataaacaaatttttttaatcatctatgtgttaataagaaatataaatatgtttattttaatgaaaaaaaaaataactaatattatgtagatgtgtgaccatagacatattttagtggttttacattttttaattacaaagaagaaatttcaagttctaatctctcctctcctagtacccatacccaaaataaaagtaaataaataaacatggatcgtaggtaaaaaaatgtataaacccaattaataaaaaaatcagaaaaaaacttaaaacaatataaaaataggatctttattacataattaaaaaattatttacaataataaccttacacaaaacattattaaaaattaaagttcgacctatagtgtattcaacatagtcctatataccacgcattaaattataaaatcagaactttaaaagtaggtgcactttttcacgttctctctctctctctctc

SEQ ID NO: 3128 - DNA, 1688 bp, Cannabis sativa
  modified_base (1236)..(1237): a, c, t, g, unknown or other
cgaggttgtcaaaaaatttgaacatctccgatcgaacttggacatttctttctttggaaaccaatacaccgtcaataaaagcaataagcccaagcttgtacacgtcagctgctacatcgcatatcttcaattgaagcaaaagtgtatcaaattgcacatcactcttcctttcaaaatacatcatcactaaatggtcgttagactttgcttctatctcttcatttatatggtcaatacccataggtaaggaagtaattagtccaaactgaagctgcccgaatctcatgtcagctttagcaatataaaactatatcccatcctcgaattctttatcaactttcatcttccacaggagtaggttgtggaccaaccctctcaatcaactttagcccttcaaacttggccttaatatctttaaacctatttgatcccttataggtaagacgacctatcaaatgctcagaaacttgaagcttaagttaaggatccatctgcaaaatttaagacaaaaaaataaaggaattattaaaacacaaaaaaagtgtcacaaaataaatcgcaaatatcccagaccaagtttccacgtatcgatagtaatcgctaaaacatacacataatatgttagaaataattccaatggcatatgtcatgacatgtggacaaaagtgttgccacatgtcactaaatatagcaaggcagggagaaaataatcaaaagacatcaaaattgcaaatgttgtctacaacatatagctacatgtccctatattgcaaactatgtcgactaatattgttaactataatagcttcctattctaaggttaatggtatcgtcaaaagttattatatgtcgagaagcattgctgactatatctacttgctatacctaaaattcagctataatttcagtggaagacacgtgtcaagataaaggggatagaaaaatcatacaagaaaggccctgaaaaactatcataaatctaataagattgactcgtggactatgaagaattataactgtaaaaccatgtaaaaaatccttttcgatcatatctttttattttacagcttttattttttctgtgtgagactgccacttttaggctcaaatttggttaacgaaaatctgtgtttacagtttggtgctttcattgagagccttcgtaaaaaaacctcaaaaaaaaccctcatttcttttgaagaaaaaccatttccttcatggctgaaaacccagaanntattaatacaccacatgaggaaacacatcgccgttctaggaaagagcccatgggcaccaggaggtcttccaatccacagcctagacggaccccctgctcaaggaggactcaacctgagggtggccctagcatgcgaaccacgcattcccgaaggacccaacttgacgttggtcccaggacgcgaacaacacgctcgaggagaactcatagtgagcatggccgaaatcctagaacttgggatgaggggcccattcgtggaggtactcagcctatgggagaaggcacttatgaaacagaaaactgtcgccttagacgccgcctagaggaggcacaatggcagaacgccgagttagaacgtgatgcagcctcagccagggcggcgcaggggactaacgctcaaaatcaatctgaacctggagtcagaagaccacgaggcaggccttgtagctca

SEQ ID NO: 3129 - DNA, 1153 bp, Cannabis sativa
atattgagtctttagtgacatgcaatgtgtgattctaaacacttttagagttgtacagtacgagtcactatatatttatattttaaaaaataaatagataaataaataagcttttagtgacactccaaagttttagtgacccgcattatgaaacataatgtaaattttttactgacacgcaatgtgcgtcactaaatatcggttaaaacatttagtgacccacagtttttgtgcgtgtcgctaaattgtgtcactaaatgtataaattgtagtagtgaagagttacagtatatgttatattctaagagagagaaaaactcattcgcaaacatgttagctaagttggccacaaatcataaaatcatcgaacacggagtattccctgttggccatttgaagaaatccagcatcaaagtccagggggtaaatgccatagcagataactctcattcatggatggcacctatttacaacttcttaagtacgggggaacttcccgcatataggtccgtatctaagaagattcaatatcagaccccacactatgtgattatggatgggaagttgtaccgcagagggttatcgatgccatacctaaggtgtattgttggaacaaaaattagtgcagtggtccacggaggtttctacagagatcaaacttctgggcccagcctttttaagaaaatccttcaacagggatacttttggcccactatgaagaaggattgcatggaatacatgaggaagtgtgaacagtgttagagatatgccaaagtcccacactccccaccgagatcacaatgatgagtaggccatggcctttcacaatttgggggattgatttagttggatccctccccacgggtcaaggaggggtcaagtatgtgattgtcgcggttgactatttcaccaaatgggtcaaggccgaaccaatgaacaccgtcacctccaaaaaggctttggattttgttaccaaaaatatcgtgtgtaggtatggactcccgtataagattgttttgaacaacaagatacagctcaacagcgagcacttcactgacttctttgctcagcatggaatcgtgaaaagcttctcaactgtagcccggccacaggtcaatgggcaagtgaaggttgtcaacaaaatcctgaaaac

SEQ ID NO: 3130 - DNA, 992 bp, Cannabis sativa
aattccagatatgatttctccgttttcgaatcatagtggccgcatgaaagaaacgggaacttctatctccgagtttcagccaaatttctctaaaacgttgtcgccattgactctcttgttggctccaggcaaatttaaggagttcatgtgtttcggcttcctccttacacctgaggtcattaatgtcttggttctgaagccatctcaatttaccttccaatttccgaatggtctcctcaccatcttctaaagtagtctttttccaaacttgtaaccttctccttgtaatgtccacatttcgaattaattgaaagactccagggtctgattgatgccagacttgattcaccaaatctccataagatttatgtgaggtccaagcttcatagaatctgaaaggagtgaattctttccttctgtacatagcagtgtcgaggaggataggtgcatggtcaaaatccgtaattgggagattaagaactcctgcattcggaaaagtcaccacccattcgggtgaacctattgcccgatcaagtctttctctgactagacctccagaaaatttgttgttgtgccaagtaaagtcgcctcctttgtatcgcagatcaatgcctccagttgaaaataagaactcattaatccaactatagtttgtgcctctcgacttgcgccgccccaatttctccaacggatcactaatgcaatttaggtccccaatgagaacccatggttcatcacagcttttaattatggtatcaagattaccccagaacacctcttttagataactatatggagttccataagctgcaaaaatgttccaagggcctaaagattgctgatcatgaacaatagcttggaacatatcatctccaatccatttaacttgaagattaatgtccctattccaaatcaaacaaaagccacctgcgatactaatagcaggaatacaagcatactctgtaaagccaagacttctagccacctccacc

SEQ ID NO: 3131 - DNA, 1450 bp, Cannabis sativa
ggcacaaaacccaacaattttttcaaagatttggacacagaagtagttaggagtggagagatacaaattggccagattctctgttatatgggaaactcaattgttggagggggagaacattcaccaattgaaggatagggtgttatgttggaatgtgaaggggttaaacagctcttagaagcacaaagaggtgaagaaattcattgcagaaaagaaagttcagctagtttgcctccttgaaaaaatggtcaaaataaagaatatgagaattttataccttttgtggattggtgcatcacaaaaatctccttttaacacccgaatggtcgaataatcattgcttagaatccaatttactttgatttttatatcaaagaatgtaatagtgaatttgtttactgtaaaatctctccaaaacatgttgtactcatgatgccacctttgtgtattcattcaatgagagtaatggtagagagctcctatggaaaattttaaaacaaaaggcttctatggggcatctttgggtcttattgggggactttaatgatattatggaacatgaggagaagataagagctaagaagatagcttaagattataagcatatgaaataatgtatggatgattgctatgtgcaagatattccttattcttgttgtttttatacttgaaacaacaaacaggatagctctactcgggtatatgcaaaattggatcaagttttagctaataagagttggcttgataatttctctattgctacaggaattttttttcccaaaggtgattttgatcactcccctgcacttttgcacttttatctttttattctactaacaatgatggagcaaaaccttttaggtactttaatatgtgttataatgtccctgattttttggatagagtgaaagttgaataagtttctctaatccaaggtaccgccatgtttcaactttgtaagaagatacaacgatttaaaaaggttttaatggagattaataaagaatgttttgggtatattaaagccagagcagttaaagccaaactgaagttgcaagattgccaagtaaggcttcatcaagatctttaaactctattttaattcaagtagaaattaattccaaggaagaatatcataggacaacaaaggatttacattgctttctgaaatagaagtaaaaaaacttcttggaatcaagatgaggattctagctcaaggctatttcattcaagcttaaagctcagaagaaggaaaaataatgtgtatgcaataagagatgattgaagggatttgaaagattaccccgtggaagtaaaaacatcatttttagacttttatctaaatttactcgattcaaaattgctatacaagagaaaacatctaaaaaattgatgcaagaagcgccagttctttccgattagcagaaacaatttcttaatcagccttaca

SEQ ID NO: 3132 - DNA, 1302 bp, Cannabis sativa
cgcggcatggaaaaggcatgccgcgacatgccccattaaaaaatccaaggcagagaccaactcgtgcaagtcaatttttttttagaatttcttcttcctcttcttctacaaaaagccagcctccaaacccaaatttcacaactttcaaccattttaatccaaatttcttcacccaatctctactataatcatccacaaacacaacccattaactaatttattcaaaaatcacccacattccttcaattcacccaaaaaatctttgaaaaaaattcaaaaacctaaaaatctaaattattgtgttcatcaattaatttttggaattttttggtggaagaggactacttcaagtgcaacaaagcttttattctacaagtaagtattttttcccgctaaagtttagtgattgaagagtaattgcttgtggattgtgtgatattggcataattttgtttgtggagaattggatattggatactgttagagattattagaggtgaattgctgcttaaatttagtttgggaaaactgagaaatataggagaggtgctgcccaatttttttcacaccaaaaagtttatattttgactagttaagtggtatgccatctaggtctaggagaactgggtcctgagcccaacgtaatatgcaaggatcatcatcacgagatcataatccttaagaagaccaacctcaacatgtgaatagatttatgaatgaagatgatgctaaaagatatgaaaaattgaaaaagaggagtgtacttcgggagaggggctttgaattttaggaagaaccttttaaaagggaccgaggttataagactattagagatgaaattgtgagaagacaatggtagaagttgtgtgctatagagcatgtgggtgaagctaattataatattgtctatgaattttttgccaattatccctacaaaggagatataacgaagtctatgttagaggagtgcatgtgtccatcacggtagatactattaacaactcctttaaccttggcacactgggagaagggaaagatgaaagaatattagcattgagaagagaaacccttactgatgaagccattgcaacagttctggggcaagatgggacccgattgcatgttgaggggaaccagaatcaaaagtttctatatcagtggcaactcaatttggaggccaaagcttgggcatatattgtcaactctagaattatgccgacgtcacatgcctcaacactagactatgagcgttttttcatagtttatgctatcatgacaaatatgacattcgacattggatgg

SEQ ID NO: 3133 - DNA, 1381 bp, Cannabis sativa
catgaatccagtgcccatactaggtactgtaatagggtgcatctaagatgatattaccaataaagcatatgtcttaaaataactcgcttcacagtgagattcactttaccatgtgcaagtgaatcgatcgcctcttatatcaaaaagatgttgcaaagtcatctttaggttatgagttccatcgctaagttatgggccctacactactagttgaatagggcattaaggcaatgtggatcactttacctatgtcttcatgaaaaatgaaaatttgcaaccactacttctctttctttcaacttaactcgcaagaatataattgtatttaattttgatgaattaaaatgttgagaaatttttttgttacttcattaatattattcaattacagctcacacacttgatgaatctctcaagccctgagtaaagcttgtagagttggtcttgagataactttggttatttcttttatgagttttaacactccaaacctgcaaatctctcaataagtggatgagtgctcacacgtgtaacatttccctaggagtcatgatcaagaaggcccaatgggattttgttttgtaagggaccaatgaatgaatttcttttaccacttggggggtacataggatatgcaatcgtatacaagagccatatcttacaagagcattcaaaaaaaaaattgcactcctgtgtaagtattttcatggtaaagataacattaagaaacattgacgtaactccgagtaatcaagtttcttaagacatagaataatgtgcaagtctgaatgaagtttttattaagttggaataatttctaatttaattcaaacaagtctgacaacattttactgaggcttattcacactaaaaggccgcccagaacaatccactaacacactaaggataaaaactaaaaagggaaaaaaaattaggactaagacagtgccctacgtagccaaaaagctatctaagtcaacaatagcttcaatttgttccccgttctctgttggtggcgcattagtaggaggaggaatttcacgatgcttagggttgaagctttcaaccctggtagcttttcgaccattggttcctcaccattcaagataaagtcaatcctttgaagagcgttgtcattaaaacattgcacataatgctctatagagaatgggactttttttctgagggaaggccattcatttgaatgatttttcaccaccattggatgaccaggcacgataaatggcatcaaagcataagccatcatagaaggcaacatcagcaaatgctttcttcaccaactcagtcacttggtttcaaggccgttaagttggtcgtctagctgaacactgcttaaagaattctcatcaagtgattgaca

SEQ ID NO: 3134 - DNA, 1362 bp, Cannabis sativa
cgtggcttgggcattgttttaggcttgcccatgtaattggccattttcccctacttattgtgcgcgtaacttgcaagtggtctggctcgaatgagatcttcaatttctatattcaaggctttgcatttgttggttgtgaagccaatatctttgaggtatcgacaatactttgaggtatctcaatttttcctgattcctttcattgactctagaacactaaaattcacagtttgctcattggtgaggaagatagtttttggcatttcggtcaactctgtgaagatggtgtaaagagtttggttagtcctccatttcttagtattgttgtggtccccaccatggtcatttttcctcttgttggaagtgttcacattggaggggttatcattagctgaagtgggagtggtttctatttctctagatgaaagagaaaggttattagccaaccttgctcctcctaattgatgtatttttgagctctttttatgaactcatcaatagtgcgagctccctttcctttcaaactattccaaaattggaacccattagtaattccttcccccaatgccataagtcttctactatcatcaacatctctagcctttgaggcctcgacattaagcaattgatataagcttttaagctttcacctggttgttgcttcacattggcaagggagaaacattttaactttctggccttggcagcgtagaattccttcttgaagtcacgtgagagtttgtcccatgaggtaatagagtgcatcttatatttcttgaacgaagtcttggctgctccactaagtgttacaaggaataacacacattttaagttaccaagtacttggtaggcgtgcataagtgtgttaaagtcacttatgtggactctgaggtctgtactaccatcgtacttgattgtggttggcatcttgaatccttgtgggtatggaaaggctaatatttaaggagtgtaaggctctggctcctcatccaaatcatatatggtggcattttgctattggctaccatcaattattgtaacatttattccaagacattgagcctagagtcattagctcgtccttcttcactatgttcagctagggggatgtttttttgatgtcccccattgatgttatggttgtcatttgctactggtggaattgggttttgccttctattcaactgttcccttaaatcatgttgtctttggttgaggggctctcgcaaatcaggtcttcttacatccctttagagacagtttttgttgaaatgttcataattgcgaggtgcatcaacactaatggagtggcttccagagtcagatcgaccactaccctcagcaaagctcactgtcctttat

SEQ ID NO: 3135 - DNA, 918 bp, Cannabis sativa
atatatatatatttgatatttgcagtgaccttaacaagcgtttgcctggcccccatttcgatccaccctccaaagatgaggtccgagctattattgaggtaatgggttcaatcccaaatgttacatatttgtgtatattaatgagtaaaggtcaatttttttcatgtgggttcaatcccaaatgttacatatttgtgtagattaatgagtaaagctcaactttttaatgtgggttcatctagatatctatttcccaaataggaattttgtaattcttcatgaacttcaaaactgggttgaatctttcctatactttgttctacctgccaactctactgatttctgactccaacttgagaattcgttcttttctttatggttggttggttatatgtgattgatgatggtaactagtgactagccttctataatcaaattatagtgtaacaaattggggaaagttatcatatgagttattgtgagacacataattaaatcaaacaaattttgaacataatgtaatgataatgatatgtgaatgtgtgtgattgtggtgcaggagtgtgatatgaacctagatggagaaatcaacagtgaagaatttgtaaaattcattaagcggctcacagaaaacacattcatcacggtgagtcaaggactgatactgacattggttgtggcgcccacagtggcattggccacaaagagggccacagaaggcgtcccaggcgttggaaaggttgttcagaagatacccaattccatttacgcctctctcatcactatggccatagtcatgttccagaaatcacagctggactcagattattagaacagaaagaaaccatttttattcattacttagttgtgaacaaagacagtcagtcaatgatgcaattaccacaacaatataatata

SEQ ID NO: 3136 - DNA, 1382 bp, Cannabis sativa
aaatacatagaacaaacatttcttgtttttggtgactaacatttcttaattcactgaactgatggaatcttagtgtattattacagcttttgtaggtggtggtactttgttattattttgtcaacttagaaataagatttctatattcatttgagacacatgaaccaatgattggacatgacaataaaagactacattatacctattccccgttgtaattgaacagcattgaagagcttattaaattatgagacaactaacctcacatgagaaaataatgcctttgctataactagaagcatcgaagaaaacactagaatattggtttttgcttgcaattcagaagaaagtgtcctcaataattccaagacccttgctttagccttggcacctgcttcatggtacctaagggagaaaaaatatttaccatataattgtatgtttgaaaaacaattagagaagcttaattaaggcacacaaaaaacaccttgttaaagcgtcctctacccttattgtagtaaaccactcttctccaacctttctgcctttcgaatctaaagctggtttaagatttttaatctgttcctccccaggggtaccagcccatatagcaggcgaaaaccgtttacccttaaaccaaacagcctcatgttccctagcatataatatttccccctttgggccaccaagtggggctgtggtagcctttattcttgtaatgatgggcatgaaagcttcagtaacctgccaaaaattgagcagacagattaaggaaagtgaaaaaacacgaccttaacacaacactcaaataattttttagactggaaaatgcatatttcataaagccatatatattttttaaaaaaaaaacccaacaaaaagttcacctgaatttaaaaacaacaccactgtccagggacttccatgaagtttcaaagtaattaatgtagaaaatcagataaatcatgagatgtttatagcctacataacttttatatttaaacaaatcattattagggctagttgtatgatataagtctactggatgttttccttatttttggcttatctctcttgtaggttctcctcatattcagggattgttatctaacactatgtctataaataaagttgaaatcctgttagatataaaacaataaagtccaatttttcaagcagccttcctatttcgtttacaactaataactctaagtgaaatttgtcctgaaaggaagcacatgaaacttctagtctttataaatgcttaagtaaggtggatgattattgtttaaaaaaacaaatgcaatttaaggtacattgcatttgcataaatcattgagataaactgtaacaggtgaaattaaactctaaagactcacagc

SEQ ID NO: 3137 - DNA, 1875 bp, Cannabis sativa
tcaaaggtctttgtttttcgtctaagttcatcaattggatcctagtttgcatttgtgatactttatattctctaatgctggtagtattcatggttcttaccaaggaaaaaaaaggtcttagataaggggaccctatttcccccattctctttgtcattgtgatggagtactttactcggttgctcattcttgcgccgaaaataaagggcattggtttccacccaatgtttaagtctatgaatcttgttaatctctgttttgtcgatgatttggtaattttttgcaagggcaacactacttttcttagaatcattcatatggctattattgagttttgcaaagctactggtctctctaccaactttaccaaatcctccatttattttggatgtatttatgaggagacaaaacggtagatgctagacatgttagtatgaaagagggcttgtgatcgtggaaagcttctgatgtgggggcattgttgataagattcataaaagcttcatggttgggaaagccggcatctctcgtttgcgaggagagctcaactcattcattcggtcttgttggatatccataactattggatgagtatattcatcttgccccatgaaggtaactagagatattgaccagctttgtagaaattttctttgggggagcacgagtaagagaagaagcaaacttcattttacgtcttgggaaattgtttgtttaccaaaagagtataggggcattggttttagagaaggcaagaaatggaatgtggcacttatggctaagtgtatttgggctctagctaacaagcaggatggtctttggattaaatgagttacgtccatttatatgaaaaagaaagattaatttctatgtttgttgtccaaaggatgctagttggtatttccaaaagctttttaatctttgagataagattaataggcaaacgttgtttgaggtaggaaagaggggggaatttaatgccaagaagttttataactctttctactcgagctcgaaagtttcttatcacaaagatgtttggcataggcttaaggttcctaaacactattttattttgtggcagatgttcaatgagaagttgcttactcatgatcttttagcaactattattcaagtggactcgcttgcttatctggtttgtgtgctggcctaagaacttcactttcacctattttttgattatgttttctcaaaaaaagtgatccttgatatcaattgttggctaggtcagtttgatggccttcaaatttaggagcttggctgaataggctgaatgaaccgtgggttggcttaattgacagcattttttcaacggtagtggctgctactgtctactacatttggtgcaataggaataattgtgtgtttaatgatacttgtgattcagctaggatcattagtgttatggttaaaaattgtcttaaggttagagtgaattgtgtaatgtgactaagcttaatgctaaagaaagggatgtaatccttaagatcaacaatctttgaggttgtgtgggttcttccatgttttgtattttgtttgatggttgtttgaataatcttatcttttctttattcaaaaaagaatgtaaaacttaaattatattaatttatttatagagtttaataaaattttattttttaataattttaattatttgttatatgattatctgtaaaatattattgaaaaattacataaatataattgaaaatataaaatatacatatcgtttagtaattaattcattaattgtaaaatgaaaaataaaaaagtaaaacacgaatttgaaccaaaatataaaaacggactaacttgtttaagaaaaacagattggcacgaaaatactagggtcta

SEQ ID NO: 3138 - DNA, 1048 bp, Cannabis sativa
gagttttttaaattttacaggttgatcgactcggttttgggcaggttgactgggtcgggtctgggcgggttgaccaggtcgggtctaggaaagttggctgggtccgaaacaaacccactcaaaatctccagtcctaatagtaatagatgtatctggtttggaatttttttgttgaatttgttgactcaagaaagagaccaactgtttataatgagtcatgaggtctgggggaggattcatcagttagtgtcctaaattagggatgaaatgggaattggatttgggcctggagtagttgaagcttgatgagcttggggtgctggtttagatttgttagcatgattcttgccaccatagccaggaggaaacccatggatgaagtaacatttgtccacaaggtgatcaggtttatggaaaatggaacaagaaggtctgggcttcttgttcctcgaagggggattagggggttgaacagtaggagagagagttctttgcctctcttcttgaacaaccatagcacactttggaaattgaaggtaatggattaagaagcaaaatttgaacacttaccgaattgcatgattcattgagtccaatcaagaattggagaaattgatccatgttgtaatattcgtgtaatttttgaagagcaccacaggtacaagttgtagaaggtcaaaattccttcaactcatcctagaggaatttcagtttggtaaaataggagtttatggactgatcaccttcttgaagactaagaagttgagccttgagctggaagatgtgaggatcatcgccttgattgaatcacttgatcaaatcattctacatctcagatgcaagattaaagaacgcaatgctttaagtaatgtcaggggaaacagagtgaagcaaccgtgacatgaccatgttgtttcacctagaccaagaacaaaaaagaggattagtaggaagagatttaaggaaggctaccatcaagaaacacaattttgttcttcatagcaaaggccatggttatggctcaatgctaggactgaaaattaggtcc

SEQ ID NO: 3139 - DNA, 1051 bp, Cannabis sativa
aaaaataaaataaataaaaacaaaaattaacttccggacttcaaatctttatccaatccaattttatttcaacactcctttttctattctcattttctgacctaatatttctcattttttctcaaacattttttttcctttctttctcttttctcaaagaaaaaatcaccaccaccaccaccaccgccagacacagatattttcctttttgatcaaacactcgagaacccatttgccttgattgatcatcatgagagaaattataagcattcatataggtcaggctggaattcaggttggaaattcatgctgggagctttattgccttgagcatggcatccaccctgatggtatgatgccaaggtgagattttttttgtcttaattccatttgggttatgtgaaattttcatttttttttatttgggttttgttagaatttggatttgatgggaccagtttgtgtgtacttgtgttactgctttatttcaatggatccattgtttgaaatttgtagagattggttttgagtgttttgtgtattaattgaattattgctttatgtacattgttattgtattatataggaaaaggttgtgattaaagttaaggctgtttaatctgattggatttatatgattagatgttttggttgatatggatctgtattaggattatgttaattgatttgatgaagcttgatcatagtgtttggtggtttctgcttattcatattgaattgtattctaatacccttttggattttataatgatcactatgtgtttggtttaatgtctctaatggaatgttatgcattttttttttcttatttgtgcagtgacaatacagttggtgttgcccatgatgcctttaatactttctttagtgagacaagctcaggcaagcatgtgcctagagctatctttgttgatttggaacccactgttattgatgaggttagaaccggggaataccgccagttattccatcctgagcaactcatttcgggcaaggaggatgctgctaacaatttcgcaaggggacactacac

SEQ ID NO: 3140 - DNA, 3035 bp, Cannabis sativa
tgaattagcatcataattgtaaaagttagtatgttctaaaatcacattataatttcaaaaaattgtgggggtgtggacaaaatttaaatggtgtgaatgtgaagataaagtttaaaactttcaacaaaaatagggagatttaagctattttctccaaaatatgtactgtttagggctacaaagttgctatagttagttagtgtcaaagatttggctttttttaaaagaaagatttggtaggtgaaatccatgtccaagagatacttaattatcctcattcacaagattttattataaacatattgagatatatatttttaggcattccaattatactaaaaagatatgagctctattagggtttattttgccttaaactagtaacataaaattagacataaaatatatacaacctcccacatttagttatttatttttcatggggatgaaaataacattgttttccaaagaaaatgacaaagtctaaaaaaaaaaagctttagagtgccccttaggacatttactaaaaaaaggttttaggctatataagctttaatggtaaactaacttttgaaaatattctatttttaaagtaatttattgattgtgaatttatactaaacgactataagtgacacataattattgacaaagtgaaaatgagtgaaaaataaatattattgacagaagggaaaatgggtggaaacccaaaaatatcttataaattacaaaaattagtaattaaataattattattttatgttcaacaacaaaattagtaatttaaattacattaataactaattattaaaaataataatatcgtgtaattatcaattatgaaaattaaagaatgtaataatgacatttcaataattaaacaagcacacaaattttaataacttttttgaactatactcaattcgaaatacaaaatatattttttttttatttaagcgtttatatattacagcataatctgggactcgaacccaggacctccaatacacacgcaccccctatggctacttgagctagcctcaaatggttaattcgaaatacagaataactatatacaaatagtgatacgaagagggtcttttttaaaataaaaaaaaaaaaaaacactaaattgtgagttttggttatgcaatcaacaataatcctttgaatgagtagatattttactaatgtaatttgaaagtttcaaccttttgtttacaaaaacaaacaaatgacttgtcaaatcttggcatagtagccatccatccacattgagaaattaatggcaaaggagagaataaggcctaaaaagaagcttcaagaaatgtcttgtgttttgtttgtaagttgtttacattgtcactatactatataagttatttgcctttgaaatttggatatttcaaaaatttgaaaaactaaaaagaaagaatagaggataaaaagaaagtggggtattatttgttttgatatgatttgatttggaaatgcttgtttgtttgtttggaattggaccaccacacacaataaaccaatcactttttcaaaaagtagcttattttatggataaggggtttgtttgtgttagtgcacctctcaacgtggcttccctaccttaacacacaaacacacactcctttgtaaaacaatgtaccaaatgtactatttgaattatgatttgggcactatcaaaatttactaattttttaaaaatttataaaatattatatgatacttctgcagcactcttaaaagtagtttattaataaactttttttatttcgaaatctgagataattttttagtttaattattttttataattgtctatctatattatagttatttaagatattctacaaaatattatatgatacttctgtagcactcctaaaagtagtttattaataaattttttttgtttcggtatctgagataattttttagtttaattattttttataattgtctatttatgttatagttatttaaaatatttcacaaaattttgagagattcgaaaaaactcaacacactaaatataaaatttaaaccgtttattacactttattttataagcctataaaatattgtagttatttataatattgaaaaattctaccattcaccccttttaattctacaattagttattataaataacataaaaaatgttaattacaacttcttagttaatcttcatgtctcaaattatatgttgaaatatttttttttcatagctctattcgttataattacaatataattcctgtaaatttttttaaaatttttgaataatttaccttactaaaaatagagtttctaatattgtaatttactactcatgtttaaaaaaaaattaaatctatttttcggcacggtaaaaattattcaattttttaaaaaaattacagaaataatattataactataacgatatcgctataatgtatatttgagtacaaatattgactaagaggttataataggatattcacaccaagacagattattaaatggagatgtgtcctttagctggcttggcctctcatgtgtccgtcgtttaatcactcactgagtaattttatcgaacagttggtggtggtggtgtgtgtgtgaattggcaccatattgctaaagcaatcaaagctttggcacgttgataaagttgtttatcttaacgttttgttcaatcaaatacagatcaatagagtgttgtttactactcaacactcaactctaatattcacttcttaaaggaatcttttttctaaaccaattaataaatatctaccacaccacattgtttttgtttatgacatgtgtcttcttcttttcctcttaacaaaattgctacaatttttttatttttcctcaaattaaaaaaaaaaaaaaaaactcatatttatatacatctaaatatagatttaattgctactattgaatttggaaccctaaacaaattattttcaacgataagttagaagaaggtgagaatgacctgaagtcatcgtccaccttttttttttttt

SEQ ID NO: 3141 - DNA, 1156 bp, Cannabis sativa
atgtgtgtgtaggcatttatgaagacatgggtagcagcatgtaaacaagggacgggaaaagcgaggattgtgataccagcagggacatttttggtagggcctgtggtgtttcaagggccatgcaaagcttcgccaattgttgttgaggtccaaggaactgtcaaagccaccaccgacgttagtgagtactcttctcctgaatggttctcttttgaacaaattacaggcttgcttatcactggtaaaggcactttcgatggtcaaggccccaaagtttggaagttcaacgattgtgatactaaccccgattgccaacatctagctgctgtaagatcgatgctaattaattaattaataatatacatttaattattattattattattattatgttaatatattaattattaatttgcagtcattcaaatttaccgatgtgaaaaacgccgtcgttgatggaatcacatctttggacagcaaatggttccatttttttgtatatagaagcagtaacttcactttccaaaatgtgttagtaactgccccaggtgacagcccaaacacagatggtattcatttaagttcagccactggtgtcaaaattctcaagacgaccatcaaaaccggggatgactgcattgccatagtgcaagacacccatgacgtcctcgtcgatggtgtcacttgtggtcctggacatggcattaggtacgtaagtacgtcacatacccccacatcatcctcgccgattagaattattattaaggctaattatatgatttttgccaaccaatttttacatgtgtaccaaatacccgctcctaaaattttaaggtagttaaaaaagttccatgaactattaagattgttgaatttaaaaatttttgtttaattttagtaaggaaaatctaacatgaatgaaagtttaggggatatgatttgttacacgtcaaagttagaaggatataatttggtagatataaaaattagggagtataatttagtacataaacaatcactgaattagtaaaattgaatgaaattggaaaaaaatccttaaatttaaccatctatagttttgaaaaatttttaacagctgataaagttccgggacgtgatttattacatgtccaggcaaaaatcttaattagcctat

SEQ ID NO: 3142 - DNA, 1076 bp, Cannabis sativa
tagaaactctcgtttcaacacttcctctaccttaaagccttccctcatcatcacccccgccaccgagtccgacgtggccgctgccgtgttatgcaccaaagccactagcctccgcctcaaaactcgaagcggcggacatgactatgccggcgtatcgtacacctctaccgtcccatttgtcatccttgacatgttccagctccgatcagtcaccgtggatgttgctgatcaatcggcttgggttcaggccggcgctacgctcggtgagctttactacaacatttggaacaaaagcaaggtacttggcttcccggccggaatatgcccgactgttggcgcaggcggacacatcagtggtggaggttatggtaatatgattagaaaatatggcttggctagtgactatgtcattgatgctaaaatagtggacgccaaaggtaacattcttgacagaaaacaaatgggggaagatcttttctgggccatccgaggtggtggcggagccagttttggtgtcattttgtcttacaagatcaagctcgttcaggtaatgttttgaatttaaaatgaagcatattgctagcttgtattaaattcaaattaatttctttacaggttccggaaaccgtgactgttttcaacgctgaaaggaccttagaaaacaagaatgatagcatgactgatttcgttgtccaatggcaaaaggttgccccaaccacagatgaaggccttttcatgagaatgctcgtacaaccatctacttctactgtcacaaaaggagagaagacaatgaaagtaaccatcgttgcccaatatctcggcaatgctgacacactcgtttctgttatgggaaaagagtttccactgttgggattgaagaaggaggattgtaaggaattgagttggatcaattccgttctttggtggcttaaattgaaaaacgacactgctacccccgaagttttgctggatcggaatgttaactcggcgattttcggcataagaaagtcggattacgttcagaaagaaatatctgcaactgtgttggaatcgatttggaaaaagatgactccagg

SEQ ID NO: 3143 - DNA, 883 bp, Cannabis sativa
aactgaaacaagtgaaattaataaaaatgtattttgtttgtcaccacggaattatattaggtaaggtaagacagacacctcaaagtgttgagaatttttctttaaaatgttttccccccttcaaaatttatttaattataacccaaagaatgagaaataattttcttagcaatcagttcaataagcatacattttactattttttttgacaaaacaatttattatgtgtacaacattaatttaattttattaatatattgtgggggctagcattatcattttaatttattgtccatttaagatgtgaaatgcatcattttcatgaacttgttttcaaacgttatattttggtggagttaatttacttggtcaacagtatattaatacttacagttgtctaaaccaaaaacggtttgctacacatttttactatttactatttaccataaaaaacttccatattaagtataacagtaacctcttcccattgagccatttaatgcattgtaataagttgtacatcctaaagagttaaagtttgctactcatttggtaagttttaacaaaagaggcaaatattattaatgatgaaatgtaaaatatggtaacaataattacgcattcattcatgcttataatacatctacttagcccccacttgtgggctttaatgacccatttcatatcatatattattataaaagaattattattgagcactaacactagcagtacctaatactttctataagtgaccttatacaattatttagtaatatattttaaaaattatgtttttgagttctaggggattgactatttaattacggtatgacaatgacacaaagaaatgtgataggcaccaataatatcttttagcaat

SEQ ID NO: 3144 - DNA, 1352 bp, Cannabis sativa
atgcccagggccgggcctgcttgtccagatatgtattttgcaataatgctttcctagttaatcacattgctgccgtcagccaagtaattctcataagtagttctaacaattttataaaaaattgaatcagtagtcgtaaccaatatattgataataccactgggcatgatttttttccttgataatacataataacatctatttgctgcaattaaaaagagaggataactaattaaccatgtaatttataacaaattgtaaaataaaaggtgtaaattaaagaaatcaaaagtaataggtactttcaatcaaactataaaataaagaataagtacttgaactgataaaataatatacttacaaagtcaaacaagaattcaccataagtctggagttggtaaaatcggtattttttttatgtgcatgatctcaaaatcaatgccattagcatatgccaccaacttatgtctacaaccccaaaataaaaatgcattaattatagaagtgtgaataaatcataaaaatatgtagttaaaattataaaaaaaaaaataaaaattaaagactaacttactaaaatcaacataatttaagcacattcagtacaactaaaccttcttactctaacttgtatttcaatatcattaattatggagtattttaatattatataatacttttttctcttaaaaaaaataaaatattaaatatttttactgaaataataaatacaacttcttcatctcattcctttcctatataagatactaataaataagataagacaaaaaaaaaaacgtggagataaaaaaacagaaaagacattaataacaacgtatttaatttcgaatgggacccacatttaaaaaaacctcaatacgaaaaatataggtcccacaatgttttaaaaattacttttgtttttttttttttttaagtttataaaaattacttgctaaacgtaaaaaggaaagtaaaattaattagttgattcccgctcaaagtagctgtctctatcatacctctgatttcaaatatcccattcccagctgttgctgcgatcattttattccatcacttatataaaccccattcactcactcactcactcaccaaaccccaattcaaaaaattccaaacaaaccctagctaacatggctgtcctccgatcacaacgttctcatctcaatctccaccttcccttaaccaaactctccaacgctttacctcccatctctctcccactactacctcccacttccactgctgcccccaccgaatacaactgctcatcttcctccgcccctatctcacccgctgatctcgataagattcaagttctcggaagcggc

SEQ ID NO: 3145 - DNA, 1262 bp, Cannabis sativa
tgattggagaagattgagcgacaggtaaagtagaaggggacacaagagtggctcgggcagtagcaggaatagagaatggaagagaggttaaaacaaagtgaggcttttgagggggagtaggaaaagcggaggcagcagcaaacgggaaagaagactcattaagaatgacatgacaagtgacaaaaaaatttcccgaggtaggatggaggcatagataacccttgtgcttactactatagccaagaaaagtgcaagaggaagagcaaaattcaagtttgtggttgttataaggacgaaggaacggaaagcattgacatccaaatactcgaaggaaagagtaatttgggactttgtgatagagaagttgataggtacttaaataacgaaggacacgagttgggaggtgatttattagataaatggccgtggagaaagcatatggccattaggagagtggtagatgggagtgagctaacaaagttaagcccgtttcaacgatatgtcgatttttacgcttaacgcgaccattttgctggggagtatgtgagcaggaaatgtcatggcggatgccgtgattggtgaaaaaacgagaaagagagctgtattcaccgtcccaatcagtgtagacagattgaatagtgctgttaaattgtgtgaaaccagatttttgaaaataagaaaattattgaaagcttcatctttagtattaagtaaatgaaaccaggaaaaacgagtaatgtcatcaatgaacaaaaggaaatatttggcaccagtaatagaagaaacaggggcaggcccccaaatgtcggaatgtattaattcaaagggcttagaagcctaagatacaaaattaggacaacttagtctatgagatttgcctaattgacaagaagtacaaaaagttagacaatctcttcttggaaaagaaaaatcacaagtaaaagaaacacgagagatgacatccgaagaagggtgacccaaccgagaatgccacagatctagagaggtcttggaggagtagaggaggtgaggacgggtaggggttgttggctcaagtgaagtggaaacacgataaatgccttgatcaagaagtcctttgagaagaatttgacgactctcatggtgtttgacaaagaagtgagtgggatgaaattccacaaatgcattattatccaaacaaagttagaaacactaagaagatttttagaaagactaggtgaatgataaacacgacagagtttaattgaagaagatggcaaata

SEQ ID NO: 3146 - DNA, 1126 bp, Cannabis sativa
ttattattatgcatatttgtctattttacaggttcgagacatctcggggtcattccgatgggctccatttcttgctttgcagacatcaaactcgttcctgacaatgcttttgctgctttccaagtacaagatgaagagtattttcgtagttgatttgggtgaaggtaagattgaaaatgtcatcacgcaatcctcggtgattcacatgttagcagaatgtgctggtcttcattggtttgaaaattggggtacaaaaaaactctctgaagtgggtctcccaatggtgactggagatcgtctcatcaaggtgcacaaattttctctctcaaaactaaaaagatttacaatatttgttgttttcttatttcaaatgctgattgttgttgttcttcttataggtttatgaagatgaaccagtgttacaagcatttaagctgatgaggaaaaagaggattggtggggtacctgtaattgaaaatggtggcaacaaagcagtaggaaacataagcttaagagatatccaattcttgcttacagcacctgagatttaccatgattataggtgagtagctgaaatataagctcaaaattatatatttttgtcattgaatttgtttttgatataggaatcagaaggagctattaacttgaacactaaacaattgttgatgttatgaaggagctttttgatcagggtcgtgcctgagctaaggtggactaggcctgcacctaaggcccacctagcctagggcccaaaaagaaaatattttcctttcaaaaatatacataattttgtagtacatattttttataaaggtcccaatttttttttttcaaggcccaccaaatttcagaaacgtctgttttttatgacaagattttcgttacattctaccttgaacttggcttaaattgcatgatccaaattgactcctttctcttaagttcaataaaagagaagcaactatagagttagtacattatgtattgtttagattctgattctggattggtcattgcttaaaatggagtgttgtgctgatctcgttgcattggttctgaaaacccttctctttcacttaagacaccgagccttgttaagtttctttgcttagtcacttgtgtt

SEQ ID NO: 3147 - DNA, 595 bp, Cannabis sativa
caaacaggcccaatgtatttcaatggagtttatcacttattttaccaatacaatccatggggagcagtatggggtaacatagtttgggcacattcagtatcaaaagacatggttaactgggaatctatcgaaccagcaatattcccatctgaagattacgacataaatggttgttggtctggatcagctactgttcttccaactaacaaacctgtaatcatgtacacaggtattgacaaaaccataagacaactccaaaactatgccgtacccaaaaatctttctgatccatatcttagagaatggatcaaaccaaagaacaacccaatagcagtaccagacaagagtgaaaacgctagtgcatttcgagacccaacaactgcttggaaaggcagagatggtcattggagaatggttgtgggtggtaaaagaaatatgagaggtatgacacatttgtataggagtaaagatttcaagaattggattaaagcaaaacaccctttgcattctgtaccaaatactggtatgtgggaatgtcctgatttttaccctgtttcaacttctggtgccaaaaatggtttggacacttcttcac

SEQ ID NO: 3148 - DNA, 1283 bp, Cannabis sativa
gtaacaatttgacaatccgtctcctcctcaatattatgacatccaagacgagaacacaattgcaacccaaccagtatagccataacttcggcaaaaaaaaaatggagttaaaagacgcactgtcggtattgctgcaaatgccacacaaatgtcctataaagtctcgcatgaccgctccaaaattcatacaatagtcagaaggccgcaacctaacatcaaatttaagtttgaaccacccttcagttagaggagaccacaatgcctcagggggtcaaccaatcggactaacagctgaagtatgactagaaaccacattgaattctcacttgagcttcttgataagtctgagaaaatgaaaaggcccagcccaatatgccttcgatatcaagaagtttttggtcatgaacccaatggtttcgacgatataaaatgcgccaaagaagaactagaagcaactccatctcatctctacgaagaataaattcacattctcggaggaaagagaaaaagttaacttgaggcaactcttcagatgtaggagcaaaatccactaacttaattatggaagcaagacttgtacaatcccaaagtgcatggaatgaagtttcattttttcagcacacaaactggacaagaagattcgtgggaactttatgagaggtaggattagacttagtaggaaaccaatataaacaagctctttaaataaatatttttacactaggaggaatagtaagactccaaaggtacttccaccaagaagatgagcccaaagaggaatcgaattgacccaatccaaataaccttatggcattccaatactcattcttaatcatataactccatgaagaattatagtgccagatcaaacggtcttgatgttgattagatctcggaatagatagtaatcgtgagacttcattcaccaaaaataaagattcagcaagacttttattccattagctaatttcagatcactaatcatagaaattgaatcaattagccacaaagaataaaagagagcagttgaaactttcgggatctaaacatgatgtttaatactcacagaagacccaccaccaataaaccaacgaccaccttctaagaacaactctttcccccacagaatactcctccaaagataaaagtctttgttagatttttcaataaagagaatattctctttttaaaagtaaatacccttcataactcgagcgacaagggaatgtggaatagaatataaacgccaagctagcttgttagctagcaaggccttattgaag

SEQ ID NO: 3149 - DNA, 1472 bp, Cannabis sativa
cttatttatattttatttcatggccgtgacattttttttactccgttaacaggtcctgtttttgatgtatcattacttcgctgcaactgaaatatataacgcgattcgtgtctttattgccgcatatgtctggatgactggatttggcaacttttcctactattacatcagaaaagattttagtcttgcacggttcacacaggtatttttttttttcatttccatttaatatgtcaagtcacatgttctaacaataaaatttttatcaccgaaaataaagggtagacaaaaactattagcaatctcatttattaattcttcacttgtgcagatgatgtggagactaaacttttttgtggcattttgctgtattgttctcaacaatgattacatgctgtactatatatgtccaatgcacacattattcactctaatggtgtatggagcccttggaatttttcacaagtataatgagataagatcagtgatcattgcaaagattctcgtttgctttctcgtggttatcttggtatgggaaattcctggggtcttcgagattctctggagtccacttgcattccttctaggtgagtaatttcttcggtcttttagtttcaattcctagatttcggaatactgttgccttccatcttctttatcacattcctgacatatttactaaatgataattattgcaggttatactgatcctgcaaagccggatctctctcggttgcatgaatggcatttcagatctggacttgatcgttatatatggatcatcggaatgatatatgcatattgtcatcccaatgtaatactaatgctcatgctcacatgtctaataattcttttgccttttggtttctttacctgaacaatattgttttatcttaggttgagaaatggatggaaaaattggaggaatcagaaaccaagaagagagtttcaatcaaaggagccatagttgctgtttctgtatttgtgagtattcgaacaacaagtttaacatcacaagcttttatggttattttttatattctttctcaattcatttatgatcctctgtgtaggttggttatttatggttcgagtacatttacaagctagacaaagtttcgtataacaagctccacccctacacctcatggatccctataacgtgagttttaaacacgagcaataatttaataacttcgatggcataaatcaatttgcatagattcacaggacactctttcagactttaatttctcttcttttctctttaccagggtttatatatgtttgcggaacttcacccagcagttccgaaatttctccatgactctctttgcgtatgtgattattatacctcaacaaaaaatttattaacccttgttaaggctcattcttctaatgttttttaacatatatttctgacaatttatctgtagatggctaggcaaggttactctcgaaacctacatttc

SEQ ID NO: 3150 - DNA, 1538 bp, Cannabis sativa
gaagattatttacacattttttttatgagcattgttattagtgtctaacactttttataagtggtgttttacgattagttagtgatattttctaagttatatgagattcaatacataattacactaataacagtataacaccgagatacataattacgattaggtaatgttttagattagttagtgatattttctaaattatacgagattcaatacatattttctaagcactaatactgcatttctctttctttatattctcaactgaagtctcaacctatcatgtcattaattccttaggtttcagatgttgagtacagtatcaattgtgaaacgcgcattggttgttgaatggcttttattatttctgtaaattaatttactgtctatctgctttttgcatgtccacgccaccattttccttttctttttcttttgaaaaatgaccaaaatttctaaattgtttggatgatgaactgaactaatatatgcaagagtatcatgttatatatatgcaagtttgctcataaagtatagttagtggttaactgatccaatctaattacaatcgaccaatttaattataattaattgtcaaatatttgatatctaattataattagattagtttgaatattatttttgaatattcaattgaatcatgttggtttggttctcgaaaaattcaatacatccaatatttaatctaattcattagtatttcaaattattttagatgaataattaaatttcatgttattatacttaaaatatatttatttatatgaaaatcagaattaacttttttatttttttggattacatttgaataaataataaatctaaaaaattagatgaatcacatctgatttaaaaaatattagatctaaaatattaaataaagttgaatcaatgcaatagattttttatagataaaatatatttattagatagaaccaatctaattagacattagatcaatcagacaaataaaattaattggatcaaattttaaagtaaaacttaatatcgaatatatagtttgataagtctaaaaattagatgtaattcgatgaacatataagtggtaaaaaaaggtacatgcataaaagtaaaatatatacgtgcatgttaaacttataaagcattttgaatattgtatgagattatcaaaacgaaaagaagagaagaaaactatagaataataacaaacaatattatttatagtagtaatgagaacataacaagtttacagtacaatgccattgtagctaggtaggagaggaacactaaaaatgttccctaaaattcaaaaggacagatcttgacattgaaaaagtgatcacttctcaccaatatatatatattgcatgcatgcatatttgagctctataataactactactaataataaacaagctatatatatatatataggttcaataagtagataattaaagaatgaacctaaaagactatatataaatataatttatatataaatattaacatcagtggccaccaccaccaataccacc

SEQ ID NO: 3151 - DNA, 2647 bp, Cannabis sativa
tggagggactaaagtggaggcagatgcttctcaagttgatgtacatacagagaccaatagtgcatatgagaactaatgatataaatgtggtaaatcaatcaccatctaagaacataaaaacacttagaaatcaaagaataataaagagaaatcaaattgacaatgcatataaaagaatggtaagaacagagtatgcaaaaacatgaattataaggttcgatcacaagcaggaagcttggatctattctttgggtagaactgccttgaggctttgcctttattgattgaagatggagctcagagttggtacattatagggacaaaattcatgaacagaaatagagtcttgctcctatgaaatggctcactcgagggacatgagttatacaaatctcaaaccctttacaacaatacacactctcaactcaacacagctaataaatagcaagatggtctgtatatatagaccagtacaagtgtattcgaaccaactaacataacagaatttaactaactaaagcctaactaacagtcggattggggtggtgaatacaggcttttgtagtccatacttgaacctttgggaatcaactttagacacccctgtcccacactcatcagcagcagggtaggattgaaagaaaacatcaacatgatgtcgacatgggcctttcattcctttcactggcacaaatgcccttaacacactaacatgatgcattcacaacaactgcctatatgattaatcgtcttcccacaccaattttgcaattcagaaatccatttgagctactcttccatcaaaaacctaattacaatttcttgaagacattttgttgcacttattacccattactcaagtcatatcatcagcataagcttgcctttaaaatagcttattgcctgttccttggatacagtcccagtcataagagggtacaaatgtatgcacccttcaggcagagtttacatagctagaacagtcaagttcaatgaaaatcatttcccctataacactttatttcccaaacatgcttctgccccaatcacttcaccattaatctaattaggtgtcttccctatacccttaccaccatcacaagttaataatactcagaccccaaacccacctactccaccaaatgaacctactccaaatccccctcaccactactacagcagtcagccactgcacctgctacaacacatacacatgttccaataacttctgcctccacctcaacagcaccacctcattctacagtaagaaatagccctcccactgttctcccatcacctccaccaactcttgaccatgaacctgatcctatgttaaaccctgttgacacaactcaaactcaaccttgcattcttacccaacctccacaacctttcaacagacactcaatggtgaccagcgccaaagctgggattcacaaacccaaagctctcacatcttcttctaatatcaacattgagcctaggacccttaaagctacccttcaataccccctttggttcaatgcaatgtagaatgaaatcagtgttcttgtcaaaaataaaacatggacccttgtccccttccaacctggaatgacaattcttgacaataaatgggtacatcgaataaaatacaaccctgacaacactatagacaggtacaaatccaggcttattgccaaaggatttcaacaaactcctggcctacactattttgagacatcatcaagccatgtactataaggtttattttctatcttgcagtaacacatcactggccagttcaatagactgacattaataatactttcctaaatggggatctgcaagaatgtgtttatatggcccaactagctaatttttcaaaatgctactcatcccaaccatgtcagcaggttaaacaaagctatttatggcttaaaagaggcccctcaggcctggtttgacaagctcaaacactcatttctacaatagggatttcaaaactctaaagctgacacattattattttttataagaaagcatggcaaacttattttactgttaatttatgttgatcacatactattaacaggtgaagattcaaactttattcaccacctaatttcacacctgcaccaacagttttcccttaagaaccttggacttgttcgatattttctgggatttgaagtcactaaaaattcttctggtctctatcttacacaagctaaatatacttcggaccttctggctcaaataaatatgactcttatgtgcccaaacacaaagctttcagccaacatgggcactcctatggaaaatctcagtctatatagaagtgtgattggagctattcaatacctaacattaaccaggctagatatctcttttgctgctaacaatctttctcaatttcttaaaagtcccacaaatgaataatggctagcttgcaaatgactttttcgatatctagcaagcgcaattgactatggcctacacttcaaaccagctgattctctccaacttgttgtctatacagatgctgactgggcaagttcaattgatgatagacgttctacgtctagttattgtgtctatctaggtggcaatctgaacatgtggactctagaaaacaaattgttgttactcgttcaagtatagaatc

SEQ ID NO: 3152 - DNA, 674 bp, Cannabis sativa
tagcgtaccaaagtcaaggtgtccatttttgacactttctcaattatttttaaataggttttcgatggcctgccttttttctaattttttttacttgatttttgattgtgatttttggttacttttttcgacatgttttgatgccttttcgacgatttcttgatagttcactgaaaattattttatgacagattttcaataggttctcgatagttcactaaaagttgtattgtaatagatttttgataggttctcgatattttttggtagctttttgatggtttttcaataggttcacgatagttcactgaacattgtgttgtaatagattttgataagttctcgataggttggatcttctctggatcgtcttcttgtttagaatatgatgcaagcaggggattcctacttgggctctgacagatttttgctcgtcgagctactgcgatcgagcaaaaatagattttatgggtttagatggtgaggacgatggggttcggtgtagatgcaggtttgggggggatgtcggtctgggtcgttgggtgtagacaccagtataggtttggttttgggttagaatgtcagtggatttcttcgggagttacagagagaatgagagagttagggattttaaaatattaaaatattaggggtactttaggaatgatgttaca

SEQ ID NO: 3153 - DNA, 917 bp, Cannabis sativa
gatttttgttggattattcaatgaaaacttgctattctagatgtgtatgtgggaagtaatggaggtagtgaggagtttcaatgtggaggagctatttggaaatttgaggcttttctacacaagggttttgagtgttggtgatggaattataaagagatattgtaaaatttgggtttttcagtctattaatgttgttattggaattgggtcattgttgtctttcctttttgccataacatgtgcatatttgtatttgtttccaagtgttcaacctgcaattcctagttatgagattcctaaggcagttatttcggttgcgaaatgcaatgttgctgatgggaaatggatccaagatcaaacttaccctttgtacaatgcctcacaatgtccatttgcagaaaggggatttagttgtttggtgaatggaaggagagataggggttatgaaaaatggaggtggaagccaaaaaactgtgagattccaaggtttaatgcaagagatattctcataaagcttagtgggaaaagagtggttttggttggtgattcattgagtagaactcaatgggagtctttgatatgtatgctgatgacaggtgtggatgataagagaagtgtttatgaagtgaatgggaataaaatcaccaaacagattagatttttgggtgtatggttttctacttataatcttagaattgacttttataggtcagtttttctagtgcagcctagttctgctccaaggcgatcaccaaagagggttaaatcaactctcagacttgatctgttggatgatattagcagagaatggattgattctgatgtgttgatattcaattcagggcactggtggactccaacaaagcttttcgaaatgtaagttttcaagctttctaatcatttccttttcattaagt

SEQ ID NO: 3154 - DNA, 569 bp, Cannabis sativa
ttattattatatataacttttgacacagttaaactgagtcttcacattgaaggtagttgaagtaaatggcctccgagtgaagagtacccctcgtgtaatggtcagaggacgtggtagtagtcttgaggccaatggccatgtcagcaccatatgaaaattgtcctatatataggcagttacacatgtttttgacacaagatcagatcttgtcccccaggctcagccattgtagtgcgcgtacgcacctctggacatgccttttgcccaacgacctggttagagagtattctgcaaaggaaagacctttgcacgacatgtgtcctagtttgtaagaaatccttcactgcatttgtacgccacacgatgaagatgcttcttatcaactaatggtcagatcgtcctattatagtagcagcccttaaagtgagaagagtacaaaaccctaagtgggtaaatggtatgtcctcatccccatgtgtgcctataaatacctttattttctatgaacgagaggtgaataattttttacttaaaaaacctctcccaaaattcctagagagctttcttct

SEQ ID NO: 3155 - DNA, 1474 bp, Cannabis sativa
caacgaagggtagtttggtatggaggtatgaggtaatattgtcatgagtatgggattgtcatactattcaaatgtttttttttttctaggttttacttttatgctttaaatgtatacacatcactagtatacatttgtgatttaaacatatacacatcactagatttctcatatttttgagggaatgagaaagagagagtggagtaggaattgtttgagggccatttaggtccaaaatggatattcaagcatagtctgttttgcaattttggaaattagaggcataaaattttaattcatatgctctttaagcacaaacatcaactttccctctttgtattaaattctcttattacctggagtcgttagaggtttcctagttaagctatatttgaaattaaattaatctgtttttgaaacccaattgagttatgctatgcaaatttgagttttttgtggttgcttataacttttctggtgacgtttcttaattggcaattattatgattttattctttgattactagacagtccttccacccttgtagatgttcctagtcttacaattgttttttggtgcctgcctgcttaataatatcacttgtttgtttcttaactcaggtctcctatgacacaagtgggtttctggagaagaatagggacttgctacatatggattccattcaacttctatcttcatgctcatgccaccttcctcagaaatttgcttccaatatgcttgctcaatctgagaaacctgttgttggtcctttgtacaaatcaggtggtgcggattcccaaaaattaagtgttgcgacaaaattcaaggtatattacatatttgacactatgctaagtacttagtttcatattattttgatccacaatttgtgttttgaatgatgagcatttacaattttttatttcaaaatttcagttctacagattttgtttttgcttgctttctgcattttatttttgcaactgtagtaattatgtgtcaaacaaataggacagtttctcttggtccaagtattaaaaaggaagcattggatttggttagttaaccaagagaaaatggaatgggaaaatatgtagtgcatgacatgcataaaaaaagaaactgacaaactgtcaaataatgttctgctacaaaaactgaaaatattaaagaagttaaaaaccttgcctaatatttacggtctatcattaactatgttctgttttggtatttagagtcaattattccagttgatgcaacgtctagaaagtaccacgccacatttcattcgctgtattaagccaaacaatcttcagtctcctggattatacgagcaagaacttgtgctgcagcagcttagatgttgtggagttttagaagtggttcgaatatcaagatctggttttcctacaagaatgtcacaccagaaattttcaagaaggtaacaatacagaatactttcacatgttaagg

SEQ ID NO: 3156 - DNA, 2107 bp, Cannabis sativa
agggacgaggctcgcgggtaggccgtgaagtcgttgaaatccaacgattcctcgaagtccaacgaggataccaccgtcgtcaccgttgataactccacaaacggtctcacacccttaaaaaaaaaaaataatacaagataaaatttaattacagctggatgtaacattattaataaaaaaagaaatatataaataaataaataccttccaaaggtaggagaagagagaaggagggtctatgacaaaagacttataaaggcgtcctgggtagtactcggccacaattttcagtgctgctagtaacaagttcataaaagccgatgctgacctgaaaaagcctgcaatttttaaacacgccaaaaattcaattatgagctaattaatacttaaaaatcactttcagttgattaatttctacgtatcttcttttcatgaaattatttcaattaaagaatattatccccatatttatgaattttaagattattaatggtggagacttaaagtgtaagagttgaccaatcataagaagaggagtataaatttactccatttcccgatatacccatccattccggggccgttaaggatggtttcgatcgtgacactacaggggcactccggacattgtctgagaatatcttagacacattctgccggaactccgacattagctgagattgctttggtgctcattaattaattcacaacacctcgccagcgtgcgtgtgtttcagtccgacactttacaattactaaactaccccttatattttcaaaatgatcctactttagaataactagacatgggtagaattgtgatttcgttttgagtgtataacttacttgcatcgaaaaggagaacaaattgttccacgttctttggcatggtcccaatggccacttccagtgagaaaaccagtaaacgaataaaccttaaaaaataaaaataaaaaaaattagcataaaacattctttcttttttttttttttttcaaataaatagtttttggtattttttttgcttacagtttctgggagtgaaacttctggtagtcttgcttgatccggaaaatctgttataattacaaaacacttgagaatattttaaagacgatgatttaaaaaaaaaaaaaaatcatcagattaaagaattatatatatggtatgtaattatataccaaaacaggcctagattcttcatcatgaccagcaacataagcaactccttcggcaagctcagctgaaaactcatctgctatcaagttttctgtagttttcaaataataataattagaaaaaagaattagataagtagtttgaaaaacacccatacagagttacttttttctctctctctctcttcttttcgttaatttctttacttttttttttatttatttgaaaaagatgaaagtatgtggaagaagtagtgactttaatcattatagtaggaattttactttaacggcttatttagaaaaatgaaaagcaagattcttcataaaccaaacaaaaagaaaatacaatgtgcagccatttacatggatcatagtggtgtggtacacagtcttttgtaataacccaaaagaaaatttgagacaataatatataggtagattttaataccagtgcctatactatctctccatgaaagacaagctcttagttgcttgacagccttcttaacattttctcctttggatttcaaaaacctctcaacacatgcctcattacaaaacttctcctgcaaatagttgaaaactatatatgatcagtacactcaactattatctgtatagaatagagaacctacagataataatagaactgaaagaagaagaacaaaaaataggtacctgttttactgttagaggtgcttgtttcttgagaagttggagaacagtttccactctagtgttaatattcactttttggtctttctttcccatttagagatagagagattttaatgataaaaacaaacaagaactaggtttcacaagttataataactctagtttcttcaaacccaaaaccccactaatataccagacttcaggttcacgcaattttcatcaaacaagagaaagaacaatctcggaga

SEQ ID NO: 3157 - DNA, 1665 bp, Cannabis sativa
aattatccaatgctggaattccatctcagctcgaatgaaaattccaccagcaacgaagaatatcatttttgtctctaatattatgacttgctggcttcattaatcatacaccaactacgtgaacattatattttgtagtattttcattcttggttgttgtgttttaattatttcattattatatgtatacattagctcgaaaattattataataaaaagagaattagtgtacaccatattatgattgcaccgaaaattcaatttgagaacagaacaaaaagctgaaattatttcatggataataagaatatctcatcatcaaccgaagaaatcaacttagtcattaaaattccagaggtgagtaaagatcatgtgcagctgatgcaccagaagatctctgagcctccacggatactcagcaatgacgccggtaaaccttcctgttccattttcagagtccctcagagtttaatcgaagtcaacggcaagatctaccagcctcatatagtctccatcggaccataccaccggggagaatctcaactcagaatgatcgaagagcacaagtggcagtaccttggttcattactagccagaacagagaagaacagaggtataaaattagaggattatctgagcgccatggctgagcttgaacaaaaagctagagaatgttactccgagacgattcacttaagtcctgaggaattcgccgaaatgatggtcctagatggctgtttcattatcgaattgctgagaaaagcagccaatcttgtcctgttcgaaaaggacgatccgattctctcaatggcttggattatcccctttttctacagagatttccttcgtttagagaaccagatccctttcttcgtcctcgaaaaactcttcgagatctccgaatctaaaccacaagaacaaccagctctaacaatcttagctctacaattcttcgacaatgcgattcagagaccagaaggagcgatcgagaagaatcgagatctaaaacctcgccatttactcgatttaatccgactgagtttgatcccaaccaatcaccccgagccacgaatcagacgaaagacgccggctcacataatccactgcgtttcgaagctgcgccgagccggaataaacctgagagccacaaaggacgatacatttctttgtgtgaaattcgaaagaggagtgatagagatgccgcccataacaatcgacgattttacgacgtcgtttttggtaaactgcgtgtcgtttgagcagtgccataagtcgtgtacaaaacacttcaccacgtacgcgacactgttggattgtttagtgaacacttctagagacgttgagtttttgtgcgaccgtaacataatggagaattgttacggaaacgacagtgacgtggcgcgttttatcaacaatatgggaaaagacgttgcgtttgatattgatatgtgttatttgggggatatgtttgacgatgttcatcagtattatcggaatagttggcatgttcaatgggctggttttaagtacacttattttgatactccttggtcttttatttcagcttttgctgctttagtattacttcttttaactgttgctcaaactgtttacactgtttatagcttttataaaccctaattaatattacttaaccacaacaca

SEQ ID NO: 3158 - DNA, 851 bp, Cannabis sativa
tggtgactccccctgcggtataaaaacttcatagccaattgatacgttgaagttacatccttcaagcagttgagtgagggtcttcccattaatgcattgaacgtggccagacaatctaccacaaaaaatgttgccatcactgtggagtgtttgaagttctctccaatggtgagggctaactctatcgctccaagcggctggattgagtctctagtaaactcgtagatctgtatcccccatggttttaagtccttgagtcccgatctcatcttcttgagggctgcaaagtataggatgtccatagaaatatttttttccacctgcattcgatgcaccctcctgctggaaattttgatcacaatgaccagcggttcgttatgggggaagtgcacaccctttgtgtcctcattagtgaatgttatcgaatcattctctcccttaaaacagttcggtggtctctactctaggctccagacttgagtctcatgtctcgcttcacgaacatacttttcccttcccttgcaggtgttacctcaaattttggctcctctgatgattgtttggatatccccaaatactttgggagcctcttcgagatcttcctactggcgtgcctcatttggcctctagtcctcctttcgataccctcctaagtgtctgtgttgtatcaactctttgattttgaatttcagatgcttgtactctttcgtgagagatccgacatctttatggaagtgaaaatacttgttcgggtctctcctagttctttctcttttcaaggatggcaaccttttgaagggtactcgatgttcatttgtaaggaagatgtgctctcttaagtgggttagctc

SEQ ID NO: 3159 - DNA, 978 bp, Cannabis sativa
agcttcagacatgtacatgcttaccttcgactgtgaagaagataagcttcgtgttctggatcgtgagccctatcactttcagaaaccatcatatcattctacatacaccagtaattgggcaaaacttcaactcagatgatcttaagttcactcccttctggctgcaagtctatcgccttccctttttgagtaagacaagatccttggctatttctctgggcaatatcattggcaaatataaagatgtgtttgaggactccctaaacgaaggctggggactctttttacacattcgagttcttatggatgtctccaaaccattgaagagaggacggataatttctttgagtcatgtaaaggacaagttttgggttaattttcgctatgagaggcttcccgaatattgcatggaatgtgggataattggacatccatataacaagttcaccatttatcttgaaaagcttaacaatggtgaagaacctgctttagaataccagccatttatcaaaggatctgccctgccaacttccaattatgaccgctatagaaccgattttgcaaagggtgatgcttggccgttattgactagacttgcaaaaaaaagtcttacttcagcaatccctcaactacacttgtgtggtctgccgcaaccaagacatttatatgcaggagagtcctcctgtgctaatgaaattgaagatcctaacactaatgatgaacataatgttgctgtaaataccatggttcagaggtccttagtttcgcagcaaccatcagttactttcaaaccatcctctttgaaaaattacacaatgtctcatcctacttcttctgcaagtgatataaacaaagaggctgaagcatctttacctgaagatcctcccaccaatttcacagatctttcttctatttacaaggcggttacatcagtccccttgtcctacaacacttttgcaacttacccccctcctagcc

SEQ ID NO: 3160 - DNA, 1361 bp, Cannabis sativa
tttttttacaatagagcacaaagaaatgagtgagttagagaaataattatttttttaagatacaattattaatatgaggatggtataaaagaaaaagcaagtcaaaatagacattatttagtttaaattaattgaaaatctaaaaattaataatggtgtttgcgtatatatgatgaaatttctctttataaatacccctattagcaatgcattctttgaaactccttatacatttaaacgagatgtcacataaatgtgtatgataaaaaagattgcaaaaatgtttgatcaaacaagatgcagccaaaattaaactttaatgaaaattaaaccaaaaccattagcacttccacgcgggtgcgaaatcctctctactctagtaaaaactactatgtaagtaaaataaataaaaaaaaaaaaaaaaacaaaattgcttaaaagaataaattacaaacatgggaacactttcagatttagaatttgatatattattttcgttcatatagtaaaaaatataaatttcgtaccattagcatatcaacagcagaagatctgaaaacttatacttttcagaaagaacaaaactattatcacttccaggcaaaggtgcagaacccatctgccggccattttacattgtaatacctaaggcagatcaccctttcaagataagccccttgttccgataatttcacttgctttcttcctacctgccagcgcaaaagccagatgaaggccatcatgagtctcacatcaaatatcacagacaactttatgaattaattttatcaatgcctggaagagatcacaagcagaagactactaatcaaccaataaatacaggatgacgagtgaccaaagttttttactaaaaaagaaacttacattttaaaatattcaaaaggatcttcgaccggtgctaccaccactcctgtcgttaccgaagcccccagaacgactagtattggaatcaccaccaaatccactagagcggctagagccaaagtttccaaacccacctgaacgactggaatcagaaccaccaaatccccctgaacgttttgcgctagatccaccaaagccacctccagattgaccgaagtcgccaaagtcaccaaatcgaccagagctagatccacgagaagaatcaccaccatatccactggaacgaccaccaaatccaggacggccaccaaacccagaacgccctggaccaccgggtcgacgatccctcatgcctccaaatcccgtgtccccaaacatgtctacgcttgtactatcaccagcaatcttaggaagctgataacacaggtaaagatcaatcagtttcacatattaaggatttggaaaatagaagcata

SEQ ID NO: 3161 - DNA, 2236 bp, Cannabis sativa
tacttggcacagaaggctaggtcatccatccttatctgtgttaaatcaagtgttaaagttgtctaatgtcaaaagttcaatcaatgaaaaaccatgtttttgtgatgcttgtcaattcggaaaatcacatgctttgccctttaataactctactagtagagccacttctttacttgatgttatacacactgacctttggggtccagccccaattgtctcgcacacaaattacaaatactatatacacttcattgacgatcacagtaggttcacttggctttttcccttgaaacaaaagtctgatgccttaccagcttttaaacaatttaaagctcttgttgaaaacaaatttgaaagaaaaattaaattggttaggactgattatggaggagagtatgaggcttttctgatttggttgtcgaatgtggcatagaatttcaacactcttgtcctcacacatctgcccaaaatggtagagcagagaggaaacataggcacatagtggaaatgggcttaaccttgttggcacaagcccacatgcctctgaaatactggtctgaagccttccaaacagctgtgtttctaattaatagactacctacaactgttttgaaaggcaagtcaccatatgaagttgtcaatggcaaaatacccgactataaactgcttaaagtttttggggtatcttgttttccttgcatcaggccatatcaaaaacacaaatttcaatttcattccataaaatgtgttaatttgggttatagtgaagtgttcaaaggatacaaatgtttgagtccacatggtagaatatacatatcaagaaatgtcattttcaatgaaaatgaatttccttttgagtcaggatttcttaacaattacaaaccagaaactgttctaaccatgcaaacaccacattcctggtttgttcttccaaatgctcctgtcactacacaccagcaaaacactgatttgtcttcaagtgtagaggccacacctgattccagtgcactcccttcagcatcagcttctcaatcctccagcagctcacgggtaagaatgccttttagccctgaaactttcccaaatgtacctgttactttcaatgatccagcagaaataaattcacccatgtctcctactgctgaggaacaaacacagggtgctcaggtatcaacaactcaacaaattcatcctatgattactagagcacgtgctggcatttttaaaccgaaagtttacatgggccaagccaagtttgatttgtctcatcatgaaccacttactgtcgaagcaactctcctacacaaaggatggaataaggcaatgaatgatgaaattcaagccttaaaaagaaacaaaacataccacctggttccctactcaagtacctacaacattgttggcaacaagtgggtacatcggattaaatacaacgcagatggttcgtttcaaagatacaaatccaggttggtggcgaaagggtttcatcaaagaccagggctggattttggagaaactttcagtccagttgtcaaggctcctacagtgagaattgttctcactattgctgtaaccaaagattggatgattaaacaattggacatcaacaatgcgtttctcaatggagtattagaagaagatgtttacatggttcaaccacaaggcttcgaatcccctcaatatcctaatcatgtgtgtaaactgaacaaatcaatttatggtttgaaacaagctccaagagcttggtatgatcagctcaagaatacacttcagcaatggggattcgaaaattctaaggctgatacatctttctttatcctcaaaaagccactgtttgtcataatgttactaatctacgtcgatgatataattcttacagggaacaacacaaaagaattagatcagttcattgcccgactcaacaaaatgttttcactcaaagacctcggatccctcaattacttcttggggatagaagtcttttgagacagtacaggaatttatctctcacagggaaagtacataggggaacttctacaaaagacagaaatggctaatctaaaatccagtcctactcctatggtcgctggcaggcctctatcattaaacgatggtgaattgctgaattctccatctacctacagaagcattataggagcactccaatacctcagtcataccagacccgatatatcattcgctgtcaacaagctgagccagttcctaaaagccccca

SEQ ID NO: 3162 - DNA, 715 bp, Cannabis sativa
tatatgacactaaataataaactccacctacttctggcccaagtgccatggcagcctcagttatctcaacgcgcactggttcctggttaccggtgattgttgcctagataaaaaacaacaagaataatcagataaggaaaatgtgctactatgcccagtgcccactaagattaaagaaaaaggcatcaattttaggttcctaaacttgattctattcctaaagaatgatcataagaccacctttaccctaaacaagtaaaccacacctttacaagctcatcttcacaataaccatcaaactctgccctgaaaaacattaaacgaaaagttgttaccatgacaaaatttaatattaccatcaatccgatagcaaaatcaaacaaaaggcaataaacatacacatcaagctctttctttacactcactgcctcaatttgtaccaccatttgggctttcttaacagtttcgaatagcttattcataccgccgagaatcgtctctatctgaaattaaatggcacacaaggaaattgagcgtaaagttgttgttaggaaaaaaccttcctcatgtatatgcagaatatggtatgatatcgcatgcaacattactatactttcctcctcatcacaacttggttaaagagcaattatgttagtttataactgaatgacaggttttgttttaatcgtagtgtccggctggctatatttagata

SEQ ID NO: 3163 - DNA, 1001 bp, Cannabis sativa
acacagaccccaccaaaaccatctagattgagcgtaacctcaaacccacagtaaagaaagaaattatggcaatcatcacaaaggcactggatgtctttgcatggtgccatgaagttatttccatcattttcatctgggatgtgtactaccccaagtggctcgcaaaaactcggttcttggtctgaaagccaatggcatttggagaatctatatagactttaccaatttgaataaggcccatttaaaagactattttcccctcccaaggataaagtaaatggttgacgctacttctggatatgaaattttgtccttcatggatgcttatcctgggtataacaaaatcaacatgcatgtagcagaccaagaacatacaagctttagaactgataaaggagtgtactactacttagtaatgccttcgggttggaaaacacgggtgctacttagcaacagttagtgaactagatcttttgagatctattggggaggaatatggaggtctatgtggatgacatgctagtcaaatcatagaccacagagaaacacacaagtgacttagaagagtgcttcgtggtagtgtgcaattatgggatgaaataaaatcccaaaattgcgtgaccttcaggaaattttgaggcttcatcgtcaaccagtgaggcatcgaggccaatcggctgaaaatttaagaatttttcggacatgccatcccctgaaaaacatgaacacatccatagatttacgaggaaggtagctcactaagcctcttcatatctagattgacggacaagtacatcttgttcttcaatatcttgctaaagagtcaaaatatttaatggactgatgagtgaaagaattccttctaaaacctaaaataagagatggctaaacacctatcatgttcatgccagtcgaggaagatccattggatttgtacttatttgtcttggagcacgcaatagcgatgctctggtctgagaggaagggaaagcatagaattt

SEQ ID NO: 3164 - DNA, 3175 bp, Cannabis sativa
atcaagagtttattttggaggcctgtctagtgttgccatcatgaccccgtggttaggagaaaactacaaggcccaggtccacaaaagaaaaagattgacctagaagaccaagagacatgcgtatcctcttttagaaaaaagagaacgctggatgcgggaacttctagagaaaacctaactcgggtaacaaaagctctgattgggatgaaaaccacaatccatggggtaaattaaccacaatttgacgccttggtagcttttgtgaaggggaccacaccttttaagtggtctaaattcaaactcaaatgagaacacactcacccctctccgaacgaatcaaagctcttccaattcctcaaaagttcaagaatcttttatggtattagacattaggaatgaagatccattgtctcacatctactaattcaaagtgcagaccaatctacaaggtgtgagagatgattttaggtgtagaatcttccctgccacactgacaagcatagctcaatgatggtaccttaaactttcccttagattaattgactcatggaaaaatctattggatgcttttcataactagtttgcgccttccaaataacaccaaactagcctaatgatttgttagacgtcaagtaataggaagacgaatccctgaaggactacatccaacggttcttagaggtagccgctatgacaaaaagtattagcatggacacaagggttatctaactcgcaatcagactgaaggagatgagtcctttatgatctaactttgtcttaaggttgtatacaccatgaatgacttcttggatagagcagatggttttatcaaacttgaagaagtcgtcaatagagtcaagggatcaaaaggtggcaaggaaaagtcactagacactgaagcccttacttctgagtcatggggaaatgggaagcagggaggttcaaatgaaggaaagagagccaacaacggtggcaagcaaggcaactccctcaatggaaacatgcctaagacttggggcaaacccttacgagagtatgagcctcacatcaccacctactccattctcttggctccaagagaggatacatatatggccacacaatccactgatcttgcgtggatatttcagacagtatgtgaagcatcaaaggaatgagccaaagcagcctaatcaacccaacaacccatataaccgaagattgcaccctgcccctgttgagggcgagtatatattggttatcttgggagggctgcatatccctggagagagtaataatgcctagtaaagatatgtcaatgaaataaaaaatgaggaattggtgtttgctctagaaccattgagaaaagccaaaacagaagaacctccaatcatattcttagaggaagatacaaagcacgtgaggtatcaacatgtcgatcctctcgtcattacagttcagctcactagcaagagaataaaaagacttttggtggataatggaagctcgataaatatcctttacaaggatatgtttaagaaaattagattacaaaatgcaaagttaaaaccttgcatggtgaacttatgcggatccactggtgatagtgtcgccagccaaggcatcattggactcccattaactgtaggagagccaccattatctacaacagagatgcaggagtacttagttattgatatgctatccatttacaacatattgatgggtagccctccgtttattggactaggggcagtcaatttaatcaaacactaccattaaaattccaaacaccagcaagaataggtgtagtataaggcaaccatttgttggctcgtgaatattatcgcgcagaactttaaaatagaagggcaaaccatcaattaattgtggtcataatagaagaaagttagaagaaagaagaagatctagaccgtagaatctaagctgagaaaaaccagttaaaaccaattgaagaactagaagaggttgttttagatccagacgatcccattaaatgtgtgtttattgggaaaaatctagatgaaaaactaaaatagtaggtaattgaatttctgaaggcaaacaaagatcaatttgctttgagccattaagatatgataaggattgaccctaaggtgatctaccatcatttgaatatcgacccaaattatccagcaaaaagacaaaaaagacgacccttagactctgagagacaagggacactaaaagaagaggttgacaaagtattggcaaatgactttatacgcgaggatttttatccctcatggatttcaaatcctgttcttgtcctgaaaccaaacgacacctggagaacttgtattgattttttggatttgaataaggcatgtccaaaagattatttccacttaccaaggatttaccagttagtggatgcaactgcaggacatgagctaatgacattcatggatacctattctagatataaccacatcaaaatgcatgtccctgattagaacacacaagttttgtaacaaatataagactttattgttataaagtcatgccttttggttttaaaaatgatggggcaacgtatcaacgactagtgaatgagatgtttgtaaaacaaattaggcaaaatatggaagtttatgttgatgatatgctggtaaaatcaataaaaaaggaagatcacccggagaccttgaagaatgctttgggatacttagaaaatacaatatgaagcttaacccaaagaaatgctcttttggggtctcctcagcagaacttcttggtttcatagtaaatgcaagaggaatggaagccaacctagaaaaaataaaggcctaatcgagatgccttcaccaacgaagccgaaagaggtccacgccttaataggaagaatggcagcattaaacatattcatttcaaagtcaattggtaaaatttcttccattctttaaggttttacgaggcaataagaagtttgaatggacagtagaatgcaaggaagcttttaagggtataagaaaacatttatcgacacctcaagttttggccaaaccaatcactggagaaactttatacttttattagctatctttgagaatgcaatcagtggagccttggtgcaagaagggggaaagcaacaacaccttgtttactatgttagtaaaaggatactgggtgcagagtcaagatatccccctct

SEQ ID NO: 3165 - DNA, 1703 bp, Cannabis sativa
tgaatcagttgtaaatgttttgtacacgggattcatgttatatatatgtccattattttggtatttataagtatttaaataaagatttaattattcatgattttcaataaactcattgattagcaacgagctacacaattaagttaaaattacaataacatgcctaagctagtagggtgttatagtctttctgtatggacatctggatgaaaaaattctaatgaaatagcctaaaatatttgaaggatacgggaaggaacactgggtgtgcttgttacggaaatctctatatggcttaaaacaatctctaagacagtggaagaggagatttgatgattatgtgaccaagataagtttgaaaagaagtaagtttgatcctagtacatatttttgagagagaaatggagatactttgtatctgttgctgtacgtagatgatattttaattgccagcagcaagagtttacaagagattaggcactttaagttccaactaaagacggagtttgaaatgaaggatttaggtctggctagcaagatcttaggcatggatataagaagggaaaggcagaatagactactgtactcgaatcagatgagctacatcaaaaagattctagataccttcggaatgagtaactggaaggcaatgagtactctgcttgcaaaataattcaaactgggtgctactcagatgccaaaagatgatactgagaagatagagatgccaagagttttgtatgctagtgtcattggctccttgatgtatatcatggtatgtacaagataagacatagcgtatgcactcaacatggtaagtagattaatgggaaatcttagaaaggagcattgggaaaccctgaaatagattctacgttatttgaaagaaactgctcagaagggactattaattggcatgaataccaggaaggaagacttggatattattaatggttatgtggactctgattatgtagtgtatattgatactcgaaagtctttgactggatatgtgttaattatgtttaggacatctattagttagaaagcaaaccttcagaaggttgtggcgctattgacaattgaagcagaatatatggacttgatggaagcgattacggaagcactgtggttaactaggttgctggaggagctgaagcttaatcaaaaggttattactattcattgtgttaatcagagtgtagtttaattaaccaagaatcgtttgcactatgagcatactaaggacattgatataaggcttcatttcatacaagaggttgtcactactagaaaagttagaattcacgacgatcctaaaaaagctttttttgggtcactatcgtcgctaaaaaaattaagcaactgtttacaactatcaggaaatttttcgtttataacagtaattatagaaataggtgacaattttaattggaattcattaaatttattgggccactatactcgacggttttaaactgtggggtatagtggcccaataaatgtaaccatgcaataccctaacagcccacaccatcttgcccactccctcccatcagctcaaccctctctatctcttcccatatatcactatcagatccccaccactaactctctctctcatctcatatattttcgtcgaacctctaccgctcactctctctctctccccccatctccccgctcaccccccaacaacccac

SEQ ID NO: 3166 - DNA, 701 bp, Cannabis sativa
gcctttgtgcctagtgcgtgtggtttcattactcaaatgacaaatcagtctcggtcataattcttgttttactcccaaaaaatagtgtgtagggcttgtgatcaaaggaatttatcaccaaatgtaatagtttggtctgaggcactagatgccgataactgcaggggctcaagttacctttcaacttagagcacatggtttctttcatcaaaagacaattttgctctgcacattagccttattttgtctcaaaaataaagtgtaggtgttgtgacaaataaacatctcattttagtatgttacatgcattcaagttgatatacttgcacttaggtgacacctaatcgtcacctagtgcgcacacgagctcaatcaccatgagacagtaaagtcctttgtcggaatcaagaaattagcttaataatgcactaatatcgctttgactctcaaaatatgctaagatcacactaagcggagttgtaagtgtccatgttgacattaaaaggcaatatggccactcattgttgaacaccatgtcgtgtttcaatcatatatcactaattataattcaaaatgacgtgctttcaagtgcattggaaatatctttctatgcatgtctaataatcatgtaaatattttgatgatattatattaaaaattggctcccaagtcgaagtgcactttttagtatcagagcatca

SEQ ID NO: 3167 - DNA, 775 bp, Cannabis sativa
gagtattgagattgatttggtgaactcttcaacaagtttgtttggatgtttgattgaataatatgaaaaaatagcaagaaaatcttaataagcaacaagagtacaaatctttaaactaatagttgggtttgcattatgtataattgtgttaagatttagagtttatggtctatatcgaatttaacaatttttttttaaattcaaaaattttattttacttctgttgcgattctaatatgaactctaaaaatgaacatgaaatgaagaaaaaggagactggctccttttttatagcagggtacgtacttttacctgcaaagttattgtcttgaacaactttccttaaacattttatttcatttaaattttttttggtacaaataaaataacacacatgattaagataaaataagaagtcataattcttgtgacaaattacaatataatattattacaacacatactttatttttatttgtaattggtcccaaatatgtaaggaacaggaaaatttgataattaaaagggaattaaagagatattgttattaaataactgaatcaaagaacatgttgacaaaaaaaactaaatacctaaataattgtctcgaataactttcaataaatattgtatatttcattttaaattttttggtacaaaaatagaagtcatatttgttatgaggaattacattataatattattacgacagacacattaatttaatttgataattaaaaggaaattaaatagatattgttattaaattggaatt

SEQ ID NO: 3168 - DNA, 2210 bp, Cannabis sativa
tccctttgtctttcactagagcagaggttccagtgttgacagagtttacactttttgtgggattatttcccttgtggacaggctcctctcgagcattctcctctgagatttccccatggacctcaagtctagcctgtaggtgagccaacatttttttgcatctgctgggagacatcttcttgttttgccagctttggatgagtttttaaaagttccttagccataagatataccttgggatcttgctcataataatatccatgtatataataccaatctttaatctcatcgccgttctggccatcaccaatgcctttaaggtcttattctttgttgttcgtctggtctttgtcactagggttttcatcgataaatttttcctgaggattggctttctcgattggattgctgctagttttgaatgtttctgcatctctcgcagtgctttgacgagcgtgcactctagagggtaggttaacatcatccatgatgacatcctgatcagggttaatgggcctaataaaagtctttctggtataaactatttttattgatactatttggcttaaagtctttcctcagctttcaatgaaagcaccaaaatatttactgtgattttttgaaactcaatatatcaaataacaactaagaaaaataaatcaaatagatgagaaaggagatagagatatttatgtggtttgggtattaatgaacccgagtcaatgagtcagttgtattggtcttaaaagccttgaagtattgcaatgggattctttacaagcttaagaaccctagctttttcctgtagtgtttgagtaatgaatttcccaaccttctgcattatggtattaagtattatttataggctagaattcgggtatggatatactcgtgacctgctatggattgcattgaacattaccaaataattttgtaaatacataaatacactaactttgggcccgtggactgaagcctagtcaatggggctattatgttccatcagcaggggaccacatgaggtcaacatgtgtcgtacgagcaccacctttgagtattttagtgtcagtataatggttgttggataaaagggatgttccttttggtggtacacacactctcagggtttgacattgggaacaactccccaaatccgtgggattttgtgtccaaggatcgccaagttaggctcagcctggcttctgggcatctcttggaaaatccttccagatgtatcccagatattcacccagatggctttggctacctctctttatttttgcaagggacacttctggatccagagacatccaacccttgatgtagatattttgcccctttgatgggcttgaggcccatctctccgtgcagctctggcccattatttcgtaaggctagtaggcttgaatccattcattttctattgggaatgtcacgtgtcttcctttcagattcttggataagacaaggtgatattgttgcataacttagctagtttcttggttttgatgaagttgttcacttgttctcaaaggttttgtatttttgtagaattgggagaatcaaaactaatcgctttatgactagttttttgatatttcactttgtcaaaatggagaaatatcaaagtgtgaatttgatttgccacaagttgtaggtctcccttatgatggaaaaatatctaaacactcgagatgaaactagaatcggatatcaaaaacccagtatactagtatgagtgtcaacttgggggtcgggtgtctatttttgggctttttggtagtcattttggcacttaaatgataattctgtcaagaaacaagggctcctcccctattttgaaccaagataagcagaatacccatagcatacattgcatctgagtgacgccaatgtgagcactatgttgaatgtcaacctaggcgctaggcctaggcccaatgtcaagatgggcacttattaaggtttttggccccctgattgtctcatttgcttcctaggaacacttgtatcctaattattgacaaaaatagagaaaattttagggaaacttcctgagaaaaatccttagaaatggccccggttgacaaagtgtcaatatgggcgctaaagccctgcccttgctaaacttgggcgatgggtcagcctcttggccatctaatgactctcggaagattttataagaattgttgttggaagtggcctaggtt

SEQ ID NO: 3169 - DNA, 1846 bp, Cannabis sativa
gccaatctaattcacatctttcttcgtatgttataatgatttgactttttctgtgtattgctatgtaaaatgtgtctttggaaagtatattggtatactgatttggctgtcctcctcattaactataacttcacatgtttattgcaagaattcttataaaatatctatgtcaatgtgctaacttttttatagttattttgttctttctcagctttgattggtaattggattttcatgcttgggtaatgaaacataattggtataattctgcagccaatgctatttactgtttcaattgaaattgcaataacttgtacaggaattgaaatttctctagattttgaaatggttgtctatatttcatgtttttatcagtgttagtttcggttccattttgtccattttcttaatcaagccaaaaatagagctctgtttgtaaattaatagtaatatgtgactattacttaattaagttattaatgaatgaatttgtgcactacagatagtgtatgacaaagacacatttacagtggttgacaaaataggagatgcagatatagacctaaaaccaaacatagagcgtttgaaaatggtctataaatgaatatgtacgtaccagtgcataagttatgctcttgcacaataaattagtggcgttggctaggtaatctctaaggaaaaggcttagacattttgatgttcaacaatttagctagcacctctatactaggttctttttctgtttttaacctatcatattttccaaattaattaagggttgttgtaatgtgaggtacaaaatttttatgggcattagttagagggcatctctttgttacttatttttacacttgcccaagttgaatttatatcaataaaataagaccattattgaagtagtcctccattctaaaacatagcgtatatctttgttgtcctcatttttctcagtcaagactcaagtaatttgtatattgacaatgaaagtggattttataattactattttgcatcaatataattttatctattttgaatccaaaatgttcttccaaattgttttctaaatgttgcaactgtttttttttttttttgcatgattttgtttcaagataacagagtatattagcttgcaactggtttattaactattcaattttggactcttgaatatattagttaccaactggtgcaagtcaattggtttagcttgctgaaaagttgaacccttgtgtgcatataggtatttgataagacttgaataattttgcacctgattaaactttcagatacttataacatgaatgaaaaaacatgtcatttcacatttcactaatgatgtatagatttgcatttcaagtaccatagagaatatttttgctacaactttatttgcttttttttagtttttctccttcttcttccttttctatagtaagtatttacaagtaggagtctacaagattagggacaattaatgagaaccctcaactaatgttgttctttgaaatacaaaatatttgcagaatttgagatttagtagaattcttttgtaaactcaatttatattcactattttcatcaggcccgacctctttatttgtgaactctaatgcattatcacataatgcattagaattttatccacttatttattgtttacatcttatgttaatctctgtttttgtatattgatattaagaattgtgtcaacagtattgctctagatgactatcaattactttatatcaactacttgtatatctactacttattgtttaacaagtgacaattgtggagcaaacatgaagtccaccctagacaacaacgaaaatacttttacaaa

SEQ ID NO: 3170 - DNA, 2345 bp, Cannabis sativa
ttcaagcccactacattcttaagagggctgagatctaaaatgaccataaatttggaaactaagttagaaattttccgtcgaacaaattcactatctcggttgaaattaattcagaccccccagggtccacttggaccttacatggcatctatggcccccgagatatgaggataagaaagtttattggcaaagattgggagatgtggttctcaatgacacaaaaccggtattgcttatgggtgatatgaatggtacactccatgacagggagtgtatcaactatactaatccgggtaactcatcaagatacgctttcgacttccgtcgtatggtcaacagggctggtcttatcgatttgggatttcttggccccgtttacacctgggcaaagggtacaaccactgccttcagggcttcggcaatgaagcgtgcccgccttgatcgaggcatggccacgacggactggagagtattgtttccaaatgctgtaattcatcatctatcagccacttgttctgatcataggccaattcttctagacactacagggggagttagcggtcggaatagactagttaagtatgagaacatgtgggcgcgtgatcctcgatgtttttgggtagtcaaggaagcctgggccaatagattacaccttaatccaatgattaacttccatagaaaggtccaggccacttgtcgcaaactttcattgtggaacaaaaaccaattcaagaaagttagtcaacaagttcacaatgccacagctacgttggaaagcacggaaaagagaaccccttcgaactggtatgcaattcaagaagcaaagaacaaccttaacgaggcccttctaagggaggaaatccattggaagcaaaagtctcgggttcaatggcttcatgaaggagacaaatgctcgaagttttttatggcctccaccattgtcagaaggagaaggaattttatccagtgcatcaaaggttccgagggaggtgactggatacgaaaccaaactgaaattgcccactgtttcatccaaaacttcaaagatttattcaagaaggcggacacgagcccatctgaaattcctcaggacctgtttgaaaaggatatatccactcaagagtctgaagatcttaacactctacctagtgaggaagaaatatatgcggcaatcaaggacatgggccaagacaaggccccagggccggatggtttgcctcctagcttctactcccatcattgggacacagtgaaacatgtgtcttacttcttccagcaaggggatctccctcaatacattaacgatacaaccatagtccttgttcccaaaagagacactccggcctacaccaaagattataggcccattgccttgtgcaatgtggcttataaagtaatctctaaagtgattgcctctcgtcttcgggagttactgcagaagcttgtttccctaaatcatgcagcgttcgtaagggggaggtgtatctcgaaaaatactatgatggccagagaaatcgtccattccatgaagaaaaaaagagggtctaagggttttatgatgataaaactagacatggaaaaggcgtatgataagatggattgggatttcattattttggtcttattgagacttggattcactgctcctttcaccgactgggtaaaggcttgtatcagggttaaggaaataagattgctgctgaatggctccatcgcaggcaaattcaaaccagagcggggattgaggcaaggagatcccctatccccagctcttttcatattggcagctgaagcactgtcgcggctccttacccttgaagaagacagagggcgactaaaaggattccaactgggtaggaacaatctatccattagtcacctcatgttcgcggacgacatcatgctatttggccaagccacaatgaaggaagctaaggttatcgtagaatgcttgaccaagtactgtaagtggtctgggcagtctatcaatctccagaaatcttcgattctattcactagaggtgtctcaaggagcaaatcacgagctatctctcaattcttgggcatgaagaaaattccaaacaatgcttcttatttgggcctccctctcttcacttcagccaaccgtatcaaggataaccagtatgtagttgataaagttcttcaacgagttcaaggttggaaagcgaagctcctatccagcgcgggcaagatgtgcttaatcaaatcggtgggatcagtaatttccaattacgtcgcctccttagacgtgatcccaattaccattgccaataaggtagacaaagctctacaagacttttggtggggagactcgattgaaaaaa

SEQ ID NO: 3171 - DNA, 887 bp, Cannabis sativa
gttagtagcagtgcccaaatctttcattttaaactaagacttaagcatttcttgaccatgttaaccttagatctatctttcctaattatcagtatgtcatctacatataacagtaagtagatgacatccttgatgtcacttctacgaaagtatatataagtgtcatagtagctcttagcaaaaccttgcttagtcataaaagcgttaaatctcttattccattgtttaagagattgtttaagtccatacatggacttaactagcttggataccacattcctttcccattttccacataatccttaggttgttccatgtagatgtcttcatctagtttaccatgcagaaaagctttagtcacatccatctgatcaatttctatattaaattgatttgctaaaacaagcattagtcttatggtcttatacttgactacatgagagaaaatctcattgtagtcaactcattccttttgtgttgttttcgcgttcattttgtttaaaaaaccacttacattgtgctatactcttcccttcaggtctagaaacatatatccatgtcttatacttctttaggaaatgcatctcttcatcaatagctttattctatttcttagcatccttccatttaatagcttcctcataggtttatagctctatcttctgtccctctaggatactcagaagtacataggctgtgtcctcattaggggtgttcattaaaccacctacaccgcacaaatcgctcgcaccacaccacaccacacaaaaaatatagtttgaaattcattacggtgctgttgcggtttgtacttttgccaattggcgcagtgcggtttcaaatttaataattgcggttcaaatcacaccgcattatatattacaaaa

SEQ ID NO: 3172 - DNA, 1007 bp, Cannabis sativa
ccatgttttacacaagacgaagcagggattaaaggagctttaactgataaatggaaaaaggttttacttacctccagaagtaaaagccctacaacaccgagtccaagccctacagctccaacaagaccaatggattccccaaacagcaaggctgcaagtatagcaactgttaagggctgcgagtcaattatcacctgcagcaatgtataattttttattcaatcaaaacacttgttagtggaatgacccaatttactcccacatcgatcgataggttcaagagcagtgcttgtaaaacttacactgcccaaaccagctgaagtcctctgcaagccctgagcaagaaaaccctgaaaacaagtggcgtcgacgaggccgaagacggcaatggagaaccaagcggagagtccggaggggaaaggtcggcctcgagaggcggcgaaagctatgaggaggaagccagcagggatgaggcggaaggaagagacgaagaaaggacctgctttcggaagaacctctttcatggccaccatagccgtaccccagaagaagaagggagacaccaacactgccaattcccatgctgcttctagcgtggattgattttggatttgcgtttgtgtctgtgcttggtccgactccacgaagcactcaacgtcgaggcctgttcccacgcagtcgagggattcagtgtcttcttggatgtctgtgtctgtaccggaagtggtgcagttgacaatggcgattgggtgtggccgtaaacgacggggtttaggtatagcaaccccatagacgagggataacgaagtaccagtatgtgcagaagaaaattggggtttggccaaggcatattttgatctgccgatggcgatggggcatggaattagaggcgtcgagcacgagcaccagctccccgccattgttggttcgaataactgacactggtaaaagaaaaacaaacgataatttgagaatgttgcatagcatgaaacgtttgggccacataa

SEQ ID NO: 3173 - DNA, 846 bp, Cannabis sativa
ttttcacaaaaactagtttttttgcaatgcatgtaaacagttacgtatatatatttgttttcatattgcatcataatgaagaacaatttattaccacataataaagtatatacattttttatatataggtgaattataagttatgatattcattgtttattgtagtaataacaaatctactttgcatgaaattttgaataatttaagttaaattaaatgtgtaaaaaatttattataactataatgaatagtcgttatgtaataaactactacaataagttttcatcatgattaaaaaattatattatattgtcttgcttaactgatttgtttctttttttggtgacagaatttgaagattaaatgaaattggtttttctatttaaaaaataattatttgtggtgtgtgttttgagacccttaaatagtgtaactattataatacgtataacttggaaattaattaatcacgtaatggttcgatcagagaattatcgatggatatttgagtgttagcgatatttaacattttcatttttttttgtttgtttttgtttttgtttatttgcaatatggttcgatatcgatcgataaagatcattagtttgcatgataattttcattcatcttaaaaatgtagttggtagagttgtattattcaaaagggtatagaagatagtttatctttaattttctaattaatgaggtgcttaaaaaaaataccccatatattatagaggtttctgtatgaaatttcgtaaaaatacgaaaaaaaaaactattttaaactgtaaatataagaaaactcctaaaaaattccactaccctaattaattattcctacca

SEQ ID NO: 3174 - DNA, 633 bp, Cannabis sativa
aggtttttgcttgtttaaagaggcagttgtacaatggggacccttgtgtgtaatggacatgtgtcacgtgtaaagaaaatgcctggactaactgtcaggaaaaaagacatgtaggatgtctgcactatcatggtctgacacaagggacaagatctgatcctgtgtcagaaaatgtataaccgtcgctacacgatctaggtctttttgcatggtagacgtccaatttcttttgggcggtcagtgtttgtgataagtccttcgactaatcttacaagcatcgcttaggcacacctcgaacctagtcatctccagatcccaaatagatataagccttccatatcctagatggcacagtaaggcaggacaaacttccgtgtatccttcggtcttgatctattcccaaattccgagagattcttcgtgatccattttaattaggagaacttggcttgtgatggcttgaagctgtccctctttgttcatgtcgcgtgtcctacatctgaaaacatggataacagtttttaattttaatagcgatggggcccgctgccgctaataataacttaaattggagaaacgagaaattttctgcctagttattagcagcaaacctgcctagttattagcagcaaa

SEQ ID NO: 3175 - DNA, 969 bp, Cannabis sativa
acattgtctattgtaatatataatacatatttatataacaatataatatataactacagtggaattaatgagcggttcatctcatcaaaaaaagaagaaaaagatcagaatgaagttgaattaattagcagttacgacttacagtctacagatatatattctgatcgagtgcattggagtaataaacaaattaaatgtttataatataaattaatacgggcatgtagctttgtgacatgttgataatcttttaaaccacatgcatttaatacttattatgtttttttttagtgaaaatccaattattatttacaaattatatataatagtcttctttcattttttttatctttggtactaaatgagaggacatactcatatacttatactcacttacttggtttatattaaaaaattggctgctcttgattaatccagaaaaaatagcaagagaagataattacaaaataaaaaattaggtatattatacacatatattttgaaatgccatgtatatatttatttattttttttgttctctaaatcaataaattctatatatgtatatatagctgttgatggatcacatatagtcaaagacaaaatgtttaatcaattgctactatacaatatatactctttatgatgatgataagggaaaaagcgtggtcctcgaatcaaagaatgattggagaccaagaagagagagacagctttaaatggcatcttatatatataaatatatatgtgtgtaacacataaagattatagagaatttcttttgtacgtgatctccccttcgttttttctctatctcttttctcattttctgtttgggattcgagattctttctgttttttcttgctcgatcaaattaattctcaagacaagaggagagaaagagagaaaatatgtaagggaaagtatatatatcaaaaataaaaattattttaaaaacctaagaaaaa

SEQ ID NO: 3176 - DNA, 681 bp, Cannabis sativa
aatgaatcagattcctctccagtcgtcgtcgtgatcttcaacgatgcaccaccagagaaaacatcttgatacttagaggctaaagacatccacggtccgtacatcggggacggaactccatcagtgttagccaccgtgatcggagacgacaaggtgcaccctcttctttaatggcctaaacggccacagaaataacaaaatatcccaatcttttcatattaaattgaagccacctcttgactcctgcatttaaatcaaagaagcagcccgagacaagaggtttcaacaggtttacctcaacaagaactctgaggaaagttttccaagaactcagattgtcctcctctaaatccactttaatcacctttccaactagtccgcccagtcgattaccattttccacagaaaagaactcatgaggcagattatgaatctgtatccacaaccaaaagctatccgttggagaagaaccttcagtacttggcagccaagcacggagggcaaacgtatagccttggaacgaccaagggccattctccaaaactcaccgcctatcctcctcacattcaaaacccagcttgaaactatttagactaggtgaaccagacgaaccatcagaaagatcaaagacaacctctttcttattccagactttagaagcaaaacccaaaacgtcctttg

SEQ ID NO: 3177 - DNA, 749 bp, Cannabis sativa
ttcttcgactttgaaaccgaagtcagaacagaattcgtatgaaaccagcttgtcccagagtccaactcgttattctccaccaatagaggcccattcaatttctcggataaagcctccaccgtttggatagggcctttgataaacgtgggctctgggtggtgatgaggtgttctagacaaacctcaaaatgaggattttcaacaacttgggccgcatctgggcctacatgggacatcatacaaagtaagacatttgcatcttctgggttatttcccaaattattcataggatgctttttctcacatggggaaggtccaacacgtgtctcaacagatgtcattccctcggaggaatgttttgaaattccaattgcctcattcctcgtacattccgtaccttcaccaagcgtatcatggatagtggcctcctcgcacgcacctgtaccctgttcttcgtggggaccaaaactggtggacggaatatccctcctcccctgagaagccaccaccctctccggcctatctctcagcaaagaaggacccttggtatcaaaacaattgcgaattgggactgccgccttaatccaaggaccatagagaggcactgcattccctaccggtggatacgcaaactccttttccctggtacagtcactccggtcgtggcccaaatgcccgcaattgaaacaaaattttggcagtttgcggtatttgaattgaatccactcccttctccctctggtgatactc

SEQ ID NO: 3178 - DNA, 1964 bp, Cannabis sativa
ccatgcacaatatcttcataatttttagaaaacattcctacagaaactccctagtccctagtttaattttttttattgaattacaaatctcacttctgaattaagacagtgctcatttacttgcaggtcactagcttctgaaaaccttattagattctaacccactaatttttatacaaacaagctatcttatctgactctaattatgcaaattgttttattcatgaatcaacagtgatacatatatgatatatcagcaaatatttttcgtttatgattgtagtttaagtcttcttacccttctctctctctctggaaaccatattttaaagggatgcacatgaagtcaggatggaaagcacaggaagaaatatgcaatataaataagtagctcaacttgggacatggttaacataaataagccagcccattcctgaagagcttacaggggacttttccaagtcagaaaatgctaaacattttatgacaatctaattgttctatacgagttaagatcaggctgagaaacgaaagattcactaaactattctactggcttaagtttattttttttcataaatatggatgttcgcaagtgcttaaatttgtcatattcatagtcctaattcctatgaggctttctccaagaatgttgaagaaaatttagaacatataattctagattttatctataagaagaaatttacacataagtggtttacttatcgaaagtattgtcataaaactctcaatgacaaccttttatatatgtataagacttctagtcttatttctctctctttctcaataaatattcaaaggttatactatctcatgtagtacacacattaattattaacaatcaaacatcatttatatcttctacattacatatacttaaattatacatgtttaatttttgtacacacttaatttatattagatttagctttagtttaggagctaatattgaattttaatattcttcatgacaatattagctcccatttttagaactttcaaactattccaagctcagctcacggcaagccaacttgcttatctgaatttgatttatctcacttaaattttgtcttgtaaaattttctctcgaagaaatgatagtgcattttcacatatttagtttttgcaagaaagattggattctctggactcgcatcatctattagttggtgcaaatcattcattttttgtattagccatgtattttcttaaattattattgttgttgctcaatattctactaccgttgttgagaaagatattatcagttgtctcttgcaacaccaagaaattgttcagatccaagtataaatttaaactatgaagttaatcagcatcataataacgaactagcttataattttcactttcttatacgcaaggccatagtctattatttgcttttatatatcttagtagacgtcgaactacttccaaatgcatttattttatgtacgacctatcacaccaactgtataaaaaatattaagtagattaaactatttaccgattgtcaataggttgtttgattttagaattgttttccttcatatgcacatattttgcaatttggtttcattggtgttgaaatcagctgcattcatgcattacaaactctttcaatagatatttggaatatttttgttgataaagaaatattctttcttgagaatgatcaatattgagccaagaaagtgtttcaattgactaaattctttcatttggaaacatactatgaattttcttttgttcaaaatatttccatgttgagttagcataaaatttcctaacaaatgaatttatcagtatgtttccaaataaaagaacttggccaactcaaacaatttcttggcctagagattgatctggcgcactaagaaatatttctttatcaataaaattattctaaaaatttattgaaatagtttggaatgcttgaa

SEQ ID NO: 3179 - DNA, 964 bp, Cannabis sativa
ctaaccttttcaaggataaattaggtcctattaagtttggtgcggcccgtgaggaagtggaccaaaccgggcctaagtcaggcttagttcaaaagctcaaaaaacccaaactaattgggccgagagggatacctaagccttctatatttggtaggcgacccaataacatgggtcattcttcgggtgccaaaaggaaaaaactcttgaacgatgttgttaatgttgatccctttgtcgccgagagtgatgggctaagttgtctggtgggagttgataagaccggaatcaaggatgcctttgctgaggagagtggtgttaatcaccttgcgaattcgaatagcagcgatgtatccgtagatcctaacaagaaatctagattgcttatcaatagtctgcgatccaacgaagggtccttcgggtttatccaggagcaaaaagatgggattaatggtagtgcccctactgatgaaactaaaatggctaatctgccaccagggcacaagagcggcactattcaggttagtgaacagagtatgtctattgcatcagatgccagaattggaggtaagtcagctattaactttgccgatgaaagcaaggagaatcgggattttattatggccgaggaggcgggccgaaacatgccccccaaggacccatgaaagttctttcgtggaattgccgcgggctaggaagcccggcggcaaagaaagctctcagagccttggttttgagagaagatccagatgtgttgttcttaatggaaacgaaacttaataggaggcgtatgaactcaatttggcgtagtttgggcttcggtggtgcttcctgtgttgatgcgattggtagtgcggggggcctttgtctctgttggaaagctggtgtcgaggtcttaataagctcggctgaagctggggtaattactggagttttctctaatgttcttaatggacctgactggact

SEQ ID NO: 3180 - DNA, 1050 bp, Cannabis sativa
agaaatgttaaaaggcaccagtggccaagtattctcttatgtgtcattatcattattgatctaattaagtatcggattccatataatttaatataaaatcttttagggaatgtcgctagcgaattgtaagacggcatgtcttaaagatgctagacactactgatgactaataacaatgcatatttattatgttagcagttacttacaaatttaaattttaactcgttctccatctctagagaaagacaaaaaaaaaagtacataattgtgatagaatcaaagattattgactgacctgtaatatcaaagataagattgtggaattaatgttgattttgaattatataaacatgttcattaaaatcttcggttactttacttaaaatttcaacttcattaattttgactatatagtaagacaaaaacgtacaaattaatcataattgtgacggtatatatgaaagtagtaattactagtactgacctgtatcagagataaggccagagcggaccatatcaggtatagcaacgaccaagcgataaacagcgagcatggcaggccaaaatccggcgactctaatgccacaacggttagccacttcaatagcccaagaagctaacaagtcgaccaccacacacaccacatcctcaccttgatcacgaaccaccctctccaaatgagcaggcatcactttctccatggcctcttctagggagaagaaatctctggccacggatgattttccctcgaatccatcgggtatagccacgaattcgatgctgtcattattattattagtttggtggtggtcgtcgtcgtttgtgaacatgtgattattattctcatgatcatcatatcgagcaacgatttgatcgtggatgaatcgaggggtgacgaagactgggcgaaagccttggtcgagattaagaaaggcctttgctagatttagcatgggagttacgtggccttgagctggatatgggacaaacactatgatttttgactctcctgattttgaactgtagttcttcataatgtttcactgtttt

SEQ ID NO: 3181 - DNA, 1071 bp, Cannabis sativa
gccttgtgagggttaggtattgaagagcacctaaagtgcttctatacaaggtaacatcatcaaacggagtaccttcatgcaatgacagtttgtaagaagtagatgttggactagcacaacttttagccccttcaagatgcactttaagtaacaaatcagcaatgtacttagtttgggagagatatagaccatcagcattcctatgaatctccacacctaagaaatagtggacttgaccaaggtcctttaatgagaactgctcattcatatcagagatgagtttttgaattaaggaggggttcggaccagtaagaagaatatcatccacgtataccaagagaataacaagtgtagaacccgacccatgcacaaaaagagaagtgtctgccttagatgcaacaaaaccccagccaagaagagtggatttcaacttgtcattccatgctctaggggcttgtttcaagccataaagagccttatttagtttacacacatgagtagggtaatttggatcttcaaagccttggggttgactcatgtaaacggtctcatgaagagtgccatttaaaaaagcatttgccacatcaagttgtctaatttcccattgaaatgaaatagcaagagtaagcaccaatctcactgtgaccggtttaacaaccggactaaatgtatcttcaaagtcaattcctggcttttgaagataccctttagcaacaagccgagattttaacctgtcaagagttccatttgcattaagcttaacccgatgcacccacttattcccaattaagtgcatgtgaggttcataaggaacaagagtccaagttccttgtgaaatgagagctttgaattctgtgttcatcgagttaaaccagccaggatgattaagtgctgccttaagagtcttaggttctgtgggaaagagagattcaggcagcttgtgtcgagtagcaagataagcctttggtttgaatattcctgattgagaccgagtagtcataggatgagttcttaatggtattgaggcaccagaaccaccagagaaaacatctgtaacagcagcaggcacca

SEQ ID NO: 3182 - DNA, 1153 bp, Cannabis sativa
tctctatattttcttggaccacacactcccgtaaacaaccaccatatctttcctaatgctttctacaaacctctgatctataccttctcttttaagttcttcgagaaaaattaaatctaggttgattttacaaatattgtcttaatggctctccttttctccactgccccactacatctcacattccaagatagaatcttcattaaaactcttcagctccctctttttcttcagggttcaaaatatttgacattgaatgccaaattattcagctccctattcctttagctcttttcataatccatcttcacccccaaattatccatagcttgtgaaaagaataccgattcctgcctattcgctttatttttcccttaccctaaattgaatttggtctagtctttcgtttcctcattcttctatttcccattcaccttcttcattccacaggttcctttacatttggctattcctcctagcctaaatttaatgaaataatatcatccttctcggagctacaattgtctaaacatgtgtcatcaattattctaacttccaatattgtttccacttccctattcttcgcctccaactctgagtatagatcgttgattcacgttgtttaactttctttgggcataatcattcttgtcttaaaattctcctgatcctttggtcttaattttctaagttttcccacaaaggaaggttgtaactaattaaactacatccaccaccttcataagctgtgactggttgcccatgggcataactacagttccaacacctaattcacttcaacccataatttccttgagtggggtattattctgacttctcattattagagggcttgttaaacaaggatccaaaatgaatctttgagctccaatcatccccgtaaagttttagcaaaagacttccatggggggacacgtgttcaataaagctcaaattatacctaggttctaaatttttagtgagaatcactaataactaaaaactgagatagtcatattaattatcaaagtaacatatatacacaggcacattagaaaatagccatacaatacaagaaagcaataagagctaatcaatagacaaagttgtagttttaataataagaaattaagtcagagagagagagagagag

SEQ ID NO: 3183 - DNA, 2104 bp, Cannabis sativa
ctctctctctctctctttattctacacctatgagtaaaactctctctctcatcatcacagtgtctcctgagtagagtaaacattgtaataaaaaaatattcattctaaaattattgttgtgggatactggaatctgagataaaaaagagtgttggacagctcgggatttagcagacaaagtgtaccatttaggtatcttggaatacctatatgtgttaaaaattctttgctgcagaatgtacaagcctcattccaaaactgacagctagaattcacagataaagcttaagaaatttatcatttgcaagccgagtggtgctaataaactcaatactgctgactatccacacatattggagtcaaatatttattctcccaaggaagataatatctgaaattgaaagaattttcaagtgttttttatggaaggggcgaagtaatatggatggatcaggtcatgtagcctggaaagcactgtgtaagaaaaaaagaggtggactggggctgttaaatatagcagaatggaacctagctgttatactgaaacatgtatgggttgtggcaaacaaaaaagatcatctatggataaagtggatccactgtgtctatatcaagcaagatgttttgtggaactacaaagctccatcaaattgtagctgggactggaaaaaggttgttgaagctaaagaaaaataccagaatatggttttccctgggcagtttgcaagaggagattacaaagtagctaatggctacaaaatgttgactccccaacagcgacaagttcaatggtgcaaagaggcttggtgtaagcttaatattccaaaacatagctttgtattgtgcttagctacacttgatagatcaaaaactagggaccgattgtttagattcaaagtaatagagagtcctttgtgtatcttcaacaatgttgcagtagaaacaagggatcatctattttttgagtgtttgattcctggtttatgccttaatcatataaaacaatggctgaattggcatgcaaagacaagcaacttgcaggggttgttaaggtggataggaagaagcaaaatgagcaagtttaaaaaccaagtttatgcctctgctcttgcagccgtggtctacaaaatctggatagccagaaatgaaaaattgtggaaacaataggctgtattagcacagtagatgcatcaacaattaatatggcaggtaaaaaccagaattacttatgtcaaactgaagagaattaaacagagtgatgaggaatggtttgagaatttagcatagatatctcgaaattcaatttgtatagacagtataggtatcatggcatcccatttgaaggtgcatttaggttgtaaaaagtttaaaaagtttagtagtaatgaaattcacagctgattcatcaaaaaaaaaatatgattaactcatagtaagatttaatctatgcaaatatgttgagatcttagggcctatggtttagattataataatctaaaattaatttaaaaaattgattctgctttctactctgatttggtccataaaaatcaacagtttatgatttatactagagaagtgtgaaaccaaagggtgatcagatggcccttgaacattgtttgataaattttcttgaatttgtagcctaacatctgaataatggattgacactctgatttattcaatccagcattcatatttgagataaaaacttattgtgacctttataatcaagaacaccaacattattagcaacttgtttctaattgtataaacttgttacttggaggatatccatggatcttgtaacattttgcaattgtgaggccaatgtcatcccaaaatgtgaacatttaactataagtctcccaaaattcgacctactagaaaatttacctaagaggtttgagatatttttccagagattcagtaggggcatgatgcagatttctctatctttcttcttaaatcaatgtggcatatacatttttgatgttgaggattggatcatacatcaagatttgatatcgagcagctgagtatgactcatttaacccccaaaaaactcatgaactcaatcttgttcctaatgagccataatatt

SEQ ID NO: 3184 - DNA, 2339 bp, Cannabis sativa
tatgttaaaataaggttaagccaaacacagccttaacccattcacatgcaaagcacagatgatcattaacttgtcacttaagattcgaaaaaaagcgtgtgaggaacacgtgcgccaccctgttgttggatgaaaccatcatgagattgaattttaatcaacggctctgatttgttcacttttttgtcttcacaaacaatcatatctttccattgattttaaagtgggacccacacgtgttcctctctgaacaatctcaaaaattatagatctctcttcaccattaatgggccccaccccacactttaggtgcttttattaccctcaatacttgccacgtggtgatcattggaccgtctgatccttagattatttcactctcacactctttaactaccttatttaatccttattttaacttttcttaaaaattaacattaaaaattaattcttttgtcctatactgtcacccaatcattcattcacacacaaaaaaaatttaaacacagtttttgagactaaacaagattttcttgtgtttctaactaattatttatttggattttttttaatattattttaaagcttatatatgtaactaaatttaggaaaataaaaaaaatacagaacactatgtgtggttggagtgttaatagttttttttttttttaattaacactattcaagttgactgtttaataaaatatttactatttatggtcgaattttaaataataaaatgaaaaatgtattagttggtttttattgaaaaaaaaaaaattacacaaagtaactaaaattcaacttttttaagaactttgttttttttttttaggttttttatttgtattttttattagaaaaatagagttattccacattactttcatgtagccgcaaaaatataataaagaaaaaaaattgtagatttgtatttttgtaaaatttttgtttatttttggtatttatgaaaatatccaaaaaaaaaagtcaaggttatttgatttaatactagaggctgcttaagctaatatgatgaagtgacttgtatatattgacatttgaaacaaaaacaagaaatgtaattaattagtgaaagtaatacaattcctataagtatataagtgtacccaacttcttattaattagcttataatgacatttgtggattaaaaataaattttaatttaatatattggtacttctgtagtacgttcagtagttgcataaatagacttttatttatttatttatttatttttgtgaataacggcgaatagggaccgtaggatatgaagcatctttcaatggtgggccccagcccaaatgtaataagcaagcaataccgttgattttcggcccaatgaaatacacacaacgacgttgactggagaatagcccacacaaaaagcccattttgtgactcttgtcagtcactcagtcagcaccaccactttttttttccccttataaaatgggcggtggtaatgagttgtaaatgggcccactatatttttggattgtgggccccacacaacttcattaattgtatcagaaccacagccgtcagatcaaacgaatgttcttccttaatctaacgtcacgtgatcctttgcctgtccccacgtggaccttatgagagagtgtggaacacgtcagcataaatatttttttgattaaaaaattaaagagtgagatttcccccttagttgggtttagttgagtttaaaaggtttaagttaagacttaagtactaataatgaacatatttttcaaaaaaaaaaactaaatactaataataaattgtgttcttcaaactttaatatatattaatttgtgtatcttaaatttctgtctcagagttggataaaaattcttcaattcaacaatcttaataatttgatgagaatttttaacgacttaaaaaatttaggaacacaatataatatatgccaaaatttgaagataaatactaattaaccttaatataagtatgaaatattgcgctatgattagttaataaatttgatgagaatttttaacgacttaaaaaatttaggaacacaatataatatatgtcaaaatttgaagataaatactaattaaccttaatataagtataagatattgcgctatggttagttaataattttttatattatctaagagtactgttattaagtacgagtaatattaaatacgatattttacgattagtagacgaacttttaagtagtatttaatacaattataaaatggcatcttacaattgattaacaattttattaaaatataatatattattaaattacaccattaattactaattctgctatcga

SEQ ID NO: 3185 - DNA, 1017 bp, Cannabis sativa
gcaatcgacctgttctgaatgaaggctccttgattttggttaatgactaagggaaggaccttagcaagtcttaagcaaatgagcttcgagatacatttgtacaccgtggagcaacaggcaattgggcgatagtctattgctttggagggattgtctgtcttagggatcaaggagatagcagttttgttaaaatcttttgggatatttccttaatcaaaaaagctcaaaatggccaagcagaattcttcccctatctcaggccacattgacttgaagaactcagagttaaatccatcaggccctagactttttgaactaggaatgctgaataaagccttcttgatctccttcctggtaaatgtctttaagagagacacttgcatatcaagagagagtttatttcccttcaagttggagaaattgacattcttagaagctaaatgatcactccccatgtagctcttaaagtgattaacgaagtgtttaacaacttcaaagtaatcttcaataagctcacctctctcatttataaaatgaacaattctattctcctctctcctttttcttgatgctggcatagtaataagctatattgtcatctcccttctttaaccagttggctttactcctttgtagcagaaaactatgcagcaacttctccttatggctaaaatccaacatagcctttttctcttcctcaattttccctaaatcccccgggtttgcttgagcttctaacttggcttccagcaatttagccttggcttcagcatgttggacctcaatgtcacctgtttttttgttgaaggttctaagccaatgttttaaccgcaagcacttaagcatcaaccctttcagccccttgcttcgaaccggtttagtccaactctccatgacaacttgcttatactctttatgatgaacccagaagttaaaaaacttaaagggtttgatcccaatgtccccagccttagcagacgaaactacacaagagcagtgatccgacaccgtttccca

SEQ ID NO: 3186 - DNA, 2268 bp, Cannabis sativa
aggatccatgaaatcactaaattgttgcatctaaaccaaacatcataaatctcataatcttctttaggctttggtaatcgtccatcgacaaactttatcttgttccttgctgcaagtgaaactatcatcgatcgtctccaatagctatagttctcacatccagtcaagattttaggaacaagattaaccataggctgatcaccattaaaaatgtagtaaggacttcgaggattttctccaggtgatttgtcattagcttcgagaatagagaatttgtcagtgttctttgatccatctccttcattagttgcactttaagtttgagttcctccacaagccatgagagagaacaagagaaagaactgagcacactaagattgtggctctcataccatattacaaaactagaatagagaagaagaggaaaaaaagagaaaggagatgattgtattgaaaatagtataggagtacaagaggagtgagtcttatatagctcaagctcctaatcaatacaatgaagagagaagcaataataaaaaaccagaaaaataacaaaactgacagctgacataatttaccaactaactattcactaaaacctctagctcactactcttaataagaaaggaacgtttcattatatataaaataaaatatgagtgataataaaatcacagttgaaatatttttggagttttttttatttttacactttaaagtagttttttttttttttttgatgcaagttcatatagcaaccaaaattcacatagcaacccatatggaaactatcagaggaaccatcggagcaacccaagacgtatttttttttttcaaaaaagttaaaaattgttatattaggtaatcacccaatattcttttttttttatggtcgtattggttatagtcacaatattattcttgtgatttaaaaaaaattattattcttgtaaatttttgaaaaactttgaataatttggagtattaaaaactgagttcttcgaattcaaaaatcttcaaatctatttccaacactataatctatttaaaagttttcaaaattttatagggatgatgttataactataacgaacactgccataaaaaaattaactaagaagttatagtaggaagaataacatcccttaaaacaatatagagattttttcttttttagggtataaatatctcaaataaatattttttctaatacaaaaaaaaaatttacatttatactattttatatttagaaaaatgttaattttaaagttaattatttacaaatatatttttgaaattcaaaattgaacaaaaatagaaccagttgacagtgtgcaagacacgcgtgagtagggaattatattccataagttgctaagttatataattctccacataaaagcaatgccaactataataattaaatttgtttttcatttttttgttgtcagatattgattttcacccaacatattatataaaaaaaaagaagaaaaagttgtgagatattttgactaaaatgactaaattaataatatatatatatacataaaaaattaagtattttatttaggtaatctcacatgcaaaaagtatgataacttttgctaaataaattatatattataaaatacaaaaaattatgtatatttgagattttttttttttaattttactaattagatagctatttatgtgtattattactattatttattgatgtgtttttgtatagaggtgtaaataactaaatcgaaattttaaaaattaaaaaaaaaaaatcattacacaatcatttatatatatatataatttatagaattcataaaaataacacctagttatctagacttcaattaaaggataactaaaataataatcaattaaaaatatagtatactacctttgtaataaaaaaataaaatagaaattagatgtactcataaaaaactaaatatatattaatttttttttctataagttaaacaattaaatgacaacgaataaacaacaagacaacaatataattgtaaaataaaaataaggtgttaacacactatattaactcaaaacaaactgaaaaacaacatacaaataaacttcaaaattaaaagtaactacaaaatactagtgcaccaactcaaaaatatatgtacataataaataaataattatatgctcatttttatattggtcaaataatttaataacaactaaaaataattgtataacaacactacttacatatgtaaatcaattagacatcaa

SEQ ID NO: 3187 - DNA, 1455 bp, Cannabis sativa
cagcatgttgcaaggcttcggctacagtttttggttcactgaatgaggcttgaaatttggagtggctgagaaatgttcgaggtttaaaaatccctgctttggccctggttaccattggatgagtaggttgtagtggagccgtgtgtggtataggtagggaagtttcaggttctgcagtacctggagaagttgggaactcataatcgggtgcttgataatcatattcatgagtagtgtcaaacatattagtggtatcagtggtgtttcccctctcagaacttgaaacagaacccgtacttaagggtgtagcagcagctgaaggtgtacaaggaataggagagactgatgtggttgcaggagtgcttggcattgtatcagctgaagtagaagaaggagggagaatgggcagtgatgaccaagtagagctatgaataatgactggtgcagcaggttgataattgtttagaaaaccttgtttgaaaggaaaatcaagctcattaaagactacatttcgagaaatatatattttgccagatggagttaagcacttgtagcctttaaaggtttcactgaaaccgagattaacgcatttgatggaatggaactgaaatttatgagattgatatggacggaggcaagggaaacaagctgaaccgaaggttttcaggaagtcataatctggtggatgtgaaaataaggtttcatatggtgatttatttgacaatacagcagtaggtaacctattgattaggtacactgctgtttgaaaagcatcacaccagaatttgaggggcatacttgcttgtgcaagcaaagtaagccccatctcgactatgtgccgatgttttcgttcggctcgaccattttgagctgacgtatgaggacatgagtgatgaaactcaatcccatgagtgttgacaagatcagtaaaagctctaaattcaccaccccaatcagatctaaggcatttgattttcctttcaaatttggtttcagcaagggctttgaattttagaaaagcatcaagtgcctcagccttggatttcagtggataaatccatgtaaatctgctgaaatcatctaagaaatgtatgtaatatctatggtttatgttggatgcaaccggggctggtccccatagatccgtgtgaattaaatccaaaacatttttagccctattatgagagagtttgaatggcaaagcatgagattttccatattgacatgcatcacaaaaggattttaattcattaacggaagcttttacattactagactttaaaacacgacttaagacatttgaagacggatggccaagacgcctatgccaaacatctattttggaattggaaaaactaccagcactaggctgtgttacatgactactactggctactgctataccagaaaaaaaagatgatctgttggagggaaaatgatgagatgttgtggaga

SEQ ID NO: 3188 - DNA, 1562 bp, Cannabis sativa
aggattttaatccaacagtaaatgttaaagagcttagatgcatgtagctaatattttatacttttgatagtacataagagagtttacagatcgatcaaaattagttacatgaaaatataactttaagacaaaaagtatccattatacaatattatcaagccattataaagccaatatagctactacatttaaagcttttattattatcgtattttacttgtagtcattattaatttaaagttagttgcatcaccctatctcacttatataattcactattttttacacaataagtttattttatacataaaatcaaatgagaaatgatgatgaatttattttatacataaagtcaattaatatactataaatttattacttacatatattcaaagtgctttggcatgattaattactaaatataaaactaaaataaataaatgaacatcaaaataaaataaaatatttttttaattaaaattaaataccaaatcaaagtaaatatactaaattatgagagaatcaaattttagataaaaaataaaaaatgattaaagaataaaggtatgagaaggggaagaagagagcaccactgtcttgatgcttgcttcaagccatacaataccttttttagtttgtaaactatatttggtggtaatccctcttaggtctacctttgggatagacatatacacatcttctttaagatcagcatgtacgaaaattgtaacgtcctaaacggagggatgccacgtgttgtaattacataacgctaatcccgtttaattgggatcaataagacaagtaattaaaaataaaataacttaaataaataaaataacttgtaataataagatctatctttaacttaaaaccaaaataacattatatatattcagggtttagtgaaatctttattttgtaaaatattacaaatcatttacatacaagttgacttaagaggcaaaatagaatttctatacaatctctccgttggacccaaccctcatggtctagcttggctgaaaaatgtacaatttatcttcaaaaccatctaattcatggttgactcgacactgctttacccttgcttgcacaatagagcacctgtgagccatgacccaacaacagtaacaaaaaaatataatatcaacttatagcatacatattatatacaatacgccactacataaaataattatgccaccacaatagtcattatgctatctcagatataatgattccaccacatcttattattatcctaattttttcttcatgacgtggcatgcttacatggacaaaatcagtgccacatggcagtacatctcactaaaaggaaagccaagtcagcacccgagaaagtgaagaccctgacactcaaacggggatcaagtgatagacaacctccctctcaagagttggccggtcagcccaaggacaacactgtggccggctagcctagcaactatagaggcctggccagccaaggagtgctttacaagcctcactagacacttctacacgtgaccaagagtaatgggttgcgaattgggccctta

SEQ ID NO: 3189 - DNA, 796 bp, Cannabis sativa
tgctggtccaaggcatacaagcttataagcacctatatttaaaactatgaataaaaaatgggtgaagcattgtaactagtgttagtttgagatgattattgtcaaaatacgcaataggaaactgaagagaagtcatcgtagcccatgttttgattttttagattcaaatataaatgaaattaagacgggattatggactcctttagctgatttttatcatttgtttatagctagaagtatgaagaggtataagttttaatttatttttattatttacaaaattattatatgaaatgtttttttaataaaaaatacttttcacaagtgtgtgaatgtcattaagcaaataattaaacaaactcttagtaaatttagaattaaataaattattttaattataaaaataacaactcaaaaagtttttttttggagatgctaaaaatcctagttctcccaaaataactaaaataaaaaataacttttaatttttggtcgaaacattcctagaagtaaaaaagagtttatagaatttaagccaaacatgaccaaaaaatatgtggaattaattttaggggtcctctgttacatttttcataggcaaaaactcaaaataaactctcgggagcaccttagatagaacagtttgagctatcttaaagtttttcttcatcttttcttctttaatgcaattcttatttagttttttttttaatcatcctaaatctatggttatgaactaagtttcattgtagggttttaatgtagttttttgatacttatttattattattattat

SEQ ID NO: 3190 - DNA, 874 bp, Cannabis sativa
aaagcaaatgtagttgttaattagctccaagattccaataacctaaatttgaaattaactcttgtagctataattgtgaatcaataattacttatttatatatcttatagctaaatttggaatattgtatataaaccaatggcaattacactaaatctaatttggcaattctaatgacaaaaacccaactttagttttaaatcaacttaggactaaatttttagccaagtccaatcatcactaacactaaaataaaaactatattcattattataatattattttattaatataataaaaatatttatttaataaataaattatttaattattaaagtaaaaaaaatatcggtctataatacttaatgcccactattattagaaagacaccaagataaaaaattcacctttctcaatcttttttaattattatataattttacttaataaatttgggctcttaatttatttatttcattatgttagcccactaattgatgaagttgcctccttccatggtttggctatgtcctatgtgctcaaatttacccgaattagttttaaatgtatgaaaaaattatgataaatagattatttttttatttataaattagttttgagataataacctaaacttatacaaatttattaattatattattaacaggtgaattggcagagagtgctctttcgttactatctccgttaagaattttaatccttattcccatttattctctattggggatgggacaaggaatcttttaatggtgactggaacgggtcgggaatacagcgctatataatgaacattactaaccaattatgaaattgtttcgtttacttagtagttgtttgaataaattcttgtaag

SEQ ID NO: 3191 - DNA, 741 bp, Cannabis sativa
atggtaaggtcaaatcaatattgagcagaatgcaagttctatatcctccccaccaaaaaaagaagcgcttacacccacaaacattggattacttactgtctgaagtccttctcgctcaagcatcaatgtagaatgaacatgcaattgtacagcagcataaaactgcttgtcagcaatcagcttctcaatgcgagctggaacctgaggcatgtcagcagtcatgcaataatgttacattttcaagtaacaaaccttaaaatgaatgaattttcaagtagattacgtgcatgccatgataaataaacaagatttaaatactcttgtcgaccaatattcaaaagaagatggtaaacaaaccttagctatgccctcaatttgatctaataaggaaattatgtgacgcaatgtaaccgaccgataccataactgatgaagctgtttattacgagcactaagacactttttcgcgtcagccaaatcaacctttaagacaccaatacattctgtggattcgctgaacaaacgcaatatctgaaaagaattaaacaaatattggagaaaaaaattaaatttaaaaaatacaatgtaagatccactcatggaatagatctaaacagagtaaattataaattgtacaaccaaaggctttctaacagtctggaaacctctggagatcttagaacaatcaattttactagcaaatataccaaataacaagaataatttatttttcttataaaa

SEQ ID NO: 3192 - DNA, 1852 bp, Cannabis sativa
ccaacgatcttcttttgtggggtacaggtattgtgtcctgaaaaatatttaggggatggaaattgatatttggattagtccttgtcatatctgagtaactccatgccagtatgtcctgattcttcttgactgtggacataatcttttctcgtattgttggatgtaagtttctccctagcttgagaacttttatgggatccatcacactaatgttgacttccttaacatcctcaagttgttctgtcattctccctattccaactttgggatccaattcatcctctatctcctcccaaatagctcagcttttgcctgaacaattattccaagagtactttcaacatcttgtttgaccataaacagagaccagaaaaagatgttgtagcatcttttgacacttttctagtcaaatttgatcactttggtagtctcgttgtcacaagaaaatgttatgcacatgtgcctcatgatgtaactgtaccaaaacttactaggacaggtcgtcctagtatatcgttgtaggctgtaggccagtccacaaccactaatgtgcagtgcttgaagacgcaaaagttatagtctatctttaatatgactttaagctggatttccccgattggcatcagtgagtctccattgaatccttggatttgtatggggcaaagtgacaaatttgcttctgtcaacctgattgcttgaaaagaaaacttgaacagaatttttatagagattctattgtccacaaatacatgggaaactcttttgttggaatttgggctttaatgactaaagggtcattgtgggggaaatgcacaggttttgcatcctcttttgtgaaggtgatatgaagattcatcatccccagaagttgcgcgggtgactacactaaagcgcatatttcccctgcatgttctaattcctttaagtatctttttcggagatccaactgctccctgctatatgtggcaccccaataattatggcaacatgaccgtcaacgggtggcaaagttaaacctggtggatatgggttcttgagtcctagagctaatcctaccaccgctacatgtgttggtagtgagggtaaaccaggaaggtgtgttccgagaacttaacggagacttacccccaacacaggatttaccgttccctactatcgtaaaataaatagttgtctatgagctatcccctattcaggatagatgataagaatctagatccattaattttatctttcaggtagtcacactcggtggtagtgtgccccacgtcacatgatattcaaatttcttcctttaatctcttttgtattttcctccttgggccatccttgcaggcttttgatagtggaccatattgtaggtttccttgtgtacattttctcgagtaccaactagacttgtgtagtcagaaaatcttagctcatactctttccttggtttcttgggagcatccccccagttctgacttcatccacctcccgttctcctagaatggcttacacttggttcaactacttttgtttgttgcttcgactatctaggagttatattgcatctggtctatgccgatccatacccaaaagaaattgatttgcgtggatgcatgcccgcaggtagcgtgtctgtagatagttggagtattttgggttcctaaaagtgtaactatgagaattagaattggcggggtaaagcttggtgttgttgtcgatggagtaggtactgaagatgttcaaaaagattttaaataactttttctatgttaataatttgttgagctttggacatgaactcggacaacgtctcaactctatttctttgcatttcactccaccagatggagcctactcttaa

SEQ ID NO: 3193 - DNA, 779 bp, Cannabis sativa
aatggtgtccttatatatgtgtagtgtacacaaattcacaaactaattttgttgggacgaagttacacttttaagttttaagaacgttgagtagtttttactactataaatgttcaatgagtttgttttgtagttatgtggcaaatcaaaatattattattattccaggtagtatgagaacatggctacagatggagcaagaaaattcctacattcttcttaatttgtgtgtggatttttatttttttcatttcccgtccaaaacgacaaataaaaaaataaatattgacgaataaaagaaaacggtgtcgtattatttcagaatgttaaaaacggtgtcgttaggagaggttatggtctgcatctgactgtagaagcaaaactattcaccgcgaaccgtgaaaaggttcgttgctactttggtctccattatcgtttcgaagagccatagagagagagagatcgttgttcggggaaagagttaagagagagatcggatcgatatgaagtcatgttaatggcggactaacttctacagcctgctaccttcagatctcattgatctccgaaaactgatctgattggtagaaagatttgccaaaagagtcagtaagatggcaggagctgtctccgcgctcttccttctcgacattaaaggccgtgttttgatctggcgtgactatcgcggcgatgttacagctgttcaggctgagcgcttcttttccaagctcatcgagaaagaggttttaattcctgcttaatttgcaattttcttttcg

SEQ ID NO: 3194 - DNA, 1755 bp, Cannabis sativa
ttacctgatctagggctccagtattggggaaaaaaaatgcttgagtgctttggtcagcacaatagggaaacctatcatggctgacaaagtcaccaaggaaagatccatggttaagtttgcgggggtgctagtggaaatggacattatggactcaccacctaaggtgatacactatctgaatgaacatggtagattaatggaacaagaggtagtgtatgaatggctaccaattcaatgtaagaagtgtaatggatttgggcatagtgcaagtgattgtaggaaggaagagaaggaacaggggaagaagaagaaagagtttatcaaaaaagctcaaggagacaaaaaagacagcaataaagatatgacaatagcagtggttgatgttattaaacagaaagcagggtcaagccttgatgaaaataaaacaggggaaggtgatatgacagattctacgataggggtggttgcacctgaagctgaggagagtcaagctaagaatggggaatggctcacaccaaaaagaactcaaagaataaaagctaagcatggagagaatgttgggaaggaggtggctggtactagctcctcaaatgtttttaaagttttacaagggcaagaggtagaagttaaaggtgtcgttttaaactccaatataaaccacgaatttctgtaatgtcacgtgttggaacataagaggcctcaataaaagcaataaacaagaggttgtcttagacttgtgtagattaaaaaatattggtgtgggggctctgttagagaccaaaatgagaggcaataaagtttgagaaatgattttcgacagatttcctgggtgggattactattctagtaatgttgttgaaggccgattgttgttgatttggaggaaaggatttgttagggtcatagtcttggaagaaaacaagcaatatgtgcactgctatgtcaaaatggtagggcatgtagaggctttttgtgttacttttgtctatggattgaatgctttagaggagaggaaatctctttaggttggtctagaaaagcttaagtttcttatcaagccttggattgtttaggtgactttaatgttgtttataagtatggtgacagggtaggaggtaactctgtctcggctgctaaaatcaatgattttaacaattggatttctcttggtatggtggatgaattaaaaaaggtaggatctaaattcacttggtctaacaatcatggagtgaatgatagaatctactcttgcattgatcatgcctttaagaatgaagaatggctggacttctaccttaattcttttgctttgtttcaatgggaggctatttcggatcactgtgtttgtattatctcttcggaagtggtgcaagatataggagttaagccgttttgtttcttcaatttctggacagatcatgaaaggttcaaggagattgtcatggcaagttggaacaagccattaagggtgaaggactggttgccatttactttaaaaccttgaggcttaaacacctgctaaagagttttaataaaaatcagattggagatgtgggggctaattatgagttggctaagagtcaataccaggaagctaagagcatggcgcaagctcatccaggagtagctgtttggattgagaaggagaagatggcagcagataactttagcatgaaagagaagatgttccatagtttccttgtgcaaaaaagtaaaataaactggctgagtaaaggtgatgagaacactgcctat

SEQ ID NO: 3195 - DNA, 974 bp, Cannabis sativa
aggagcttgagggtggacccctccttgcggagaaactatggcaccctactatcctggaacgatcaacggtccatgaacaaccctctgtcaaggataaataatggggatatgcacccattggcctacgtgtccaactctttctaacattttgatctcatcctttaagtaaccacactcattggttgtgtatcccacatctacgtgatacattccatttttattgtaatctcttttgtacttccccccagaggcttccttgggccttcctgtagtggatcatattgcaggttccttgtacacattttctcatgtgtcccctaagctggtgtactcggtgtactttggctcataattcttccttggcttttttcaaaatttcacttcgactttggttctttccacttctcttactctgggaatgactcacattctattctagaacttctaattgtgactttgactgttgggagtgatactacatccaatttgtgtcgctttatacccagagaaatgggtatgagtaggtacctacacaagtgcagaaggtccatagacagctagagtgtactaagtttcgagaagagggacttgcgaagcatatcttaaagtagatgtgaaaggggccaatgccagagggacttgaaagcttattggtcagcatcttctaagttgatgcaaccttgtgctcttgacataaacttaaacaaagtctcaaccctttgcatctctcccataacagagagccaattgtaagtctagattgcagggctacaagtttcatgttgtcactcacctttgtcttagtcgctgcctccatcatttgttgaatgaaattcttcagcttctctcctacttgttgtttgacatttgtgatcgaccccacttccatatcatagtctgggcgactatgaattgctttcaaaaggcggactacatctctttctatttatggatcaatttaggagccaaccact

SEQ ID NO: 3196 - DNA, 2691 bp, Cannabis sativa
  modified_base (1486)..(1491): a, c, t, g, unknown or other
  modified_base (1922)..(1922): a, c, t, g, unknown or other
tctattttctggcggcaaatctttttcaacttaacataaaatgaaacgctacgttttacaaaacttttactggcgtatatttgtgccgggaaaagtcttcccaccaaccccattcacccgcgggaattttccccctttttttggggggacttttgccgacgcatatttgtgttggcaaaatccttccaacctattttttttcttggcgaaattcctcctatttttttgaccttttaccgatgcataattacaccgacaaagatttatgaactattggagtggttcacgtcttaaggtgattacctcctacacttttttcggtgcaaatcatgaattgtgctggtattaggagcctatgccaatgtactgttgctctggtaaaagtttttaaccaaaattttagcctttggcataggcactttatcccagtgacttatgtcgatgtatttggcctaatacattgggaaaagtcgaatctcttgtagtgaaaattttaattttctcattttattcactcaaagaaggaaaaacgtgtaatgcgagatattaatagtttatattaacgttagttttcccaacaatatctaacgtattggatagtatgaattaatgccaccatcatgagtacgattagagtactagaattaaattagtattatggttaatcattaaactatcggtacgaacgttcagatcttaatatacggattagatgtaattagtagacttatggtaagtgcgtgtatgaccgctcagttataaatcaaatatttatgttgtattacacatacttttctaagcatgttgactcacaattgttgtgcaatgtgtcagttatgagaaagcaaaaactgatcaatggtgatccgagaactctggtgaagattgtacatatcttgccacttagacctcgaggggttagatatgtgagagatcagatggagcaacttttgttttgatgacgttagacgactctgttggaattaacatattatgtatgtattttgtaactagataaagggattccaacttttagtttgttttagtaaaattttaattattacgaatgttatttgaaattacactttttctttaaaaaagaatctttgattagcaaatgctagtataataattaaaaatcaatgctttagatattataacatactttagatattaaggcatgacagatgacattagtgcaatgtatgtcactacaaaaaaatttacttatagtcacaaaaaaatttgtggcaaaaagtaagcgtgtgactaattataaatcatcattcttatattgtgactgaaagttctaaggctaaatgtattagttacaaaaatcacaatttgttgtggctaaatgtgtttttagtcacagtacttattgtgagtaaaagtaaattagtgacaatttgtatttaaatactatattttagtcacatacaatattttatagtgactaaaaatcacatttaatcacaaaaaattnnnnnngtgactaaaaaattattactaaataaaaaattattactaaaggtagttgttttaatttttttttttaaagtgtgtcatgactacactcacgagtcactactctcacttaatttgtgttgttattatctttcaatacaaagtcttttccaaaattacaaatattttttcaaataaaatcaataatatttctgctttttaacccttctactacatattgttcaccaaattacataaagttgtcaaaattaatcatatcttcaattttaatttttcctttttctcgtggaattttttttattttggattaatattacattaaataaacatttatattagtacaagtgaaaatgaatatttatattgtttatttatttcaaatatattaattttaaagtttcttatttacaaaaatactgtagaaaaactccccnagatgtgcaaggagaagtgtgacacatatgtggctatgtgggcgagtgagactcacacacgagtgagggacaaagcctttaaaataacccgaggcttacaaactgtagtgtcagagcatatcagtagttgccacatcgtgaattcagacaaagtagatttcaacgtgcacaacttcttttctcaatgcaaaacgactaaatgacaacacaaaaataactaaaaaataactaaactataacatataaataaattaaagttcatcatattatgcaaacaaaaataaatttataaggcaaaaacctcaaaaatactataccaaaataacttaatagcaacgaataaataacatgataacaatttcattttaatataaatattaattgggcatcaacacttacatcaatttacaaaataaaatataaaaaatacacaaataaaaaaaaacaagtaatatacattcatttctcttagttgaacaactaaataacaaaaaaaaaaagtgcatgaactccactacaatatgcaaattacataagcatgaaaataactctaagaaaataaaaaaacactactaatatataaaataaaatatatatatatatatattcattttcacttggttgaataactaaataacaacaaataaacaatttactataatatgcaaattaaataggcatgaaaataactccacaaattgcatcaaatcaaagaaaaaacacacaaataaacgatataaaaaaattttaaaataactacttaatattt

SEQ ID NO: 3197 - DNA, 1144 bp, Cannabis sativa
acctttttcaccaaacctgagtaacatatataagattgtaccccatatactcaaaagggtgaataccatttaagctactatttttatatattaattatgttatataactttttgttactttaaaaactatgtgtttagtttttctttatgacattttaaaaactacttatagtataatataatttaataaattgaattttaaaataaatgttatctaatattaaaaaattatagaagggtcactatatgattaatattatgagtaactaaatggttttttaaattttaaaaaaaatgaaagaatatatacttctcatattatgaaatttataaaatgttcacggtaacaagtagattatttattcggttaaatcttacacactattgtattattcggttgttctattttgacattataagggtttcattaattagttcaggttaaatcttagaattcatttttatgatcagtactatattgagagaaagaagtttgtaataataagagagatattcctttagagttcttggagtactttgtgagagttgatgtgtatagtgatagagaagccttagatttttctactctagaaatattttctcaaataagagttagaggtgttattttcattatctacttaatttctacactatatagagatgtgatatgagttaagtcagtagcgcactcacaatttaaaagtgagagggcgtaatttgtatttttgtatagtagaggtaaaagtaaagtgaaaaaaaaaatatttcttgacctctaaaatatatgtaatctagtttaaccattacaccaaacctactatgtgtataaatatcatattttactataaatatatattataactaactaaaatacataagaatcaactatccttctcgctacaatgtgggtccgcccttaagttcaaattaaattcctaaagaattttagatcaagacaatatcaaattttacatattttaatttaataactactattaaaattggttagaactattgtctatatattgttattatatattgggcactaatattaatatagcattgttcaaaataaataaaaggttccaaaataatatgtttagcagtgcataatattaactaccttctttgcctgtttgaattg

SEQ ID NO: 3198 - DNA, 1528 bp, Cannabis sativa
gtttggtaataaacagatctagctccctggaattgttgcatgtgatgattatatcatcaacatagattagcaacatgataacataatgtgatttttccaaaatgaagaaagttgtataagctttagagttctcaaattcccactgcagcagggagtttttaaattgatcaaaccaggttcttagagcctgttttagatcatagattgccttgtctagcttgcacacatgagtaggatgttgtgaagactcaaaaccagaaggttgcatcatgtaaacatcctctgaagagtgccattgaggaaggcattacttatgtccaattgcttgattttccaatcctttgtagcatttagagtgagaacaactctcactgttgaagctttcaaaattggactaaaagtttcactaaaatcaacacatggtctttgatgaaagtccttgacaaccaacctggatttgaaccattaaaatgagccatcaccattaagtttaatcttatgaacccatttataatctactatattgtagaaaggagaaaagggtactgggatccaagtcttattttttttcaaggcccaaatttcatcttgcatagctttgttccaccctttgtgttgcaaggcagctttaacagtcaatggttcatggtttaatagatcaaattttgcttgcccaagatatagcttaaacttaaaagttattgcccttgctcttgttaccatggggtgaacaattggaggagccgggtgttcaatttgttgtgcaggaccatgtgactgagatgaagcacttcctagactcatacgttcattagcagattgcacatcagtagaagtttcaagatggaaattattactaacccgagtgtgagcagatgacagatgttggtgattctaagttgagttattctgaattttcttcagcttgagtcccatgaggattgagtgatgtattctgaaccattgaaggcagagtgaaccaggagtgaggagtatttaatgtcaatgtagtttctggttgatgattgttcagaaaaccatgttcaaaggggaattcatcctcattaaatattacatgtctggagatatagattctctcatgggaacttaggcatttgtagcctttaaagattttactatatcctagattgacacactttatagagtggaattggaatttgtgttgctggtatggtctgatgcaagggaaccaggcagcttcaaaaattcttaagagcttgtagccaggtgctttggagttgacaatttcatatggtgatttaccacttagcacagaagtgggtaactatttatcaagtaaacagaggtttgaaatgtatcagatcaatattttggaggcatatgtgcttgatctagaagtatcaatctcatttccactacgtgcctatattttctctcagctctaccagtttgagttgaggttctaggacaggaatagtgttgaaactcaattccactttcgacaaccaaatcagagaatgcatcatactctctccccccccccccc

SEQ ID NO: 3199 - DNA, 626 bp, Cannabis sativa
gactaatttcaaggcgtaacaggagttgacaaacttaatctagtgatgaggtggctttaggagggcatttttgtaattgttggttagggtgagctgctgctttttgtagtgagtgagaagggtataattagttatgcaaagtttggagtaaactctctgcatcaatggaaagcttttgctctctaccattgtaacagacaccctctcattgtctcaggttttataattcctatattcaataacaatatttcctaattctccattgttactgtttcattgttttattgttattttggctactgttttgctatttgctactggtttgagtgtgttgcagcaggtgcttatcataatttcagcaggaatcatcaacacattcaattctttttgtttgcagcgatgacttggcgaccatttgtcatcatattggaagcacaagcccttctccttcttgtgttggatttggtttttagtcgatcttttgacctcacctattggtttggtgtaggtgggtttatttggtgtgttcccttgtgtgacatttgtaaagtgcaccatggtttgatcgaaggtagacgttctttggcaatattgagaggttgtccgcaacatttcttctatgtctt

SEQ ID NO: 3200 - DNA, 1970 bp, Cannabis sativa
gttactctttaatattggaagtcttgagtagtcaatgaactgattatatacaccaatattattacagaaatgaaaatccatattttctttagatatttctctttttattttcctaatgttattgaagtggacatattttggcaatataaaattaaatttaattacaaattaggctctagctgtattttcacaaattcactttggagctgaggtggctattagttttcttctattctagtacagtctaaacaggtcttttctatatttccataggttcattatccttttattgtatgtgatgatgtttccttaagcttctttaaaaaagaaatgtgcttcagtagggtttgcatttaggaaatgtctactctagccctgtatatgaagattctgcttatttatgattgccttgttagtattgttattgttcccttaaagtcctccctataaattggaagaccgtatattcttttctgggcaattttcttgtttggtttttttttttaataaatatatttgattacaatttaggtccatgtctataatgatgtcgttcctacatgtggctcttttctttccccttgaggtcttgcattgacaaaatcatgtgcctaaatcctctttaattctttaacctgttgttattttaatggactttttttagttcttatgtttgattggtgctaagtagaagttaaataacttgcttctatggctaacgtgtcttttgcactggggaaaaatgaaaagagatctcctttgctgtatatgacagttgtagctgtagatatgtagatgtatgtatttatatatgtaattaacaacaatgtggtgttgcagatttggatgctcagggtgatgtgggaagtcctgaaccagataacctgcttgaaagaagaatgaggaaaaaacgagattcttctattgattatgagaagcatcaagatgatataggagagttcaacaatagaagattatcttccagggaggatactggcaaggatggaaaacagagagatgagaagcgcaaggatgagagatacaaagacaagtatcgagaagaaattattgatagagacagcaagcatcgtgatgataggccaaaggatgagcgtcctgcaaaagatcatcttagcagcagatctgaagataagcatgttaaggatgaaaaggacagtgcagaaatgcaaaataagaaatctaaagagaatgatcgggatcgtgatcgtcatcgtgaattaactgttagagatcgtgaccgacatcgtgagcatgatcgtgaccgtggtcgcgatcgtgattatgatcgtgatcatgattgggattgggaccgtgatcgagatcgagatggggaccgtgaccgagaacgcaaccgggatcgggatcgggaacgagaacgtgagagagaccgtgagcgtgatcgagacagggactatgatcgagatcatgaccatgattttgatcgggactatgttagctcacatcttgatgaccgagcttctagatacaaagatagcaccagggcaaagaaaagatctcctgatgaccgtgatgatatcagtgattttccatctagaggtagtaaagctcgttactctgatctggaaaagaaggctttaagtggtgatcgattagattcagatgctaataagggaagatctcattcacggcaaactctggtagaccctgtgacaagcaatgaaaagcggaggaaatcccccagctccagtccacgtgttggtgttgatgagtataggtacttctctctcttttttcttttaacattggtgtattgtaaagttgtgataatatttggtaattgaatacaagttccttatgaaagagttaacaatccaagttattttaatagagaggctgtcagactatttgaattgaataattatagaacagcccttcttcttcaacggatccattattttaagagacagtgcagtttctgtatcattact

SEQ ID NO: 3201 - DNA, 735 bp, Cannabis sativa
ttttctttgaaaatgtttgccacatgcatcacatgaggggtagggaatttagacacatccacataatcattgtaagccacagcaaaagcttggtctgacttctgggatacaacaccttccataccttccctctctactctagtggttccaaccgagacattcgccacctccggcgggttaacattagtaccaacatcactagccgacccacccccaacacccacaccaaccgggtcttccttctccaacctattaatgtcatgaatatcatcaacctctaacagagcaaaaccattttccagttttgaaccttccctaagccacggaccataaagaggaatggtacgaccatcatgaaccgtaacagttctcttcctaccggaacaagcttcctcctcatgaccaatcaccccacatttgaaacaaaacaggggaagacgttcatacttaaagtggcaccaccatctcttcttcctctcatcagttagagacactcccgccaagagggggactgcaatattaattcgaacttgaaaacgtaaataatgattcaaaatcatgccattacggctcaccttattagcctgaagcagagatcccatccgcttagccatgttggccacacactcctctgtcataaatggcatagggacccccgaagctttcacccaaatgtcgagcgaggacaaatctgcggatttccagtcaccatcttcagggagagccgccaccagc

SEQ ID NO: 3202 - DNA, 1143 bp, Cannabis sativa
taagagcataaccatcgtagggagacaattcacacagcttctccacacgaggtttttaatttttggtggaattttcaatctccaaagttcattccaaaagtctgaggtttcagcaacataccaaaaaccattcaacttctgcaacaaattgtaggagctcttaacaaaatagaatccatttctttcaaaaaaaaaaaaaccaatgttacgagctatcagtcgagtttccattaagcggaatgcttagaatagcagctttgtctctgtcgttgaacatctcagaaagcaggtctatattccatgcatcccctcctagttgcataaggttgtccactgtggtattactaagagcatgattgatggttgagatgaaggggttttcttaaataagaagccacgactcccccataattgttagattttttccatctccaaccttccttcgaactccttgattgacaacactttgggcctcccatatacttctccaaacaaaactcgggttgtttcttaattgtactgtaagaaaggttccttgggaaaagtaacggactttgaaaattttggaaaccagagaatttggcctgactagtagtctccacccttgtttaccaagaagcgcaagattataatctctaaggctccgaaaactcatacctcccactcttttatgcttgcacaatttttcccagctcatccagtgtataccttcatcttttgaattggacggtttccactagaacttttccatattttgctccatgtctcgactaacctcaatggggagaagaaagacgctcatggcataactcggcaaagcctgagcaactattttaatgagcagctcctttcccgcttttgaaagaaactttgaatcccaatttaacactcttttacggactctatctttaaaaaatcccaaaacggggtatttatttctccccatggtgcttggtagaccaaggtatttactattttcatcaggcatgaccatttagaggaaattacataatgaatgtcgcattgggtcttcggtgttggagctgaaaaagattgaggatttgcccaaattcactttctgacccgaagcatattcaaaaagctgcagtaattcatgaacacgactagcttcggacattgtag

SEQ ID NO: 3203 - DNA, 1223 bp, Cannabis sativa
aaatcgttgaaccattcacaagtactcaaggggagtcgattaaccttatcttcgaagagatcgtatttattcagtatcaagacaaatggggtatctttgaaacatgggtgcctgaccatagtttcaaagagctccttgctttgcatcatcttgttttgaagtaggctgccactcccattactctctggggcaagagaaaactgatcatagtcactgagagcaacacaaaagacaaccacgcgcacatcttcaaacatttccacccatttacacccctcgctcagtccctttgcgtttacccttatgagttgatatctgccaaaacaagatacagctgtaaagttaaaatcaagatcatgattaccagctaatccaaagactagctattttaagatgagtagtaggtaagtaccgaagtcattgatcaacaatggaatcttttaatccttattattgtattactagaccatgagataagtggcaagtgactaatttctttttctttttccttttgcactatttccactgaatcttactaataaagataataaggttaattataatgttcaaaggaaaaatgaacaaagtcatgctcctaattctaccgggcaacaaaggatctaaaacatcctatgagtaatgtattactatatcagtatttagacaactacatcaaagaatagataattagagagctttgtgaaataaatttgtgtgccaggagctttgtgtacataaaagagaaagttcaagtatatttacttagtttgaggttgcgaaggagcatccacattgtctgtgtatgtttcagacattggacttcgatcatctaatgagaattcaatgaaagctaaaccatttccttgagtgaccccttcagcatacaatatgtctctttctgaaggctcatattcgttgcttgagatctcaacagccttaacagaagggaagggaaagaaaaagagaaactgttagtcatccaacattaaaaataaaaagataagtttgttaaaacaagattcggtgtgcctatataatacaaatatagatgcatatgcaaacatgtacacatacatgagcactaatacatgccagatgtttcaatataactgcaggcatgtctatttttatatgtctcatcacccatccaacttcctcaaaatgaccaggattagaaggaatcccaataaccgatgctatacagttgaatagaacaaggcata

SEQ ID NO: 3204 - DNA, 786 bp, Cannabis sativa
tgcgtttatcttggtaatgctcttgtctcatggtcttctaagaagtaatttgttgtgtttcgttcgactaccgaatctaaatacataacaccgctcaagtcttagcaaaaatgtaccggattcaagctctcttgcaagaactatataatttttctcttgacagtattctaattaattggtgtgataatatgggcattagtgccttaacctcaaatctcgcttaaacaaaacaaatcgagctagatgttgattatatacgagagacaaggtgttggaattttttttgaaaatcaaatacattcgttcaagtgacaaattgtagattgtttgaccaaaaatctatctcatgctcaatttaattttttgtaaccaaacttggtatgctccaaaccccacttcgtttgagaggtgatgtgaaaaaaataaatatacaagagatgcattttagtcatttatggaacactccaaagagggcaatttatgcttttgtaatgatggtacaataccattagaatattatgatttatgattttgtacccctgttttgttttagattgtatataggtgtacaaagtctaaaatattcctgcggaacaagctgagtaattattcatctaatattgtgtgctttttccaattataaactcataagcaacttgcatatttattagcttattgaattgtcgttgtttgttttgagtaatcttaaccttttacttgagtactactcgtatcagtcgccgcagctgctgccaccaaatacgacaacacatgcacaattctaat

SEQ ID NO: 3205 - DNA, 1784 bp, Cannabis sativa
  modified_base (1135)..(1139): a, c, t, g, unknown or other
ttggcccaagcggatcaccactgttagccgttgttggcccaaatggagatccattcgactctggccccatcatcggttaccccactcaccgtctcacctccttgtcatctctccacttcgcctaggaagatgattcaacctccaacaataattcaacccattcgtctcctccttgtcatcatcggatccccctcaccgtctctttgcccaagcgttgcaactcattatatcggtcatctatgtttgacagggcatgatattttatggaggtttttggttcgtggttgagggaggaaaaataaatttgaactttttttaggtttatattattccattttaccttgattgctaacaaaatatattacaattatttggtaattattctgaaattccatgattgttgtttatattaacttggttataatttttgataagagctatgcatatttttttctatgtaagttgacaaagacattgggatgatttaggggtttcatagagctaatgaattgggtcgtggttctcagaacgtcgctgatttggtggctttgatttcttctatttgctcaaaatgcaagtgttagaatattgtccattatagtatttgcgtaaaaaaatgctagtcattcttataaaaaagaataattctttataaaatccatttattattgaaagattttaatatatgtagtaacattttctttttttattttgacaattaataaaaattaattgtttgattaataaatttatttattaattgctacaatagtaaatatgtgatataacattaaaacaaaaaaaaaaagactaattaaagggtacacaatatataaaataattaataaataaattagaaaataaaggatatagtgacactttatgtatgttgcagttaactttttagtctgataaaacttaactttaaacgcctttagtgacgcccaaagagagaatgtaaaaggattcagtgacacgcgcgaagtgtcactaaaaagtgttttcagtcactctcattagtgacgcgggttgaagtgtcactaaacagttttagagttacttaatgtgagtcacttaaacctatttttctagtagtgattcctctgacaacatttggcgccgtctgtgagaaatnnnnntgttgattttggagaaaaatcatcatggctgccaaccagacaaatggaaacaacaacacgggatcctttaatgttggaactatgaatattcccatcccaggagatggaacaagcccaactgatacaatcattggatgtgtgggatgaacaaaggtcatcccctcaacctattcccaaaaactatcggtcatactagggaaacctcgatgccagcaactatagtgggtcacttttcacctatcatgccagcagtagtctccgaaggcattatccaacttactacaacacttaacacaaccatgcaggagcagatgtgggatttgcaggtcgaagtcgatggaagaggacaaaacaggacccgacgtccaccccaggtcccaaacccatgttcaagcaaccctcaggtaaccaccacagctagacgtcgtattgagcgtcctaagaatactcgtactcgcagagaacgtgtgactgaacaaggaaatcacgatctaaatcaacctacaagcgacttggcatgaaataaggagtcagttgccattgatgtcactcgtcagactaagagaagagagaagagaccgcaggaagaagactgtaaatggtagaactcgcagagttgggccctcttggaaattattttaccag

SEQ ID NO: 3206 - DNA, 785 bp, Cannabis sativa
cataacgtattaatatgtctaaggctcatagactcgctctaaaacatctttggttagtccatttggttaagacaagtcttttaaattgggcacgcatacctaattggttcataattcataaagggttgtgctcttgattagtgattaaagtggaatgggtgtggctatggtgtaaagggaatggaagagtagtgttcactatacccaagcatacccaagctctcttttctccatatgtatagatcaaagaagtgtaatcaacattgtcattggagatcaatatcaaaatttgaggtatgcctattattatgttaatgctctaaaattaaatgtttgttcttggttaatatgaatatgtatggttagttgttgattgttattgatatagcatgttcaatgttagtaattttaacaattggtatcagagtgtatccatttgattttagggtttgtatttaacaaaaactcattttttcttttaaatttgattttttttcgaaatttatattgttcgagagaaaatcagattggatgataagtattgagtttataaatattttggattgtattttccgtttcatttatgttaaagatgttgaaaactccaagttttttcaaatcttaatggtcgaatgtatatatgagatttactggtttggagtatttttcgagcgaactgagtatggaaaaatgaaaaagcacgaaaaatgatgaaaacccttcaaacggcatccaaaaaggtgtagaggaggtcgagatccaaccgagtctgaaattgggttcag

SEQ ID NO: 3207 - DNA, 2260 bp, Cannabis sativa
atgatgagatttaataaattaacaatcttgggtttccttaagttaaaaaattgtaaataagttcaagtgtgggatggtagacttttgtctagagcatgttaagagatttttttaaagaagatggcttaatctacttcttattatgccatatgggagttttaattattgtaagggaactctaaagacatggaaagaatgatgaataatttttgctgaaaatcatcttcttcccaagtcaaaggtattcagtggatgagtagatcagccttttaagtataagcataaaataaaaatgtattagttttagaagtattcataactttaatcttgctccaacatagaaacaagggttcaagctacttgtgcattacgttagggatctttagtaattggtttatcctagtagaaactcttaaaggtcatattggctccaatttgagttttatttaaagaagtgttttggaagcttaaagttgggtgaatgaaggtctacatctattggaaaattgtatcatgagagggtgtgactattttaatgagccttggttacttgataatattaacccttaaaagatttgtaggtattttgggctggtgaattctaagattattggtttaatgaaagtggggttgtaggagtaggagatgtgttggttaaaaaaatcaaatgttggtgttgggtattcctttaagtagttagttaatgggtttttccttcttaagttgtcgggtgtgtactctattaacaatttttaccagattttgcaagaattaattggtaaagaaaatatggaggacaagtctaggtttcaaataaaattttggaacttaaaactcctccaaaatgcaagaatttaactttgaaagcttcttcaagttgtttacctattgaaatgtagttgcaaactaggcgagtggaggtcaaccgtgtgtgtcctgtgtgtcatgatgggggaagaaactgttatcctagtcttttgcgatgtacttttctgctctctgttttttatgcatctcatattgttattcctctgggctgaccacaagttggtttggtgatgttcaagaggagcttgataaggagtttgtgcttgtctttatggacagctcaccttcctccttctcaaaggcctgtcgttttggaccatgtgtctcgcaattattactgattaaacccattattttgtcaaataataatttgagccctatatttttttttaaatggtacaaaagaaaaaaaaactccttacctcaatttttttgtaaaaataaaacatcataataacctgattggaggtgttatgactaggttatttacatttttttgcaactattcatgcaaaaaaatggctttatgttgattatattaaaaaaatgacaaagattgatattagggtattactttctaccattttgaaaatacagaatttaaattaccattaacaaaactaaaagtttggttgataatattcataaaatataaaatttacaataatatttactatattaatttgatcccaatattttatttaacttatcttttggcttgtgcacaagacttaaggactaagagattagctaagccagctgttcacacttttataaaatttcatgatatccttctattttagaataaagaatccattgcccgaatttatcaataattactacaatatcaagtaattttgtcatataattaatcccacctaaatgtatttacaagtgagagttattttttcaacacagtcgcatctctttatagaagatgatattatttgcgtccgcccaatatttcaaaaacatttctctctttacaaagcctttacttttataccaaatgacgaaaagtgaatatatttaaaataatattaattataatattattaattactaatattcaagctcatcctaatttgttgaagtttattttagtagttatttttgtgtggttgcaaaaagtaaacatccccctttagttttcttctactattggaccctattttgaaagtgccctcatatatatttaccatgtctaaatatgtcaaaatcctcataagacacacatttatacacacatttatgtatattttcagacaaacaataatttttaaaagataaaagcattctaagataatttcatcaatttataagtttcaaatcagtgaactttttttttggtcaattggatgagtatatttttcactaaacaaaattttacatcctagtagcatcaacttgccactttttacaattgttaaca

SEQ ID NO: 3208 - DNA, 784 bp, Cannabis sativa
gagagagagagagagatgtcgaggaacacgatgatgaggttttgagagtctacgagactcatggctagctccagttgggccatcagaggtcagaggctatagtttggagccggtgaggagctccattaaaagtagagatgaagagggtgtgagacttgtctggggtccaaggaagaaaataagaagcgaagcaaaaatctaattttttttatcttttaaataaattttaaaatttataaattattttatagtatatatttaaataattaatattatgtttaccaatcaatttcaccgtgtgtatactagtatacttcagtcatacactgtggcacttatctaagggttttggatggaatagtaaataccaaattaaaatgtgtatctaaaagattttgttgtcaaaaaaatagtttgtgggttaagtgtggcaaacagtataattcagttaattattttagatttaactttttattttatattttataataaaataagttttatattttttttttttttgcgatttaccaccatctttgggtaagctatacttttgcatacaactaaaaatataagctaagtaaaaaatttaacttatttaatttattttgataactattatataaatatcttttttaataaaaagttttttttaaaatgtttggatactattaaaaaaaaaatgagtagattaggagttatataaagtattttaattttaaaaatagcttctcaaaaatactttatcaaatcgaagagtgttcaaaaaaagtagagatattgg

SEQ ID NO: 3209 - DNA, 969 bp, Cannabis sativa
tttgttttggtgcaagcacaattatttttgagtaattagaaatgtgaaacacaaaattgtaatttgaaatgcataaaagtggctttttatattagttttctcactcttatttggtaatttaacaaaaatagctggatacaatctgccacataaatttcttcctattttattaactttagatgataagaacaatatctcctggtttttgttttgctaataagagtatcttttcaacataatttccataatttttgtatatcataatattatttacatcaataaaaatggaaataagaaaattggattatgcatcactttagcttatttccctttttgttctcatataattgcttgtaatgaattaggcacaggggcttgacattgatgaggctaataaattcttcccctaaaacatatttccttaaggaataatgctaattacaacattctatttcaactttttaaacttccatcttttatttttttaaaggaaaatttgactttatttaaccttcaaaatcaggtactataaaaagaagcaatacagttggatattccccaaactaaaattacaatcatgataaaacatagatactctagtaatctcatgagcaaacacattagctaattgcttaaccaaataaaatgaaacatttactctcaaagtatggacttacaatcttttatcacaataccaaataaaataaagaaaccaaactcacggtactttttaaggaatccacaaccaagagacaatcgatctctattattgcctgagaccaagaattagtttttagccagcttaaggcctccataaaccccataacttctatcttaaaaatacatgttgggttacttattttttatttatttttatgctggtattaaatataattacaagattaatcatataaatttatttaaaatttcaaatagtttaccttgttaaaagataaatttgaattcttt

SEQ ID NO: 3210 - DNA, 575 bp, Cannabis sativa
ttttttttggtcctacatactgagaaggatagcttaggtatcctaaccattagttcaatatagttctcattattcattatatatgtttctactcttgtccaatattctttaagcataattttccttttgtttcttttttttagctactttaattaattttggtcacttttgagttcaattttgaaatagatttgttactttttctttttcttttgtcttttttcagttgcatttgtttaaaaggtatctcttcttggattaataattatggccattacattaattttcgtactctaaagagtattaaatgccaattcaatcctgtaggggatgtacatgtttgtaccttaagcggcccaatgggccttaacatttaaactactagaacaactgtcttaaaagttcaaccagtatcgctttgtagatttgacttagggtttatcccatgtctatgctatgctaagtgcatgtagagataaaagaactagaaagtaaaatcttaatatcagaagaaaaaataataattcaaaactgagttttaatttctgacccactagaacacctacaaaataaaa

SEQ ID NO: 3211 - DNA, 2442 bp, Cannabis sativa
agtaagaaaagtgtaataacaaaaacagtaacaaatgtagtttgccaaaaatgggaaaattccaaaagaatttaaaaaccctagactgtccccaactatttataacacccatagacttacaaaagatcacctctgcctagtgccctgtcctctcttctattactctatccttaaacaaaaaaccccatgattcttcctcttcttcttctttcaaattctcataacaaaaacttagaaattagatgaggcaagctagatcttctaatactaaaggaatggtagaaattgatcatcatcatcatcaacaactccatcatcatcatcatcatcataataataatcataataaaaataaactcatagaaaaagaagaagatcaacctcatctttctggtgcttatattcgtagcttagtaaaacaactcacctcatcatcatcatcactcttcatcatcatcatcatcttcaacaatgaatcaaattcccatcaacaaaaacaaaaaagatccaaactttgataatgatattaaaaccccaaatcaaaaccaaaaccaaaaccaacctcacaagaaacaagttaggagaagactccataccactagaccttaccaagaaaggcttcttaatatggctgaagcaagaagagaaattgtcactgctcttaaatttcatagagctgccatgaaacaacaacaacagcaatctcaaccaccaccaccgccaccgcctcctccgccgtctccgccaccgcaaactcgggtcaattcaaacctcccctgttttgaagaacagagtaaaaaccccttttactcatatcttccaaatccatacccaaaccctaatccatattcattttccccaattcaaccccaattcaatttccctctacccaaccaaacattgggattaaatctcaatttccaagatttcaacaacatagacacaactctttattacaacaacaactcaactgaggctaaggcctcagcctccactactactacttcctctgtctccaccgtctcgatgggagcaggaggaagtagtggtagtagtactaatcccagttcagtaccgggattagatttacatgcagcaatggatgatgaggaaatggctgagatcagatcgattggagaacaacatcagatggagtggagtgatactatgaatttggttacttcagcttggtggtttaagttcttgaggagtatggagaatgaaagtaatgatgagagtcatgattattgtgatgatggggttaatgggtttaagccatttgatgatgaggttatggagtttccggcatggttgagctctaatgaagctgggtttgatgatcatcactgttatttctccgatgagttttctcaggctcccgctttgccttggtaacaattttaaactaattattattcttataattattactttttaatttgtgatatacgttttttaaataagaaaaaaaaaatagaacaaatgttttatgtttttttttaaaaacaaaattatttaatacaattacttgattaatttataaaaaaaatttataatacatggtaagtatctatttatttcgatattgaggagacttttagtttgttttttgatataatttaatgaataattttatattacatccttataataatcattttgctatattttttttatctgattaagcatctaattttttttatttattgtgctaaaataacctagattaaaaaaaaattctgaattcttattgaaataaaaaaaaaaaaaatatagcaaaatgatattttaaggtgtaatagaattatagtcattaatttatatctcaaaaactctaaatattacatagtgaacaagtttaaagtacaaatgttttatgttgctttatctttgttatgttctttactttattctaaaatcacttatgtaattaattaaatttcgttttcataatttgtcacttttaagtgtgacaaaagcactagatctttaaaaggatcatcttttattttattttattttgttttctttttggtgtaattaaaggattttttgttgtgttttaataaagctctttaaaaatgcaaaaattgtcaagaaaaggtggaaaaggttttggtgtgccatcgtcactatttgttatatttaattattttggtccaattatatatttttaagtaaccccacaagaatattcattttttttttctttataataaatttcaactcatcaaagggtatcatgtcataaatattaataattgttatatatatatataaagttgatatttttgattgttggctcataaatttttctatacgtaatgattttggtattatgattttgtgattcacagcatggacattgaagaaattgaaggtatggatgaagactggttaggttaagcctcaaaaaaacaatttatatgatttttttttttt

SEQ ID NO: 3212 - DNA, 2967 bp, Cannabis sativa
aggtagtagttcattgctgtatttttcttacgcattttagatttgatttttaataagtgtttgtactattttttttaatttattttcatcgttactttataggcattttttagtatggtgttgtttattaacagggttcttatagttctagattttatgtttaaccattcttgcttattgtttttgttgttattttctagaagattattaggtatagtgtatgttagattatttattttgggtgttaggcatgtgatgtatgtgatgttcatttatgattgcaatatagtttacctactggttataaattaggtgtattacgtgaatgattttttttattagttttagtatagtttcaaggtagttttgaaccgtttccattatcattatcatgtttatttttgtttgtttatctttgcaagattgagaatacaagttccatccttctgattattttaagttctagtgatactctattttcacttacaatgttattgacaacattaaggaaaaaaaaaataaaggatgtgatgccaatatttcatactactcatatccatttcttcttggatattcctgtctgagatcaatcgttgttcttctctgactccatatatttcaccttaattttacaaaaattccaagtccatgcattataattttctaaatctacaatagaaaatgataaggggaatttgtgaccatttgcatcttgtatgcaagctgagaacaatgtgcctccaaatgtagcttttaagaaagttccatcaatcacgatgattaatgtttatgctaatatttacagattgttccaatgttgtttggttttattggcatgattttaattgttctgtgttaatgtattacgtatatttctagttttaatatatgtttgaagctatctatgttttaacattcatgtttctatttttgtgtctttgtatatttatggaggattgggaatacaaatttcatccttatgatcattacaagtctaagtgtgtcactacttgcacatactgtgttatttcagttgtagttgagtatttttttagttgatttcagcacctgattcaacttgtgtattggccactagcttcgtaatttatgtaatttattacttgattaaattgcctattgtaaaatatgagaaaatgaatttagtcattttccttgcaatttaaaaattcaagcatgataagtcaactatgaacaaactgtttagaaactgtaatgcaacaactatatttcttattaagaatctaatatataatcttaaaacaactaataaccccctatgtgaaacaaacaaacttaccacaatcgagtttcctctgtacgagtcgtgtattgccaattacgagccatatttatataataatattatagtagtacaactattattcaacaaatttacaacataatcacaactacgaatagaaaatgtgtttagacatcgtcaagtaaagatttatcaatatttttttggcactgattaaaatcactcgtaagttaataatattttatggataaacaattgttcgaactctgtaaatcaaccaattttatatatgaaaaaaatctaaccatatattatatttttttagagagtcttgtgttggattgtcgatatgaaatacttaaatgtcataaaactattgtatatatcaattggtaattattgacatgtcaatttctagtaatgcaactactcagaaacattaaaaatagaacaatgttcccatgttcgtagctcgagatgaatgcagttttactttattcttcatgattcgatatgaataaatccactattgaaaagctgagaaacaatgataatgaaacaggtaaaatattagctattgtattaatacatttttttttttttttgaaatatacctgttttggattgattgagaactccagatctatttctcatagatctacagtttatgaatctgtaaatttaattatgagagttagttttctggaatttgaattatcattcatggttgaatttatgtttcaaaccattttttcagtagatgtttgtatcattcggtaattataaatgttcggattggtttgggttttcttctcaagtgattaccagaattaataatggttgttcgattgtcggggttgattcattttgtcgtcctcgtttgattgcacaaagggttcaaggatgaaaagcgtgggtcgtgtgactggatggtaagtgcaagaggtatttgtaattttttttatgtgagctgtataaatgtttaaattgggaactcattgtaattttgtaatattgttgcctttgtttatataatcgaaaaagcccttttagttttattattcaacagaaattttattgaaagaaaaaacaaagttaatatcaaacaaaacattcaatcaaagtaaattaatcttctattagtaattttcctaacaataattttcttagtgcgagagttccaagggttctaacacaatttgcgtacagtaaatttgatgagagttcaaatttattctacgcaaattgtgttaaaaccctcataattatattagccttattttatagaagaaaagaaaaacttaactgataatgccaattccaaagattagatagagttttagacctatcttttattgaatttagctttcagttggtgtgtaaaaatacattaacaatatagaaataaataaataaataaataaaaacataaaaattttcatatttgaatatcattccttttttaaatgcaatagagctcataataacacataaaaagtataaacactccattttttttcgcagcatataaacacaacatagaaatgtacattacaacaatattacatacttgaagatcattcattcatacacccatcttggttagcagaaaaaaaaatcaatgaaaaagcatacacaactaaaattgacacccccaacaagaccatttctctcaaattactaat

SEQ ID NO: 3213 - DNA, 1517 bp, Cannabis sativa
gaaaaattactaattaaacataggttcaatatattattattttatacacaccaaatatggtccaaaattctcctccataattgttatagtgttattaatttatacacatttttaaaactacttcaaatttataaaaaaaagttataaatcaataagaatttatctatacacatatttttgcatctgttatttaaaattattgttatcattactattcactccctaagtcttgcaattcctattattttattattcatttatattttttttttaaaataacaccattattttatttaatattttaaaatacataatcttaaagtgatgatttttttttttatatatattattcaaaatttatataatttttattattaggggcccaatttttaagattataactaagtctttaaaatatttaagacatcacaataaaaatacataaacttatgatcaaataagcctacatgtattagatggattaaaatgggactattcttgcatctttagcacaagaataatgttggtaaatagaaaattaaattaaaaaagctggttaacaatggtccactttagagtacagaagacaaatattatttgttcaatatttcctattaaataatatggaaatgaccatcttaaaaaaatgtattttttataaatttgataagattatcaattatttatgacatattcatattttaaaaaattaaaatatatcaaaattattgaaaactaaattgatattaattaaaacctcaaaatattttataagttaatacatagaatttctcaaaatatttcataagttaatacatgcatgagtttaaaatattaaaacatatttaatacatacataatatcattaactcaaaacatgataattataaagagaagatattgatactttttatttaaatgtgaaaaaaaccatgtatattgatactttatttttccttctcttccactgtctccggtatcacatcctcattcatattttatttttcttgttcgcgattgtccttgtcatcctgttccaactctttctcctttaattgattctctgcagtgttgtggttactttcttttacattcgcaagcgccttaattttttcaaaataacatttttgtagaatcaatcattttttgcattgcatcagaacttttgtacagttcctcaggacgaactccagtggtgacatttatattctctgtttgttgtggattggcactgatctttgtcttcattttttttgttgaacttgacagtatgaaacttttaaaatgtgtaagattatttgtcttctcaagttcatcatttagaaactattatatttaatattaatttatgaatataatattaactatttatattgaattagatacaaatatatatcatattacatttaactagacaacataaatatattgaatactactaccatgtatacatatcacgtcattattttttcaaagtcatacatatttgtctattttagaacatgagacctcttgaa

SEQ ID NO: 3214 - DNA, 975 bp, Cannabis sativa
ggtaaaataaattccaacacgtctgccaatattatttatctaaaaattgcttataaattttaggttttaacaaagaatcaatgtttggaatttttagaaaatattgtgtttaaggcttcatataggatttcttcattaaccactacattgaaatttaacgcagaatacaactcccaggcatggaagagcttagtatatgataagcaaagaggatgttgtaagaaacacaacttacgactctgcagaaaaataaatattgaaaatacaattttatataccaggggcaacttttacagcatgatgcagagaaaaaatcaaaggaacagagttgctaatgagaaggagaagtaaataatcattgaaagagtactcatcaggattatgcatttaacatattggatttaaaatttgtcctttcaaaagagaagaagagaaaggggcaggaggaagaagttatagtcttttttaccatacaaagagaatgttccctaaataattacatctaaagggacctttcttgaataatccaagaccaaagcattgatcttcacaatgaacttcaaagtctattagctgttgcttagtttagtcgtagaaatttctagaaacatcatatgtatacagaaagtcattcttattcttagagatctcaaagatagctctaagacaattgttctcgcactaagaactacgaataagccaagccagtggcaagaatagaagagacaaatatccttgttgaataaaacagttaacatttgagttaaaagagaatggttggaaaattacctgtgatgcattccaccattgatatgaatgagaagggtgttgtaatggtttaaaaggaagacatatcatagtaggagaaaattgagagtgtacttcataaaaaatataaggcatttcagagtacacgcaatagaaaagcccaatagagtagaaatgcaattgagaatagattagatcacagaactt

SEQ ID NO: 3215 - DNA, 2380 bp, Cannabis sativa
tgttaagtttgcccaattgcattattttcaaaaaatgagttgattttagtaaaaatgaatattatataaaaatatatattaaggatctcctgccagattgtggagatccttgcttcaacctgaagcacaatgggaagatcctcgatgtcgagacctgagagtatattggacaccaactgcttcttagggtaagggtcaccagctaatgctaacacatccgcccattgacgcttctgtcgaagataatcagccatagacatggctcatttcctggctgtttgtattttggtctgatactcatccatcttcacgggagaatgagctccgaataacgtctccagggcctaccacaagcttgaagatgattcacaacacatcacttcagtggcaatactttccgtcatcgatccgtaaagccgtccaagtagtaactgatcattcacgatccagatctcgaactctggatttacgaaaacattttcttctcctgttgaagggtctgtagggagaaactcaatgagtttaactttcttacctttcaggtacccatccaacctgtgaccacgtacaatggcagataccatcgtcttccacaacgtgtagttgtttctgtcaagctttaaagcaaaaggttggtttagggtagtaacgatttgagaacctgcagcacctgctgaaggaatagatgactgggccacactcaacacactctgttcacctgaacgagctggagtttgttctgccatggagctgagacgaaaagagcaccactggtgcggataagctctgataccaagtttgaaaacaaagtaaacagagaaataaagcaaaagatgcaagaaaatgagaaagctcaactcaaaacttttgagactggcgtactactttatatataccaatgattggtttgtataggaaacatccaaaataccattgtgcaatatacacacgttttaaatattaaaggaatattctaacagaaattagttagcctagggaattgtacaaaatctattagtacacctcaacagagaaattacagtgataaaattcatttcttaacagtgtcgtctaatattattatgagatgcatgataacatttttagttatcggtgtcgtctaacattattatgagatgataacattttttgaagggttagtaattttttatatattaatttttaaattaaaatatatgagattaatttgatacttaattgcaatactatgtactatatacttagtgcgtgtgtgttggaggtcctaggttcgagtctcagattatgtatgattgtaatatataaacgcttaaataataataaaaaaaaaacctagtgatactttttaatatttctcttttgaaaaaaaaaaaaaacaaaggaaaataatatttgttaggtacacataacaagagaaaagagtactaattaaaattaataattaaaggttaatcatctaagatattaattagttagtttaaaactatattaaattaaatgaaaactgaaaagagtagtgatgatcatgttaagtttgcccaattgcattactttcgaaaaatgagttggttttagtaaaaatgaatattatatgaaaatatatattaaggataataattttttttgttattaattttgttttttgcaaaggtattacttttgtcaaagaatcattttctcttttgatagttgtttattggtaatatcttaagaacttataatgtagctaagtagatttttgtccacaatcagtttaggattatctattttgattattcttaaaaatatatctgtaataactgcgaagtttaactttttctatttagtgttggattaatattagtttagtgtgattaaatcattaaaaaaacaattaaattaattaattaatatataagtagtagtagtagaaattagagaaaagtcatgtcatgatcggattggaaaaggagttgttcacaaaataaaaggcgcatatatgtttatgttaaatgatttgaatgtgtgactctaaaaggaggaattatggttgaatatatttataggcgtgggcataaaaccatcataaataaatgatgatagggaatatatataatgagtacctaaaggcgtgggtgctcatttttcatttttttttcttttttctttttctacatatatatataaattaaataatttgggcttttggggccaaggtggggggaccatttgcctttctttatgcccaacctgtgttaataataagttgcacgttttgtgtgattggtggtgattttgatctacaattcatttcacaaccttcttacatagctacctattatagattctctccaggttttattatgctctcatctcataataaaagagaaatgctaaaagg

SEQ ID NO: 3216 - DNA, 1803 bp, Cannabis sativa
gctttatactattggagcttttttgttcaatttgttattatgaacacttttgtatagagcaactgtactgaactagaaaactaatttggagttgtgtaatgcctgtcttatttagatttaatggaacaaagatgttagagagcttgaggaacaagcggttagtattcgcaggcgattcattgggaaggaaccactgggaatccctcctatgtatgctttcggctgctgttcttaacaagtcttccatttacgaggtgaacgggaatccaattgcgaagcactcggggttcttgatcttcaagtttgaggagttcaactgcaccattgaatactatcgatcaccatttctagttgtccaaggccatcctccggctggtgctgctgcagatgtgaaattcacaatgagagtggatgaaatggactggagttctgtacattggaaagatgcagatgttttggttctcaacactggccattggtggatttatgagaaaactatacgagagtaagttacaaaatcaatatttataaataaagtttatgacaaatcagggcagtgtttttggtggggaagacccgattaattcttatttttcttatgtatgagcaggggaagttactttcaggaagtggggaaggtgaataagaatatgagtgttgaaactgcttacaggaaatcaatcgagaccgtgatcgattggattgatgatcaagtgaatttgaacaagactactgtcttcttccgtacctattcccctgttcatttcaggttctttttcttctttgatttcattcatgatattcatttagtacttggttcatttctaactaagattttttatatcagaggtggagaatggaacactggcggcggatgtcacttggaaacacttcctgatttggattcagttcccatttcaccagaatcacattttagtactactgctaaagtattggcagagagattgaacaaaactcggttaatggatttagttgtgttaaacgtgacagaaatgacatcaaggagaaaggatggccatccatcaatttattacttaggggccgagaatggactggcccctctcagccatcaagactgcagccactggtgcttgcctggtgtgcccgattcttggaatgagcttctatatgccatcttcctcaagcgagaattgattcgagcaggaaatgctagaagtcctagcgaatctccatcgtaatgttgtgtaaattctcactgctatatcagtttcttatttattctcattgtatcttcaaatgctgagaagtgagagtcgcagatgttactcggccatgaaatcaaagcttggaaaggtgaaaacgccgcaagatagtaaatcattggtttgatcttcatgggtgtgattcttctcaacatgtttctcaaaagggtacagttctttttgcttctacttttgatgtcagatatagaaactttcaagtcttggtacagtttagaagaaatatgtatacagtaatacgtaatttcactcttgtattctttaaacaaaaagagatataacgtacataaatttcagtaaatcgtgtaagaaaaactgaaccattgttgagaatcaggtaaatttgagtcattttagggggtctactcagctgtttgcatctcaatcttatggtaaatgtcgcattaattaaagtcaattttcggttcaacgactaattttttttttgggtttggtatagagaactttggtttggatttatatttatttatttatttattttgattgggatgagtaggatgccataattggaatttcacaa

SEQ ID NO: 3217 - DNA, 1434 bp, Cannabis sativa
aaaaaaaaaagttttaccgattaaaaaaactaatatatggtgtattataaaagtttaaaataaaattatcaaataaaattgaatgatatattttaaaaaatagagaaaataagttgtcgaaagtgctcaaagacataatatataaaagaccaacattagagttgttttttttctataaatttgaagtatatatttcactttcccaataaagattaatttgttgagttgtaactgatactatatatttctatctagacccgatgatcaaaaatttaagccttatatgtaccatatttaagacaatatcagagtctgtactgacaaaattagaaaaaaaaattacagttttgtaaatattggatacttatggcgctaaaaataaacattaagtttatgccgcttacaaacataaaactttggatacttatgctaatatttaccctaatttgtttattaatgtgtataatcaaacaaaaaataatttagaaagtgaaaagatttggagataacaatagcaagaaaaaactgatttgagttcaaaaatgaataactgaattaactaacatgttgtttttaacccaatatagcttcattaatccagctcccaaccaaataaaaatttgttctatatattaattagtattttagaatgtcaaaaaaaaaaactcagctcatcactccaatttgctgccgaaaccgaaaaataccgatttacgcatttgaagtgaagcgagatcatcttaatcttatcttcctaataacctgtcagattacttctaacaaaatcatgtgaaaactctcaaagctcgtcgtggttttgtggttgttctcggttcatcaaatctagtttttgttgtagttcctacgaattcaacaccaatacaaaaatcccaatgagaaagtaaataattagggaccgattagaaagcgacacacattatcaaagtttattaccttaagtcttgactcgacacaaacagccggtgtcgatagcaatgctacatatctagcccatgaccaaaaccaaataaaatattaagacaggaagattgaaaagagagaaaatgaagatttgggtaagagtttatcaagagagttcttactcgcatcgacttggttcatctacgtcggtaacctcgtttttcaatccacatctaagtctaacctgaaggacaaacaaaccatgcatgtgtagatatgtttatgaaataaaaaactacaaaatgagattaaaatcaatacaaaggttttgggcataactaatctgaaaagatgagaataagtaccttcaaacttctatctggtccattccaacacttatctccattggaaaagatcatcattctgtatgattcttcgaatttgtcccattgcctagttccacggaaatttatataggaaacacgaatcaaatgaagcatggataatatcatc

SEQ ID NO: 3218 - DNA, 2689 bp, Cannabis sativa
tttttttttttttttgtattcataatcaatatttttcgactttgaccccaatgtagacctagaaaaccagacttggatgccgaccccgactccaacccaaacaccaaaatcgaatgagaccctgacgacggacccaaacccgacttgaacccgaacccgaatgagataccggacccagaactagaaccgacccggacctcaaccccagcctcgaaccctcgaccatggacctgaaccccaaaatcgacccatacctcgaccctgacccagactcaaactccgacccaaacccaaaatcgaatccaccccaagcccttgaacccgccccgaccccaacctatgtccctgccctggccccataccccagtctcgatcccaacctcagaccttgtgttagggtttatgctctgaaaaacctgtaaatatattttagtttataaatataagttgaacgttcttatatatgcttgaatattaaattattaagatttaatattgactcatttatatataaatatcgaaaactttcttattcatacatgaggctgtgacttttattttacggagtatgaagatcacttagccatgaataaaacagtcaacaacatattaaagttattgaaatagttgctagtgtgtttcattgatgctcgttattcaatgcaagcaatctcgattcagattgctgatgtagtatgacatctaagtaagggtattttacataatagaaattatatatgacaatgaccgatatgtaattaagctgcctttatcaaatatgtcgtttactataaagatctaactcatatcataaggatgatcaataggagatcggcctaaatcttgagtaatcatgaactcttgttcacataattagtttctttgattcactcgttaaagtttctcagagaatatgattcttacaacttctgttttgggaatctaataatatacatggatggctgggaatatgatctataaatttagattagatctaaattatattttcactagttaattaacagtactaaaggatgaagaagtaattagtaaggtaaaacggtaatttgaccagaattaattacgaaccgacacaaggaggtttaattactaaaattgattaagggacatttatttttcaaatttattttagaattaaataaataaaatttagttatagatttgaaattcaaattgaaaatctataaccatagtaagacaaaagttatctttatccaaaattaaaaatttaaattaatagacaaatcaaatatgataataaaattatcttaaataaaaggttgatttaagaataaattaattaaaaatattttaattaatttacgtgttttaatttgtcttaaatagatagtctatttaagaataaattaaacaaaatattttaattaattcaaaagggttaaaatatttcttaagtaaaaagtttatttaagaataatcaattaaaaatattttaattaattgaaggcttaaacggtccaacaaaattacaaaagcatccttgcagcgataaacataagattttgtaatttatttttaatcttttcaagggttgtaagattagaaatatccaattattatccagttcatcatcattatttatttactacttttaaataaatgttcattaatagttgattaataatatgttcatgcattagtgaataacatgacatacatagaaatcctacacaattatattacatacgtagtagaaacatgatatattaagattatcttatatgtttatatatttaccgttattgaaaccaaaagcatgtaaattatctaagattaatttagaattaacttgataattttaaactaacctacccatttaaaatagttttaaattatgacaggaaatttaacgccccaaccatgtaaaaactttgagtgccttcttcatattttattttcctaattatatttttttagctctaatattaaataattcattttctgaaaatcttggtaaacagataattattgaagttattagaacccctcatccataatttagaagttcacacatactctggatgagttatagtatcaccaaaataatcttatgaggtatattataacaaaataattagatcatatgtgcatgagggggagatatattcatgttgtactcttttttccttagctcagattttgtcccacttgattttccagacaagatttttaacgagtgaactttcaaataacaatgaatatgaaatatatatcttgcactctttttccttagcttaggttttatcccactgggttttcctgacaaactttttaacgagactacttcaaatcatgctagcacacttgcactttatgaaacaagatgaaaatatgtgggagtaacatcattgtcataatatattcgagaaacatataaattgcactctgtaacacagtatcaacattagcaattctctattaacataacgtgaaatgcattgctcaactaaaattataataatagagatagaattaaacccatttaaccaaattcttctttacacacattcttcaagaaagtggtgatatgaactgatgtttaacacattttatcaagtgtcaatcatgcatacttattcacaaagttattacctacatcaatatttgagaagacgacatagaagtagggccgaccctgagttgaaat

SEQ ID NO: 3219 - DNA, 2458 bp, Cannabis sativa
  modified_base (1837)..(1845): a, c, t, g, unknown or other
tttttttttttttttttgtgtggaaaattatacacaactagttgtctacttttattaacttatggcacaaaggaattcagatgagtacttcttgtcctttttgctgtaagggcactgagactgttcaccttgcccttgagcttgtgattccccgagacatattcgacactatttggctacttttgtgcacataccttctacactatgtttgtgttatagtttatatcttgaaaaatctataaaaatatttttaattataaatattaattaaacattttgatatatgcttaaatattaaattaataatattttatatataaatatcaagaattttttttttttcatatatgaagtcgtgatttgtattcattacaagaaatacattttttagcggtggatatttggctgacaatggtaggcacaacgcgctggcatacttttatcggcgcataaatacgctgataacaagtatatgctattctcggtcagtaaaagagtttttgctggcgcaactaccaattgtaccgaaaaaacaagcttttacagatgagcttatgcgtcacatttttttccaattagcgtgtaaaagttttaccagcgtacatatagttgcgtcggtaaaacttttacccaccaattagattatggcagaaattagttataccgacgcacttatgcactaacaaaagacttaccctccatatttttttaatggtgtggtatgttttgccggcgcataaaagttttttttatttttatttttaaaaaatttaataatttattatattctaattaaatataatagaattatatataattttaaatattaaattagatttgaaaaaattctaatcaaattaatcaaataaaaaaatagtattcaaatatataattaaatagtatttccatcgaactactataaaaatataacgtcctaattaattagaattactaaattaattttctaattgttgtgcacgtctttgttaatcaaaaagttttcttgaaaattcgtgcaaaatttatatttttaattaaactttaaactagtataaatatataatcgtacataaaagtcgggatcccatcttagaaatttacgacattactcaaaatacattttactaaagtgtcgcaccgtgactacaaaatgaaggcccaagtcgtcctgagatcgaacacttcaggtctaatcatcttgatatgtagaaccatccttgagttctagactcactggtactcaaatttcgccatttctttacttatacatgtaagcaatatctatgagtcgacagactcagtaagaaaaatacaaaatatataacataatttcgacttgtatcttgaggcccatttacctatttacaaggctccaaatgaatcaagaacttttttttttttaatagaagtacgacctctgtaccacacgcactaagtactcgtcccgtactagtgtgggtagggctaaattgcacctcgagtaccattgaatgttgtaccacatattcactctgtactcggctcgtactagtgttggtaacattgtgtcatactcttttaacatcatatactgtaccaatgcactccgtaccgtaattggatagtgttggtagtatacaaatcacatattacagcatgcatatcatatacatacacatatacatatacacattttatactaatcttacctcgttttcaaattcaagtctaccggtcaacttgaatgaaaattcacgtgttgaacggaggccttatatcacaatcacacaaaacaggtaaacaacttgctaaaacctttttggaaacctaaactcaaactaaaagtttccctatcgannnnnnnnntggcaataccctaaatatcgaggaaacatgaaaagatgagactatgaaaaaaattcctgaaaaatggcaagacgtttttgtataaaacgacagactgttttaattgggttcttgacagtaaaaatggtataccgtttcctcataaacggtctgccgtattctgctgcagaaacaaaccaactctcatttctaacccaaatcgaccctaaacttggtaaaactctccagaacacctaaacaaagtctaatagacacaaacaatgcaacaaaatcaagaataactgaaaataaaaaaattcaccattgttgagccaaatttgagttcttgaactcaaacttgctcaacaactcaacgaaccctcaaattcaactcaaataaacttcaattaactcagtactaacccagaaaaccaaacccaaactcaagtggttcggatagaacctaattcaagacattggatgcttgactcaaaaactaaacttccaaaacttaaagaggaagggttaaagggctttacctctgatcttagttcacaattctagcaagaaatcaccaaaaatcacagcaaaacatccctaatatcccttagttccttggtgccgaagagagaga

SEQ ID NO: 3220 - DNA, 2253 bp, Cannabis sativa
ggttaatgtgaatgtgaaggaaaagatttgaacacaaaatgtttaggaaagattactatctaatctacttgatgggaaagtgtacttttctttgattattaatttagagcatatatctatttaatctctacttttgttgtgatgattataagaattcaagatgaagaaagtgatttttcaattgttatcaacaatattattagactattttgaatgaaagatgtaaaaattatgttatatttagcataaaaaataattttatactttattagattttagtttgcttcggtaaattcggtaaaacttgatgagaaattgaaattttatccttttttctatgaataattcacaatttaatgatataattaaatatatattgataaaatttttgcagtaaatgttttgataaattttacacaacaaataattaagtgcagaaaaattaaaacatgaagtattttttatcgtagattaacttattgcataaatatttaagtttaatttttggttacatgtaaatacttaagtttaaatcttgatggtaataatactcgtaagtacctattttttaagtgtcaagttaatggtcacgtgacagttcttgattggttaaagttataaaaattaatttaaatataccgataagaaaatgacatgtggataatgacttcacacttagcgtctaagtatttacgggagttccaaaaatattacttagatattattactgtaaaaaattaaacttagctatttatctgcaatcgagaattaaatttaagtatttacgttgtaaattactcaataataaataagattaattaagatttttatttctaaactttgacatgtaccaaattatactccttaaccttttttgactgttaaaaattctcttaaactttattaagtatgtattctgcaaattactctaaataaaaagtgttggaaaatatggtcaaaatataaagcagcttgaaattcatgatatgtttatttaaagggcaatcagaatcaatagtatgatattgaataaaaggaaatattctctcccactattataaggaatataaaagataaatatgtactttaaaaatttataaacaaaaattaattacatgttctaataattttgttattcaaatttaaatcataaataaaataatataattttatattttttcgaaacaatttaataaaaaataatataataaaatattatttttgattattttctcaattttaaagtttattattcaaattctaattacatattagtaaaagatgttagaataatatatgttgttgtgtatgttctcttacagcaaaacccacctaaaatcttaattcctccatatccacaaaacctcaaaacctcaaagctcaaacctttgattgacaacacaacacaactcatcccattcccaaatcatgcaaatccttcctaaccctaatccttacttctaccctcttccatttcccacctctgcaactacttcctcttccctcacttcccgcgcttccaatttcttctccgccaacctcacaatctcataccctaattccccttcttcacatcgacggaaccctcccccaatttcttctgctgtcaggtccagcagaaccgactactactccactctccaggtcactaaggatgcttccttgcaggagatcaaggcctcttatcggaaactcgctcgtcaggtatccaaatccaatcaattcaatagaaaagtacaaatctttactttactgtttgaatgtgaataaatctttacttaactgttgtttgaatgtgaatgaattctttcaatttcaaccaatacaaaaaagcattaatctttactttcctgttcgaattgagtaaggctatgtttgaaagttagattttaataggataaaaaataaataaattggtggggaaagaaaaaagtagaaaaaagtgtgaaaaatgatagaaaaaaataaatttttaatgttggatatgaaaagttttgttcaattaactttctgttttttcattcaattctttcaatattaaacttgagaaattgatttttgttatttttcacacttttttctttccctactaaaattcaaccttccaaacatagcctaaatatctaaatgagaaaaaaaatgttacttgaatttgcttgagagtatattttgtgtgttttaatgtttgagttatgagttattatgggttaaaattttgttggtttggtaattggggtcagtaccatcctgatg

SEQ ID NO: 3221 - DNA, 4039 bp, Cannabis sativa
  modified_base (3953)..(3957): a, c, t, g, unknown or other
ccatggcttgtgggaagccatgggtgatgtctctcacttttatttggtacatggatcttgaaaatataatttggtcaataaattcctcttcctggtatggtaaccgacttgtgccacttcacaatggcattagtctctaattttgagagcactgccattctcttatggcacaagtcacccaaggcgattcctaggccaaaaatgactttccttacttgtttcttactccttgatatcgtgggaacccactcaaacaattttcctcccatagtttgcgatgagtcaccagtgccattctcttatggcacaggtcacctaaggcgactcctaggccggagatgacttctcaattgtcccttactccttgatgccgagggaacccgtttggacaattttcctcccatagtttgcgaggagtgacctgtgccattctaccatggcagaggtctccaaaattggagagcactgtcatttccttatggcacaggtcacctagggcgactcctaggacggaaatgacttttctcaattgtcacgtgctccttgatgtcaagggaacccattcaaacaaatttccttccatggttcgtgaggattgacctgcggcattctcatatggcataggtctccaaaactagagagcacaaccatttccttgtggcagtcgtcacttattcctcttttcttgttgttttagtgttattttgactttatagataaacccaagtcattttcatgcctaaacaagttccttattggttttctttgcagattgaggtctctagggcgaaaacactcgtgcgggcccatgaaccctagtttgggcacacttgggtgtgtgagtctctgtgccaaatggttggttgacgttttcgagccctctaaaagtgccatgggcccctcaaaaaggatgtcttgatttattttacatttatgagtcttggtcaaagtcttaaggttgactttagtgtcttcaaggtactcttggcatgtgggcccttgtacaataatagccatttttttttttttttacgaaaattgggtataacagactatataagaagtgtacttcagctgatttaatcaagcaattcaaaaggaaatcaaaagcattaaatggagtacaaattttagagatcgaattcaatactggagaccttttttaaagggttttcaacattctttttgttaacgcaggtttttgttaactaaaattaatgagcctttacataataaatatatcacagaaataataataaatgattaaataactccaaatattttagtcaagaatcacaatgaaggcaaaaattgaatccttttcgtaaagaaatcacacattatgcattctacaactatcatacaaatcaaaataccataaagactaaaatctaacgtgagaatcaaaaactttctaaaaaggttaaaaagcttgaaacttatcattggtagattcaaagaagagacgtcgaagaaaataagatgaggcatatatggaaaaagaagatcaacaatctaaatcatgccatgcaaaaagccagtatttggctagacaaggttgcacgacaaaagatacaataggcaagatgagagctacaaagtccctatctgacaagatgttcaaacaaggacttgagggacaaatgttagcccaaatttttgtcacctgatgtggtacgtccacatcagccaagactgagaatgtgtggaatgcagccttgtcaatagcaggacaaagtctccttataaggcatggcaaaaccgtgagcaataagagaaaggattgaagcaagccattaaaaagctggacaaccatgtctatctggccaagggaagtacataggctggccaggagaaacttgtatggccggccaagctggccagccaaagagtgactgacagagccaaacaggcctgttcaaccaaggaagctaacctttgtaaggaaaactgtataaaggttggccaacacactttaaggctggccaacacatgctaaggctggccaacactttccaaagttggcaggcacttggcgtgcagcctggaggctaggaggcacgtagcgtgcagcttggaggctagcaagcacttggcgtgcagcctagagattggtaggaacttggcgtgcagtctgcaagctggcaggcacttggcgtgcagtctgcaagctggcaggaacttggcgtgtagcctgcaactggcaagcacttggcgtgtagcctacacctggcagtcacttggtgtgcagccttcattcatgacaacaagccaagatttgggcttcaacaacccataaaaatagggggaaaatatcaactatttccctattattgggagataactaacctatttaatatttatagtttaattatgtaacaaatattttacagttcctattttgtagggatattatgttattattctcatgtaagctctcctatgtaaggagcattaacctaacccttatctctctaagtctctagctctctaagctctcaagctctaagtctgaaatcctaattctctgtctccctctcttctacacgcctcaggcattgtagaagagactaagtctctttcatctttcttacttgagatttgcctactgattctcatattgtaatcttaagagagccacctcaagttccacaatccttgtgatctgagtggtattatctctagtattaataaagcaaaaggggagtaggtcattacctgctaactaagctagcccaacctctataaaaatctcttttactttcatgttcttattgtgtatacgtggtagcatcagtaataaatacaagtccgctgtctgttggccaaatctaagatcaacacctagatatcgggataaggtaagattagatgccttaatccctcctctagttgcactttactagtttgttacattataaccactaatagggaatgcgatacaactcaaatttatagcctttttcctaatgacattagcaaggccattaactccatcagcctagcttaactctccatcctagacattttgtattggtgccctacccaccatggcacctatacagttaattctgtctaccactggccaatacattactcacttaagctaagccttctccctttgactctctctctcaacaaaaatggtggaagatgatgtggagacaactaataccttcaaaaattaagaacttaatttggcttttctatcatgatgctcttccaattggctcaaatctttacaaatgattggtcttacaatcatgtacttgctgtctctgccaccatcatgaagaaactctaactcgtgctcttttcaaatgttaaactatttagcaagtatggaaactaaaatcttttatatggttagtagtaaacatccttctcttgccccattgatttacttcacaccttgctactaatactctcactgctagtgatttccaatttttcgtttgtttgcttttgaagctttgttattccaagaatgaatttttgcacaaacactctgtcatagtgccatttagagtagtccagtagactgaagactacctgcaccaataccaggttcataacacccctcacgccactgtctctctagtctaccctctcatcactggacactcccaccacctgcacaaataaaaatcaacgttgatgttgcccaagacataaagaaaaattaaatgggatttggtatgattattaaaaagagtaatttgcgacataacctccttaagtggcaagtttttgcaactaacccccaattttaaaattttggtggtaaaacttcctaaaccgaagttctgttagcagttagccctttccatccatttttttgttgttaactgccatggtggaatgtccacgtgtacacagtgtacacatggtacaattttattagtccacgtaaataaatattaaaaaaaaataattattttaaaaataaaaannnnnaaaattaaaaaaaaaaattctttaaaaattaaaaaaaaaaccctaattcccttcctctatctcttcttctctctctctctct

SEQ ID NO: 3222 - DNA, 2279 bp, Cannabis sativa
tttagtttcttaaaatctcggtaaacaaattcgataaaaatttgataaaaattcaataggtgctcaataacagcttgataaattcagaaaattgtgttccaaggttgaacatgagtttgataacatctcaataagggctcaatggtggtttgacaggttttattattgaatgttttgtcttgagctcaattaaactcaatagaggttcgatatgtttgatttctgaatgttttaccatgagctcgattgagtgtacattgagccccataaacttagataaaaaataaaaattgaacccatcaagccaacattgagccctatcgagcttatcaagcatatgtagaaaacaaaattcatttgagattttaatgagctctatcgaacctatataaaagaatacaacgacatcaagctttatcgagctcatcactaacctagatatcatgctattttcgagcattcatcaaattattatcaaacccattaaactaaatcgcacaaaataccttaaagtgttagaagaaatgcagataaaaaaatatatgcaaaaatcaattgaacccacaaagacaagcacaaatttgtttgaaaacacaaaaatatatgcaaacaaaaaaaaatccatcaataaattttaaagaaaatgacttatccaaaaagtctttcctcgaagattacaaacaacaaaaatcagggtatatccttcaacaacttttattttcttgttagagtaggtatttttaaggaaatgtgaacattttttgtgacttaatgggtgccattggaggtttaatagtgaaagagacgagagaagagggaaagagagagcataagaagtgtttcaagatattatgagagagttattttggatataagatgaatcattagtataaaattgattgtggcaatatgtgggacttttctttagttatgttgtcacatgaagaatagaaaaaactgtcacatgaagaatagaaaaaaagttgagttttcattcttcatatgtcatctcatataaaaaatatatcacataatatatcatatctctctcaaaatatgcttttccttcttttaatattttcaaaactacctcgctctctctctttcttcatccaccctcaccagtcaccacccacttttctcattttctcttctataatttttcatctcttcatttctctccattttttttcttctactttttttaatatcttcatggatattacacaaaaataattacaatttcataatttataacttaaattcattataaatataaattaaaacactaatatatacatttctaactaatctgaactttactttttggatttttttcatgattatttatattccttagagaggcacaatttttcacttgaatgaatgcttgaggtgaattttatatatatataagagatatgtattaaagcttgaaaatatactcaactttaatacaacccatattttggtcgtggttttaacctttacacttctcaaatccctttataaaatatccaacatccagatatcaaaaaaatactcatttttttaaaagaaaaatgcatcacctctaacaaataaaaacacaaattaaaacgtatgtatcttctaagaatgacattgagcacccatcgattcatctcaagcaagaaaaatcatttttttttccataaactcattgatttttaaggtcccattgagcttaatcaaaaatctacaattgtcagtgtttcatatgtgaaaaaatacaaaagatcacaataaaagtccgaaaataaggtccagatcagtttgaaatgcatatattagtagtttaattgatatttatcatgaatttaagttctaaatcatcaaaatcttttatgaaatcattttatggattacaaagtcattataaagttcaatgtttaaaccatgtgactttcctaagtaggacattataaagatgaagggaatcaaattattaaagtaaaatacttcaagattgcaataattggttaagagggggtctattcttgtattagtcaattaatttttatatttttttagaacttactaattaattttatctaaattgtatggctttgtaaatataggatatctgaaatgattttcagaagaataatacttattggtttagagggacaaagcccacgggtcatgcagaaacgaagctggacatatctcccaaaagaaaggaccaaataacagccaaaccatgtcgattatagaaatagcctaaaactaatatcagaagcaacaaaagtgataaacac

SEQ ID NO: 3223 - DNA, 655 bp, Cannabis sativa
ttgaagccttttgactcctccacaagagcaaccattgcaggtacaagagggcctgtaattagataatttttcccagacagttttgagtctagtgaagtacatactaatagattggctttcttgctttaagttcatcaagccttttctcaggttgtaaatgtgaggaccattcctttgatgaaatctgacttttaaatcattccaaattgcttctgcactattatcataaagaatgctagacgaaatctctttagatacagagttaagaatccaggagataacaatattattattcctaatccaagcattatacaatataggatctgaaagagagggtttaggaatagaaccatcaagaaacccgagcttgttcttcacggatatggccaattgcatcgctctgctccaggaaacatagttatcctgtcctgttagaagctgagatacgagactgttgcctggattatcattgtggtgcaggtaatagggaaaggatcctcgacaggatttcttgtatgagaattttgattttcttgaatggtgggatccgtggatcgaatttcagattgagaagattgattgttgttcgacattgatgttctggaatagagaagacagaaccaagaaaactagggacaccagaaacgatgttgga

SEQ ID NO: 3224 - DNA, 1420 bp, Cannabis sativa
aaaatgaatgtagatgcagttgtggattaaaacaacaatataatttgggtaggtgttgttgtttgaaatagtgaatgtcatgtaatggttgccctctccaagcctgtaattggtaattttgcttcacatgaaatggaggccaaggcaattttccacggtctagtatgggctttacagttgggactacaaattgctcaagtagaaatggatgctctcatggttataaatgctttctatggctgatccaattgtattgctgcttttaatgatcttattatagatatttcttgtcttctttcctttctcccgggtgtatcggttatgcatgtcaaatgtacggctaatatggctgctcatggtttggctagatatgctttagggttggatgaagcttgctattgggtagaatctgttcctccatctatttactatattattgtaaatgaccgaccaatttaatttataataacaagtatttatccttaaaaaaaaattacctcaaaccaaacactaccttacttgaatgatgaataattcattcacctatatgcattggcatcttttttttttttcaataatcatggtgatattgatatagttactttaaaaaaatatatgtgaatttagcaaaaacaatacatataaactcgggtagtatttatttagtaatggctcctctgttgggtctagtctcctattagactttactattttttcagtcgcttctttcttagtttttcttgttttttctccaggtggttagttttctttcttcttttaatgctctcagttcctttcctgtgtgttactgtagaaattttaccaatttaacctacgcacaacagaaattaattaagtactaaccaaggtcaaaattgaccttttaccccgagtcaaacacaagttgagtcccccatttcttgagtcagatagttgactcacccaaatgtattatcgtttggttgattcccttaaacattagaactctctcgaactaggtccttaccattctcacacacaatcagatggaaaccctagtagagcttcgaatttcttctcaagaaactcgaagacggctaacaaccccaaatcaaaccttatgccctacctagatcaaaccagaacccttagattcatacacacaaatatgtaaagcagtaaaaggaaaaataaaacattagagagataacagtagatttatagaggttcactacaacaattttcttaattagaggcagatttattagcgggggacaaaatctgctgttaataatggtagtattagcggcaaacccttgcttctgcgactaaatgggatttttttttttgaaaaattgttagcggcaggttgtccgccgctaataagtggacgggaaaaatctcgcccattctgttcgaatattattagtggcgggggatt

SEQ ID NO: 3225 - DNA, 2279 bp, Cannabis sativa
tatcttgaaacaaaatcaaatttagataagcagaacccattgcaacagggcaggtgttaacctaggtgctaggtgcttcttgcgtgcattcttgaggctaatgccatgtcaacttgggggtgggagcctgttctggctcactagaaatctcatttgctccccgagattacttgtatcttcattatttctgatgatggaaaaaatgcttggaacacttttttgggaaaatgactagaaatagcccaggtattccaaatgtcaacctgggcattgggcccagtgccaggtgtcaacttgggcaatgggtctaggatttttccataggatgactacgtttgatacttgggaaaaattctatgttaatctttggcaaaaacatagaatatgctaggaagacttctcaaaaaaactcatttgaaatggcccaagttcacaaagtgtcaacctaggcgctcgttcctaattttaacctccagacgactattttcatttctcaaaagcacaaaaatcttgatttttgatgaaagtggagaatatatcttatagacttcatctgaactattgttggaagtggcctaggttaacaaagtgtcaacctgggcgctaggtccctagttttgcctccagatcgttctgtttctttcccgaaagtacttgtttccttattttatctcaggataattcttcaatattgtggttggaagcaccccagctttacaatatgtccacctaggcgttgggtgcctcgggtgctgaaaatagaaagtgcttcgattctgattttattttctcatatatgttcgtgacgatcttattcatgtccaagtccaatgtttgagccatttttagtaaaacaaacctaaaactcaaaaccttagttagaatgtcaaccttggcactaggtgaaaacccaaggcgcttaaagacttttagggttttgtttcgtgtatttttaacttctagaccttggagttggattcttcttgtattcttagttcaaaatactgaaagatggtgagttggaaataacttgacggtatccaaacacccattatgaagttcccgtagtcaacctaggagcagggctagaggccccgcccaagttgactgctatgattctgaactacccaactccaggatattttctttcttgccatgtgtcaaacattgatgtccacgtcatcaaaactagtttcttgtgtaacagaactagttccacagcaaaataactcaaaacaaataacacaataattgaaaacttgactataattaataaaaacaagatagaatcagttcccaaaacactgataatataaattaaaatagaatgcgttccacaataaaatgagtaaaaatgaacaacacataataacaatcagaatctgataataattaaaaaaggttggaataagttccaaaattattgagagataaatttaaacaaaaggtccataacaaataaaaaatatataataaagaaattggtcataattatcaactagataaaaatctcgaataaagaaactggttttgtaaagcaaccaaaattaaaaataacacacaaaaaccagttacatgaaatatataaatcaaaaactggttccttgaattaaataaatcaaaaatcggtttctgaaataactacattaaaaaccactttcctgaattgatcaaatgataaaccgctttctggaataaataatttaagaatcgttttatgaaatggctaaatcaaaaacgaactgagaaacaacacaaataaaatacaacataatctttgcaacttactaacaaccaatgatttttgtcaaacttcaaatatggtttctggaaaaaaaaaatataaaataatgtaaaattaggaatcagttaaaattaataaaaaaatacaatatgcaaacaatagagaattagttccaaaaatactataagacatatcatattaaatagaaccgattctacgagtaaaataataagacacactaactcaaaaatcagttataattaaatatatatatatatatatatatatataacataaaccataccacattacaaaaactagtgtgcttgtttggagagtcctttggaatatgacttctgccattcaactaattaaaaaccaactgaaaaataacataaataaaatgtaacacaatgtttgcaattattatattaaacagaaagatatactatggttaaccaataattctagttatcatatttgtaataattaagtatatataagattatttttgtaacaaagaaacataataaat

SEQ ID NO: 3226 - DNA, 1376 bp, Cannabis sativa
aaagcattagaaaatatataccttgacttcaacttcagaatagagttctcttagatccttcataatagaatccaagtacagttcacctgtacccaaaattgtgtgttctccagattcctcaactttagtaatggcaagaggatagctcttgctgattttcctaagaccctcgaccatctttggcaattcactagggttcaatggctcggtcgccgttttcactaccggaagggtattgaattgcaaaggtcgaaagatgtatacatcttcgtcataatactcactgcaaatagtagcagttttcatgattgaagcatccactccttcaatgagaacccaagaaccaggaggagcctcagctataggtatcctatctcgagcttgataaacccacaattttgtcacttctttaactgtcatgtcttcttcatcatctggtgaatagccctcacctaacacacgaacagtttgcccagtctgaactgtgccactataaaccctaccaaaaacatcaaatacactacagtcggacttgggatatagttttgtcacgtttaccattaaaggaccaagaggatcacactctttcatagccttgtagattaaagagtctttaggtccagtatatatatgatcaacctttctagttgcagcctccctaggtgaaggagtgtgacggaccagcatgtcagtgaaacccgaggctgaaccaaaaactgagctacatgccagtctcaacaaaggtctaacatttaatttgtaagctgcattgctaagagttacaccaagctcggcaagagttgcctcgacactctttttatgctctccaatcacctgactgtatatcttataaaggggttcgagcacaaactgaacaaaagatctttctcccccacttggaggctttctcttgaaagccctcgtatctggatgatagtaaaaatctccccaaaggcgactagcaaacttatcagcatcaaaagggattccatggagtttcacatataatttagcaaacgactgtaaagtgaatgaccatccagcagtagcactagcgaagcaaacatttccggcagtaggatcaatgatttggacatcaccagcggtggacgacgcagaagatatgaggttattgattacttctagagtatgccttaacttaaaataagcatctcttggaggaagtttaagttctgtaatcaacctgtcaaccttgaattaagaaagtaatatgaatatcaaggtaagtccaagcaatcctctcaaaaattaaaacagaacgataatgcaagggtactgcgtatggaaacaaacttcttacagaagataaatcataactcaatatgctaaatatatgaatatgagaagcccgaaca

SEQ ID NO: 3227 - DNA, 2230 bp, Cannabis sativa
ttacatcacatcacacaccaaatgagctagaaaccaagtgtttctccctcgccacaatgactattctgattccattttgtcaagtcaatatatgcaaaaacctaaacttaataaatttaagtatataaataagattttttttaccacattcaattaattgaatgtccaagaattatattttctctgtggttaacctgcaccaatcaagaacagaaaatagaaaacagaaaacggaaaataatgaaattaaaaataaggttaattggaatttttactccctgaactttgacacataccaaatcatgcctcctgaacttttcaggccgttaaaaaatcctcatgaactattaaaattgttagatttaaggatttttagccaatgttattcaattttactaatataacgattgttcatatactaaatcttgtccctcgaactttgatatcgctcccaatctttcaaaagtacaaaattgtgccccctaaattttcatccacattggaatttgtttagtaaaattagacaaaagttcttaaatctaacaatctcaatagttcggggagaatttttaacaacttgaaaaattcaagagacataatttggtacatataaaagttcacggacaaaaatccaaattaacctaaaaataaaacaccaacattgccgtgaccccaccaatttttttcatttttaaaaaattacatgtaaaatataaatataaataaaaataaataatatatataggaagcttttatggtagggatgatgcttgttttgtctctatggtaaggtcatttttttatccgttgattggtgatcaaatggtggtaaatatctagggagtataatagtgatagtggagtgattttgcttatttctctcacttttttttattaaataaatatattttaataaaaataattattcttagatacacgtttgtattctttatcaactcttcggtaatattattggaaactttttttttattattattttttgttatttaaaaaaataaattgagagtacctagaaggaaagatttcttcttggatgaacatataaatgtgttctcattttatcattgtatttaaaatggaatattggttagtcttacttttttatggtaatatggcatgttatcattttggttcgagattagcaggtatttatttgtaggattgaattgggtttactgtttagaagcaatcttgaacgatcaacagggcaaatttttttattttttgggaaatggaaggtaagatagtgtatcaatggaagacttggcatgttgcttagacataaaaaacttgttccatccaactgaggtggatgaatcacttagaaatgatctcaaaattatattttacagtaggaaacatctttattttaaacaaatattctgtaaatttttaagctcattcattcattatgccagaaaaaaaaagttatattgctaacttcatctatttgaactcctctctctctctctgtaagaatataatatttcatgttgattgtattaagtggtgatactttaaaaaaacggaatagatgaaattagaaatattaccccttaaaattatatgctatatataaaagaaaaaagaaaaacaatttttaaaaaaattaattcttactggatggtccgattttcaaattggtcattaaaagctagaaagttaactaacaatgaaatgaagttggtcataaaaaaaaaaaaaaaaaaaaaaagtgcagatacagtggaaaaataaacttgtaccagacacctaaatacacgttcttttaatacactgtgagtacagacctttttatgtttatgtcagaaacttttttttatgaaaaaagaaaattctgcatgcaacctcatggtagttaatatgaacttgctaaagtcctatacatctatggtcaaaaaagtgttctcatcgtatagggacaaaaccaatgtgcctatgttagaaatttcctatatatatattggcccccataaatttttgagttggattcgtcattataatttacttggtttaatgcttaatccaaggatagaacaaccacaacaattgtgagctttttttaatttgagaaaagcaatacaatcagttgtaagtgttgagatcaaacaaagttacaaattgtctcaccatgaatgactgtgatcaaacacacatagttattcactacaaaccctccaaacattctttctttctttctaatctcatt

SEQ ID NO: 3228 - DNA, 845 bp, Cannabis sativa
cctctcctgtgttctcaatggatcccatctcagactcttgaataacatcttgctgttcacttctgtcttctgcaagtatactgaaagaattattagtctttattgtagcagacacctccttcccttgcactcttttgccttttataacctctttaaaaccatttccatccaccatggcctcaggagcatctttcctactatcagtcttcacaacccactcctgctaccattaagtagaaaagaaaaccagtacaaaagtagaaaagaagacaagttataaagaaaagcaacaagaattgcattatttgtaaacataattcattgacgaactccattcgcatcaacatctgaaaaacaaagaaaaaaaacaattaattaaaacaaaacaaagtaattaagctagctaaccatatataaccaaaatatcaattaagaaaagagatgaataagcttatagctatacccttgttatcaaatttcacaccacgagggtgttgtaaatgatgtatcccaattattcgattgccccgatgaaagcaattttcacaaccattaagtcccatggaaactaatacatgtaacaaaaagaattaacataacataaatccattaacctaaagtaatataagagtaaggatatgtatgataaggtaaggtaggtagataagtaccgctttcgacagggtcaagagggcagcaaatactaacatagagttcaaataggtaatagtcatatatttcggcaaaaaaaagcatagtcggagcatcatcatcaacagaagaagagctgtcgattttgcgcttggcttgaaaattacaatgaaagaaaacacccggtcccttgg

SEQ ID NO: 3229 - DNA, 736 bp, Cannabis sativa
accaacgagttggtttaaaaggaggtattatgcttttatggaaagaacacattgatgttactttgttgcactatggtgtgatttttttttattgttacatgtctgctgtcaatgaaccatcttttcacttttttttgggttctatggtgctcctgaaacttacaactgtataaactcttagctccttctaaaacgtctggcagatagtgctcctcatcttccttggcttgtcattggagacttcaatgagattttgtcaaacaataataaacatggtggatctctctgatgtgagtctcaatggaagcttttcggtcagcgctagacatatgttctttgtatgagcttccctatgaggaatgatgagtacacaaaagaaaggcttgattggtgctttgttaatcatctttgggagacaatttttaatgaacaataggtacaacatcttgattattataattcagaccacagggctatttcttctactttctctttgcgatcagttgcagccaggacaaaagaaggagcatattttgctttgaaaaactctcgcttagtgacctggaaagcaccaaaattatttcacacacctggaactctacacatgcatgtgatccgatcactttggtactctctaatattgcacaatgtgctaataacttgcaacaatggcacattggaaaatatggaaggatgaaaaaaatatcaatgaggctccatcgaaggttgcaacttt

SEQ ID NO: 3230 - DNA, 2196 bp, Cannabis sativa
gggtattatcatttttggccgcattagtgattatgacggccaagttagtggcaattgcctccttcacttccctggggggttggcgctgtcctcaaaggctgactgggtcaatactttagaatttttgtaatcaaaccaaatctacggaggagttaagttatcaccaggtccccaaccttcaattgttctttagagaaggtcgtatattgagcttctttcttgactatctcctcagtcctaatgctttgagggggaagctctaccacaaaccaagtatattagctggaatataaaaattattgaaatttaaaaaacagacaaaactcagggtaaatcgttagaatacctagaagatgaaagcttaactgaagatacaacaccctactggtaggaaaatcagaggaaaaaaatcagtaatctcagaggtcaatagtgcaatttgtgttgcaaacagggcaataagaatccaggcgcttatccagtcgaaagaacctaagctttttcatgtctgtcctcatgggattgcccttgacgctgtaaaagtaaaggatctcctccaaggaaggggcctctagcttattaatcttacagaacaagtaccacccagccaaaagcctgtacaatgaagggatcagttggaaagggacaatctcaattttcacaattagattcacaaaataagttcatagaggaaggtgagcaccactgaaaatgtgggaccaactccacgcattgaacccctctacactaatggaagcaaactccccaatgacagaaagttggtgccgcattagtccaaggacattgcaaagaccaataaatttagaataatcttataacatcccataagatcgaaagcatttggctttctgatccttttcccatatggactcatcacgggcctgcactggtagacgagttttgacccctttctctcttctaacctctataagggggtctctattagtggtgggttcattttctggaatagtttccaaggccgccttaggttgaaatgttaccgcatgtgccttggtttgatcctgtcccactgaaatccttttgacaggtggaatagacacaccctcggtaggtgtgcccattttatgagaaggtcttgattcaaattcattgctaccaacacaaaaaatgaaagggaaaagcaaaccttttgatggatggaaggaaaacaactaccaaactaaggccccaggcagccaagtttctcgggatacggatgcaaggacggagtttcttttgtacactaccttatttttcaacacgtgaacagtcctagccctaacctaaacaaaacccttttgctcgagacgcaaaataccaaaagtttagacagcgggttaatgcacttacttgttagttctagagggatgagtgatgtgtcaagaaagcctacctgaaagctccaaagctagtcaatgcagcggttgcaatcaaactgaaaattaaatgcttctcctaatgaagaactttgctggtccaatcgaaggggtgtgatgtctagaaaaagttccacgcggatgacaagcaatagctagaccaaaccctctaacgctccttacttgtagaggatgtctagaaaaggaagaaaggttgtagtgaaagtatggagctctaggtaaagaaagtaaaaagaatgccaccaaagttagtttgtatttcaaaaagaaaataggcatataaaagatcaacaattcaaatgcttgcaatagatccaatggttagggacatgagaagtctcgtatgatcggcctagggcccacaaaaatgtcaaggtgattttatgcacgtcatttagccaccaattgcactccaccttttttgttgaatgcaccttgccacacgtgaaaaagggcaagcaagacttcttgaaatgtcgtgtgattagcatgcaaaaagaagtaaatgtcttgagtaccctcaaaagaatacaactcatgtaggggtgtatccgcaacctaaatcctcaggacatgctaatggtcactccgacaaagatagcaagctcctgtgatccaaagaatcaagaaagcttggggacaaatgttatccaagtttttgcgaataaggcacgtggcacggtcggagggaagaatacagtagcgatgagaataggtcaaaattatcaagaaaaagagcaccccatggatctaggaggtaatgggagatgatggctcc

SEQ ID NO: 3231 - DNA, 1069 bp, Cannabis sativa
tctaagcacccaaaaaggaaaacaagtgggaacaaaaatgcaagagtcagaaaaagaaaaagaatgaaacaaaaatacctttttgagttttactttctacgtcactcattcaatttcccattcgatcatcattttaattaacagaccaagctatgttaaaaggatcgtacgaaaaaagaaaatctaaaacatgggtatgcaaataaactctgatgttaaaaaggcacagcctgcccgctttatcatattgcaaaaagagataagagaattaaaaataagactatgacagtatgacacactatcactaatcacaaactaatattataatcaactataatagtcaaatataattccagcaaaaaaaaatagtcaattttaaaattcataaagtaaaaccacaactgacaccttaataatactaaattgacaaagaaaaaaacaacaagagcacaaatttttgggcaaaagagagaagaaaaatgccgagttaagaaactgagttgactcgtcttacagttacatgcagcgaatcgtttcttaacgttatgaaacggaatattctctaggagatagaacagtacactactgtgcggagcagtggcattttcgaaaatacaaatgcgaacataacacagtacgtggttgacaaacgtgagtgacagtcacgcgcctgaacttttagaaagacagtttaactggcccatcactagacagtagagacacaaaaatgaaaagattccattgtgcgcactacgcactgcccttactcagtcaagcgcattctagaataagtttcagagaagtaagaagcggcgcacgttattactctaccaataaaaagtaactcacaacctaaatagagtaatgtttcaaaaaaaaaaaaaagtaaataaaaattccgaaaatacatactgatttttcaatttcaccgtaattatctcccggaaattatatatttattgtatcattgtgatatattctttaagaaaaataatcgtatttcccaaagaataataaagattgcgttagatttgaagaattttctcggtaaccaaacagatcttagttc

SEQ ID NO: 3232 - DNA, 826 bp, Cannabis sativa
tgttcaaagtgttaaattaaaaaaacacagaccaaaagacacaacctttggtgctttgagtaatatagacactttccacacccatgactaaacaactaattaaaaccctttacccaaagttaccattaaacactattattatactaatcaaacttgaaagaaattgataaaatggactaaacgactaattaaactaaacccctttatccattagacaactaattaaaccccttatatttattttcttgttaatgttaccattaaactaatattatactaatcaaacttgaaagaaatggattaaaatccccaattgttaaatgacaaaagcaataaaataaatgaaaacaatccaaagaagggggcaattgaattgaattctctctccttagtgggccccataattgatgtaccaataaaaatctttcctttagataagtaagaatcccaaagccttattattattattattattaacattattgttctttgcttgattatgggattcttttccaatttccactccaaattgcaatagccaaggagtgaagagaggagtgtatatgagatgacccttatgaaaattctacacaaaaatccatgaaagcccccatttttgaaaaaccctaaacctaaacctaaaaccaaaggcaacaactttataactttggctatttaaagctctcacctttatcatatttttttgataattcaatatggcacagaaggaaattatggatcttgatgagtgggagctcataccagatgatgggtttctgggttttcgtgaagattgttctgaaaagaaaatcctttacagaaaatt

SEQ ID NO: 3233 - DNA, 697 bp, Cannabis sativa
tcatatccatcttaatcatgcaagaatgactatcatttttcctcccatagtgtttcaaaagatcctgaaaaattagaatattattgccaatatacttcccataaacaaatccaccttgattagccacaatgagacttggtgacacctgcctcagccaagaacaaagaaatttcataattattttatagaacacattgtaacatagtgtgcctaaaatcacaaacaatgtttgggtattttacctttagaataagggtaagattagtagcatttatctccttaagaatcttccttcaattcaaagttgaaagcacaattgtagtaaaatcagttcttgtataggtccatgtcttcttcaaaaaaccacaactaaacccatctgcgcctaaagatttattatctggaatggagaataaagcatttttaacatcctcctcaatatcggaaagcattagcatcatatcttggtcctcattcatctcttgttcttcctgaaaaatttcacaactccctacttttttgatgctcacaatatgttcactgctttcccaacacttatattatatattttagtttgtaattatatatattttctttcatggatatatatattgatttattatatatgaaatgtatatttgcatgtacatctactaataagtaatatacaaatatatatataaacataggttattgg

SEQ ID NO: 3234 - DNA, 1019 bp, Cannabis sativa
gacagcgttgaaccaagcccagcagcagccacaacctaacaacgcccaattgcttttctcactcacatctctctttctctttctcgatctcaaacactccctcccgttttttggcttcggtggtctagatctcgcatgttctctctctttagctttctatttctctctggtggtctcgactctacatatttcatatctaactttttttttcttgttgtaaggaaacattggtggttcggcaacgaactatggcggtgattcgggaaagggttgtggtaattttggagatgaacaagagccatcttaagcaaattaagtctcgcagtgttaacatcgtcgaaacctgacatattctaacatgccttaatgatcttggcatcatatgctgggtgtcctcgaatttattgctatgaaaattagtttattccaagaagaacatgcatgagctccaaagtgcgagggaaccatcatctatacttcgactattgattttgccaagttcatttatttcccttcggtgtacacgtggcatgtaaccagacccattatttattgctcaaaatatgagttgacactgtgcttgggaaacaaggctagtaggttgttagtccatagtaattctcttattagtcaaaattttcaagcttattattatcctcgcggttctttcttctcggtgacagtgggtcataatccaagttttgtttggcgttttatcatgaaatctcaaagcttgttaaaggaaggatgttgttggagtattgtcaatggtgcttcggttgatgttttaaatcaaccttggttgctgagtgaggagaattttattacttcgactcatcatggtctggcaaatgctaaggtgcatggctcagcttatggccccgaggtctcgagtttagtatgttgacttattgtatgaccttttaatgagcaagacaaattgtttattcagagtgttgttcttaatgatgggttaggagaggaccaatgtcattagaataaggagagtttgaatatat

SEQ ID NO: 3235 - DNA, 1155 bp, Cannabis sativa
acaagtattttttaatcttgttatggtttatgactgacaatattttatgaccgtatatagatgctttttagtcaccgagttcaagaaattggtgctgatacttgcaaaagttgctgctttgtgagtatggcatgcgtctgcagacaaccatttggattcaaccatggggttgcaacgtctggctattacatgcaagagcatgatcagaataactctccaagcaacgtgggaaatgtatatgttgctgagtctgcccctagcgaggggaatggcctatttaggcctgtacgggtacatgttagggggcctattgatgggcttgcaggtattggacgtggaactacttttgtgcccgcaactgcttggcctccaacacgctttgtcttctcccgtgtgccatttggcatgggaaacagaaattgcccgcagtctcttgctaatgatgattcagagactagaaatgatcacaatgtagacatttctggtgatggcttaacagctttggttgggttaagtcaaggaggaagcaactcggctaatatcaacggagagcaaatagagagaggttatgagatggatttgcaaaacagaatgtctggaagttccatgacggggccatccagttctagtggtattcctgtgcagatggtgcagtcatcagagcatgcaattggagctgagtgggaaaattctaatagctcctcaatatcactggatatgaaaactcccttaactcacttccctcctttccggtttgggtatgttaattcacttatttatggttgacagcttaggttaacattaaaaggatttctcttgtggttcttgatcttctagcttgaccactgaagtgttagaaatcagtagcaactttattctgatcagttgatattccttgtacttaagaatcatttcttgtgttgtgtttcctttttaattttgatttgactgctaagatgtagaaaacatgtcatgtgcttgcattgcattctttacagggttcaatttgaggatgttcataggctaagtgatggacaagtcaaacactcccctgaagtattttatgctggttctttttggaaggtagtagactatttttttcttttcaacaaagaataaatatgactgtcatattcctgtatctgttttctgtat

SEQ ID NO: 3236 - DNA, 834 bp, Cannabis sativa
tatttttacctattggtatggaaaaaaaatgtacccatgcttaccataaaaatacgtacttagaacacgaaaataatgatacgtaaaatcatgaacttaaattgaaaagagcacttggcacaatggcattaacaaattaacatgcagcaaatttacatgaaaaatcaattaaaataatgacctcacacaatcacattagtatttcaagctatagacacgatataaaataaataaagaaagacattttcactattgacataacgagtttaaataatttgaaattaagtagtgatgattgaaggtattagatctgatttggacccaagtattccagccttagtgtctgggaaatactctagtccaggtatggttgtcacttgtccatgttcagtaactctaataggataactgagcaagtggccaggtaagtcatgctctaagctctccctgcaatagagttcccaataactttcagcgattcggttcacctttcgcacacactcaatgctttcgggttcaaggaatgtgtcatgaagcattcccaagtgttcataccataatgccattctatggccatgaacctgtcccttggctggctgctgcagggttgaaacatgatgaggttgataggcgcccatggcgatttcggtgtctctagcaccatccatagacctctggttgatgttggctgatcctatgattatgtattcatcatccactgcagaaaaaattaaaaaaaaaaattagacattccaattactttagtatattatgtgtctttaatgtcgagaaactaaatatgttattagtgtaaaatcttggtaaactggcatg

SEQ ID NO: 3237 - DNA, 1291 bp, Cannabis sativa
  modified_base (721)..(725): a, c, t, g, unknown or other
ttttttttatcgtattttaaattgggcaattgtcgtcttgaattgttgtcgattttggcttctgattgttatcattaattaataaaagtagaatattttttttcaaaagaaattaaaaaaaataaaaaactttccgtcttaatttatttctttcatccttatccttaacattataagaagaaccctgaaactatgcaagataatgcgtaattgcctaattgaaacattaaaaagaagcagtcaatacacactagtaaatatcattgttaatgtttattaattgctgtttttttttaataattattaaattaaaatatttgaaacttcatatataaatacaccaataatatatgattgtacaatatttcatgaatgatagtgttggaaccacatgtgctgatattttattttagaattaataaatatcattttagattttacgtttttgtaaaaggatcttttattttattaaataataatgatataattaataaattttagatattccgttttacatgagcctccaaattattaattaaaaattcaatcatctcagcatgttcacataaattatgcgattatttctattttatataaatttaagatgaataataattttttttaaattactattacaaagtataatagtaatttttgtttttatttaaatcactattatgcttttaaatttcaataattattactatattgaatattattnnnnntaaaattatgatattaaaaaaaattagaaactaaaataaaattaatatacgtcacttaacacgtaacatcaatctaataataataatatatatatatctatattttcgcaagaaaacaagttcatataatatagtaatatatatatgagcaaataacaagtttttgagtcattcaaatctcataatattattatgaatattttaagaaaacgactgtcatatatagtaattgaaatacaaaatagcggcgctacattatatataatgttattattttttttatatgaaaatcggatagagataaacaaaatgagatctagtcataacaataattaagatatatatgtagaataataataataataattcagatacagtttacgtgtttcatgggccaagtgttgtgtggtgtagtagtatggtacttttatgtgcatatttctttacttaggtcaagaatttaaaacttaccatagtccctatcgaaaaggattaaagacctaactttttttgaaggctatatatcttgttgtaggtagtgttatatatctgtgtgatagtataat

SEQ ID NO: 3238 - DNA, 1149 bp, Cannabis sativa
ttttttaattcagtcatatatttaattaaaaacggtactcaatatatattattttattttatatataatccattttcagaaaggtatgttagaaatggacaatacatttgtatttccaggctgtccctctcattcaagatagaaataaaaagacataactaattaagatattatctcttcaaacaaaaccttaattaatttacaaaaaaaagaaaattaagagataaaattgtaaaaatactcctctctaattaaacttaataaacccacattaaattaggtcagattttttttttcttgactaagattacctctcatccttatcatgataagcctcgaatatctttttcatcttcttcttcggactattatcaatggcttttgtctcactgtaaatgctgccgagagaacgaaaccgcttcttcttcttgatgatgatcttattcagaggcaattgttcatcaataacaacatcttgatcatcatcatcaataataatatcttcgtcgtctttaccgaaaatctcctcatgaaccttcgccactacccgacttaaaattcttgtattgtcaccactgaatgaaattattttttcatcaataataatacgattattatgaccagtagaatcggccatacaaatctgctgatgaggagagaaaacttgatcaacttcattttcatcgtcatcaataatacctgtagtgacagtagtctccttcacattacaattagtattattataaatcattgagttttcgtcgcttaactgcacaagttgttgagccgccgctatgtccgagtccgagacacaatactcatgagcttcttctcgttgcttcttcaactggaaatattgaatttctcccattaaaaacaacccccccaaaaaaatagagcgcgttatttgagtacgtgctgtatgaaatcttagagagagaaagaagagagagaaagaggagaaagtgcaaggatggtgctatgaagattgtgagaaagagatgcctttcgtttcgtatttatataaaagttgttttaaatcgaatacttaaacctattatattggatataacttattggggttatggatgtccaacgaaattattaaatcaatgatcacgtcaatggactttttgactaaataaacgg

SEQ ID NO: 3239 - DNA, 1420 bp, Cannabis sativa
caaagaagtgcaacttcggagtctcctctgagaaattcttgggtgtcattgctagctttagggggattgaagctaatcaagaatagatcaaagcattcaagatatgctatatcacaagaaacaaaaggatgtacaaagcttaactagaaggatttccaccatcaacaagtttttttccaagtctacggataagtgcatccccttctttcacatattgcgtggatacaagaagttcgaatgtacaaatgaatgcaaggaggcctttcagaagttaaagacccatttaaccaaggctctaattctaccaaagtcggttgagggagaattgttatacatatatttcgtcatgtctaatcacgctgtaagtgctgcactagggcgagatgaaggaagagtccaacttttggtataatacataagcaaaagattattggatgcagaatccaagtatcccatgatagaaaaattatctttcttcttgctaattgcctcatgaaagttgggaccctactttcaagcccatgtcataaaggtattaacaaatcaccctttccctcaagtgttacaaaaatggagtcattcagaagagtgttaaatgggcgatggaattgagctgattttacatcaaatatcagcaccgaatctcgattaagtgacaagacctagctgactttgtggtagagtgctctggaataaatgatcatccaaacgagtcagttctagaacttcaactctcgaaggtctgcgttgatggcgcatcaaatgaaaagggagtcaaagaaagaatcatgctagtttctccgcaaggacactagctccaaaatgccctccgtttcaagttccagccaccaacaatgaagcaaagaacaaagcattaaagtgtacaatgattcattagattttaaataaatattttcattaaattaatgtgatgtattttgtgttgaaaaaaatttatttggatttaattttgtttgtgattttttgagaacataacatttgtgaaaagaaaaaaaaatataatgaaaaaatgatgaaagtatcgcccaaaacattaaatatggcatttttagaagatcaggaaaaatcccaaagaaagaggcccattcggcccaacttctcttcttcaagagacacgccagccatgtgtcgggcttccattcacccgcagctaccaccgtcagcaacagcaggggtaatccccattcagcacgccacacgcgtgtgagacacacgacctcaccctggccgtacgtgcgcctcaccaccagccccacaaatggggctctctctctctctctcttcgtgtctccattgtgtactagccacaattttgtgacattttctctttgcgacatgtggcaccaactaccttttacaacaaatcagcaaatgacacgttgcactccaaaatttcctt

SEQ ID NO: 3240 - DNA, 3171 bp, Cannabis sativa
gttcctagttttgggatttggctccaagttaatgataagtctatctatccctcttcttcaaaatttaattttattgatttagataacccctttgttctgtctaaatccaagtcttggaatataggtaatggaactgctatgtctgactctgataatcttttcagtccgaaggttcttgaaaaggaagggacgaggccatccgagtcgatgattatggagaaagctcctggtgacaccacggctaaacaaccttccaatcctatttcggccattcaaaaagagaaagggaaagggaagattgatattaatggcaatttgcaatgggttatggaggagagttccatgggagattctggttctattggtaggattgatcagaaggttagacagctgggtcaggctcgaataaaagacacatctcctggcaggaggacatgtccaaagaccttttttaatgattcgcaagctactaatgttgttcaagaatccaagacttcggatcatgtgatggaaagtcttataactaacgatttgaatttggttgatgtccctattaattatgcaactggtttaaatgtccatacacaggaagataacaacaaaaagagaagaaatattactccgaaaagagtcaaaaataaaggtttttcaactataactactagggggaactcaggatgtaactgaagagggtacaatttcagggggaatttctgccttgtcagatttaatccttgattcaacaatggaagcggcgcacccagattttctgggttgcggatcgcaatgaaggccttattttggaatgtccaagggctggggaacccttggacattgaattccctaaattcccatgtcaaagattatcatcccgagatgattttcttgtctaaaactcggttgtctagtgctgctatggagtttgttcgcgtgaagttggggtttgctagttgctttactgtggatgctaaaggcaaaagcggtggtttggcgcttctttggactgataaattcaatgttcggatttaatcttttacggtctcgcatattgatgctattgtcgataatgatatggggtttatgtggaggtttactggtttttacgggagcccggatccgggaggacgaacagaaagttggaaacttatgaagagattacaacctatgtttaatggagcttgggtttgcggaggagattttaatgaaattactaaacaatctgaaaagaagggaggtggtcctaaaccagaatatttgatgcgtaattttcgatccacaatctcaagttgtttgctgcgtgaagtagagactgaaggcggagatttcacatggtgtaataaaagatcaaagaatctggttttcgaaaagctagatagagttctctgtaatgcagattggttgaagaaatttaaagtaactaaagtttcccttttaaattggtggaattcaaaccaccgacctttgattctatctgctcaaatggggaatagggacaaagctacgaatcataagtggggttatcggtttcattttgagcaagcttgggccgaaaatgaggagtgccaaaggattatcaaagctttttgggactgtaaagttttgaacaatcctcttcattccctatctcatcgtatcaccagttgtggaaagaaactctcggtctggaacattcaacaaaaaaaagatctcaatactcgtacaaaagaactaaaggcaaaacttgaggtgctttccaaatctgttggtcaagataattggattactctccaaagtcttgaacatgatctgaattgtgttgaagaaaagcgggaaatctattggaagcaaaggagtcgggctctttggttaaagcatggggatcgaaacaccaagtcttttcatttcaaagcttcgcatcggcggaaaaaaaatactaataatggtctgtttaatgagaaactacaatggtgcacaaaggaagaggatatctcggctatagcaattcaatactttcggcatctttattcttcatcaaaccgtggtcttaacactaagaatattctatcccgctgtgttcctaatcgcattagcctggctgaaaacaaaagtttaatggaacctttcacagctgaagaagtcaaattggcgctattccaaattcatcctcttaaagcacctggtaaagatggtcttccaggcctttttttccaaaagtattgggatatggttggccaagaagttacagcagcttgcctgaaggttcttaataacaattcggactgtggtttattcaatgagactcttatatgccttattccaaaagttcaaaacccctcaaagatgactgaatttcgacccattagccattttctgttatttacaaagttatttcgaaatgcttagctagccgaatgaagaagagtctcaattctgctatctctcaaaatcagagtacctttttagaaggtcgaatcattcatgataatgccatccttggttttgaaagcctccatagtatgagaaaagggcgttgtggtaatggtgcaaaaatggcgctgaaactcgatatgtccaaggcctataataaggtggaatgggacttccttgaagctatgatgtcttgtttggggtatgaagatgattggatcaccaagatcatgaattgtgtgcgctctgtgtcttactccattcttatcaatggttcggctaaagggaaggttgtgcttgcaagaggcttacgacaaggagatcccctctccccttttctctttctcatttgctcggaaggtctttcttgcttaattaatgaagctgaaagggcagggaaaatacatggtctgaaatttggagcaatggatcaaaggctatctcaccttctttatgcagataacagtttggttttcatggaggcaacactagaggagggacaagcactataagaagtgttaaaatgttatgctaggttatccggtcaatgtataaacctggataaatctaacttatgtgtgggatgcaaaattaaagaggccaaggcggaggatttggctggccaacttggggttacactggttaaacatcatactaaatatttgggcatgccaacttttgttggaaagaacaaaaaataggtctttggcaaaattagggaccgggttgaagctaaactttaaggttggaaaatgggtctctttt

SEQ ID NO: 3241 - DNA, 750 bp, Cannabis sativa
gtttcagcttcttctccgagccgatgttgaaaagtctcttgattttccatataataggcgaagccgtcatggctcgctcggctgagattttggaagccaaatcaaatgcggctgcgaattcgggtatgggcatggatagtttcaaacaacccgggtccaacccgaatgaaaaaaggcatatattatcaaaagaaaatcttctaaacacatcttgtaaatccaaaacgacgtcgtttccttcaagaataggaataagcctgttctgaatttccgaagccacaatttcaaacgcgtaactcttaaccgtcgtactcccaagttccaaactcgccatttttctctgaaatcgccacgtgtcaccatcgacgttaaaaattcctcgaccgagtaaatcgccgagaatcatcgaaaacggttttcctttggggtaattatcgaatctcgtcttgagaatatactcaacgttttccgggttggccgtgacgatgttgttaaggacgtgaaaatgaatcgttgaagtcaacgattttttgagaaggtgtgtgtaccaatcgcagaggttgagaaaatcggctgaccaagtcgccgataagaatgaacggcagagatggcagttacaccagggtttgattctgaagagaaagactaagaaagagaagaatgagaagaagaaagtgaaagtgaagaagagaagagcaagagtagtagtagccatggaatccatatgaaacgactgcgttttatgagaga

SEQ ID NO: 3242 - DNA, 1455 bp, Cannabis sativa
cccttcaaggacactgtagaccataccacaattagctgcaatgaggtagtcagccatctgattaccagtgataagaactgtcgcaaagccagcctcctctctggccactgaggcgtccaccctgaaacatctggtgtctttgtgcacctattggtgaggtttctccccgcccaactcaggaggaatatccatacaaacagaatagtgagtcgattagaactcactaactctaagcatgcaatctgcatagatatcctctaaattacagaccctttctttatgtatcatgtcatttctccatctccaaatcgtatcacagacacaagctgcaaacaaagataggtttccatctgttatgtcgtaccaccactcaccaaactctgtaagattgttccagattagattatctactcgaagaccccacgagcttctaaacaagattccccggacaacatgacatttgcaaaagaggtgtagagtagtttcctcattcaaattgcaaaaactgcacagagattggtctcccctgcctaacccaagacggccctttgttggaagaatgtcagaaaaaatcttcttgcatagaagttgaaaccgtggatgcaacttgatttccagagcttactccacatcttgcacggttccttaaatcagtgttgttgacttatccaataggcgcttttgactgagaacaaacccgacttggaagccttccaaaacagaatatcagacccttcctccaaaggccttattctaaggatctcatcagcgataattgggttaaaacaatcccgaatcagctcctcattccaaactctcaatccatctacaaacaggtctttaatattccaaaaggcctgatagtgtctgaatttgaagtgtgcttttaactcctccatgttcctatggggaacccagggcctatcccaaagctcgctgcctccatctacaacaatcaaccctgcaccatccaaacagacttgacgagcctcaagaatgctcttccaacactgcgaatcaatagctttcttttccactgaccatggggacatcaacctgcaatatttgtctctaagatcgcggacccaaaccttagtatcatacttcagtaccatcaaaaaaagcttcgcaagaagagccacattcatatccgcaaaccttctaaaaccaagaaccccactcttctttggttgacatatatcattcctgcttttcagcgcacaatacctattcctttccgagattccaagccaccaaaacttagcaaggatcctgtccagatcattgcagagagttttaggaacaaggaccgtggacatgaagtaatttagaatactctggaggacagaacttatcagcacagatcgtcccgcttgagccaaatggcgagccttccggccttcaagtctacttagaattttctccttaaggaattgataatcccttttttactag

SEQ ID NO: 3243 - DNA, 747 bp, Cannabis sativa
gaaaataaaaaacttcactcttttcctttttaaaaatatcaatcattttgtcttttatcagaaaataaaataaaatcattttattaaatccattttgcttataaggtcaaacttgttgttcttggatttgtttggctaattcagatcgcgatcggtgggaatctgtctttcgttgttgttaatttcggttgaattaggagataacagtccgttatttaataattatttcatagtttctaaaaccaacagttgccaagtcttctctttctctttctcttctagaattgtatctggtttttctttttaaggataaaaccaactccatttgggttttaggatgaagatgcacttctgaactcaattggggtttttccagttttcttaattttcttctgttgtaagaaatatatatatacattatatatatttggtaacattggattggggttttcagagtgaggggtctgcagagagagatagaaaatgggggttatgtcgaggcgggtaatccctgcctgtggcaacctctgtttcttctgtccctccatgcgagcaaggtcaagacagcctgtgaaacgctacaagaatttgatctctgatatcttccctcgtaatcaggtttacatttctttctttcttctcttttcatttactatcactatcataatgccttgcacaattggaattaagctgtaggatccaatttattgaattatagattgttatgtttcagttatggtattaaaa

SEQ ID NO: 3244 - DNA, 2101 bp, Cannabis sativa
taatttattgaattattaatttaaggcatcctgccatttaaatttacaaaaataatcacaaattaaaccaaattctaaaagaaaataaattaatttctaaaaaggcaatcaattttgcatttaactaatatgagcaaaaaccgtaatatttttctctgtaaatattctgctttaactaagtagatagtatacttcggtcataacgatcactttcctatacataaaatgttaaatgaaatgccaaacaacatcattaaaaggggaagaaaaattggataataatatgtaagagagctcaatattaaaacatgttctaaactaaagtatttagtaatctacagtagcaaacaattcatttaagtctactcatattgacccctccccttttacactttaattgttacataaaaataacatattacagatattttactagtcttacaaagtcaatttcaaataagtaccaaccacgaattctatgcatcactcaggctcttttagtttataacatctttgacaaacaacaattaaaagtacgaaggctaaactaattttctgtttgaatagataacagccaaggtgtaattacattaattaaactcaaacatgaaaaaaagaacgataaacaaacaatacacagcctcacatcacactgaaatagaatacatgagtaaatgtacatcacaatgattatattataacaaacgaaactcaagcttgagaccaataaatgtcaagttcaccccaatcaccttctggaactcttaaggccttccaaacagctttggaggcatccacaatgttattaggacatggaggctgataatcatgatcagaatcacatccagccgttgagtcacactcatccacaaccattgcattcacactcctcccatttccatatatggttatgttttgtaaacacctctgcatattactgaaccatcctgtggataaggccaccactggagtgctatccgagtggtacttgtggtcgcattccgagggtgcaccgccatctccacctttctcgaagctgtttagtgtcaaaactgctttggtgtggccagtgacccttggtgagcagttgtaggtagtataagacttgccttgtttgcagcaatcggagtcattttcctggttgcattgtcctggaggaggccttttcccttttattttgccactaggattgcaagttttggcctcaatggttaaccactgcgtgatcacaagaagaaaaatgaggaaaagggccttagagctaaattggttcttcatccctctctattttttttttctctttattttggtttggattggtgaaagttgatttacgagtgtctatatatagagataaattactactttgaaatataaccgtcttttctttatttatttcaatatatgacacgtttagagtctttctaccaaataagttcgtcgctccttagatatgtgccgttggtgataaaaggaataaatttatgttgattatatatcaccaatttgagcctactttcgtattttagcaatgcaatccctatgtcagttgctacatataacgttcttataattctctttagctttgattaaaataatgatgaattttcaattaaaaaggtctacatctatatggatagattttcaagattttttctttattaactactctgtcaatttttaataaattacctcaacaatactagtgcctgtcaaccattctcatcatggataaataaaacaaaggacaaattaagagcgtatgttttgagaaatagccctttagaatagtattctgtattatatagataatctcaatataaatattttaaccttattaaaacactataagatactattgactcattaacagagacccattttttggaaaatagagagggaactgctatttggctctttatgcattaaaacgactgtggttagaaagaatggtctaaaaatcctttttaattggtcccgtaaaacatattgaaatgaaggattagattatttgaatgtacaatttcatcgaatgaagtgatggggtacattacataaatgatcccccagctaacaaaacagtagtacatatatgaatcat

SEQ ID NO: 3245 - DNA, 1715 bp, Cannabis sativa
ccccagttccgcctccaacgtatattcctcgccttcctcaatacaaactccgactgtaccggcggagccaatgtcggaggccaacgaagcccagtagtacccattctcaaatccttctccactctatcacctccaacctcttcctctccaaccgccgattatctcataacttctcttggcatctcccatgagttagcttttgcggcggcgcagacaattggttcacaccgggaacctaaatccaagtccgatgatgtcatcgcccttttcagacgatacggtttctcttccgatcaaatcgctgaaatattctccaagtgctcccagcttttctggtccaacgcagtgaaaactctcgaaccgaaacttcaattcctctccgaaagcggaatgtctcgcgaaaatcttgttctgatcgtctgcaccgatcctttccttcttaaacgaagcttggagaagcacatatcgccttgtatacagtttttgaagagcttctacggcggcatcgatgacgtcatttcgcttttcttggccaggcgcggcacttgggtactccgtcagttctcgggggcaatggcgtctaatatcgacactctgcggagtcacggtgtgccagatgataacatcgtgaaaatgttggaaattcgaccgagaactctggctcagaacgtggacgatttcgatgagcttgcgagggaagctaagagacttggtttcgacatatcgagctcgatgtttatccatggaatggccattctttcggggatgaaaaaggacaaatgggtgtcgaaaatggacgttttcaagagctttgggtggtctgaagaccaatttcggtgtttgttcgttagacaaccccaagtaatgggtgcctcaaaggagagactgaagatggcattggagttctttatgaccaagtttcaatggggtcctagtgaattttgtaaatatcctaatgttctcttgtttagctttgagaaaaggatattgccaaggacctcagtgcttcagattttgctctcaaaacgtcttgtagataagaagagtatcggtagagctttcttctattcgaacgatgtgttcttgaaaaaatttgtggagcatcatcaaccagcccttccgcagctcttagagttgttttccataacaaaggttgaagaagatgttgtattatgcagtggaaactaaggtggcatctctaacttgttctctattaataatttttttctttccattcttcaatgattgatggaaaattgttatatctatagaaaaaagttagttctttcatataaatttgatttgtgtagttcattcattttaatgatgaaaattgtactcgaggtcaaattcatcttgtactattgaattggactatgatagcaaaaccaagatatgattttggaaattaagtttagataattgaataaaaaatgagttagaaccatcttgaccgagaaaccatgcacttattcattgttttattgatcccacacagacagtgaaatatttattgatttcattcttagaaggtggaatgttttggcattagaagttagatgtaatgaaaattgggcattggccagattatgatcctgtgttctctaagatgataaactatttgataatctttggttggagatattgcaatacaatttttcttacaattaatttcatttaggtttattaaaaaaaaaaaaaaaaatcatttgggt

SEQ ID NO: 3246 - DNA, 639 bp, Cannabis sativa
gacttggacaacaataagacaatctgactcattttcaactttgcaccacccgcgcgcattgatctagctcaaagcttctcgaattccaatgactttggctaatttaggctccacattaccgctaaggcaactaactttagcttctctagcaaactaatgtgattttgagcaacacaggaataactgaaaatattagaagtactagcaaaaagtgcagcatcagtgttcaccttaatcgtgtctttgtttagagtttttcaacgctcaacaccatcttctaaactcataaaccctatagagagagagagagagagataaaatgatttgtcttgagcatattgccattgattaaggatagttctagccaacaacacaacatctgctacatcaatacccttttgataccaaaccagctcgttcttatatttccataaagcccaactcaccgttgcaataagttgcctttcctccccacaaaatcgatcaaaaacacagagtaatcaatccaaaaaagtgcctgttacaactggtgtaaccccgtagcgatcaacttatcccaacatgcatgagagaagaagcaaaagatcaaagcatgggagatggatctcctttcttcgttacacagaggacatagaaaat

SEQ ID NO: 3247 - DNA, 1278 bp, Cannabis sativa
gttgttgatttattttttctctgtggtaacaaataagaagaattgtttgtatgtatgtgtgtttgcttatcttggtcttgtttatatcggtcaatttgtcttggactaaaagtttctttgtataataaatgatctagctcactctgttatgtccctctaaattttgactttttcatggtataatgggatacacctcttaatgttattattattgttgtttaatgtttttttttccttctttctgtatgagtgtacaaaatgtctcaatatgttttgtgttgtttttagttcagatgttatgttatgtgaagtgaaaaatgctattgtttgattgcttagacttctgagggatttggattaatctgaacactgaagtacaataacttaggaatgacaaaaacgaatcattcccggtagtattgtcttgcggttaattcacaacaaccccttctcctgaaatctatatgagccatgtataaacaaactcctactaataacttgtatagcactaagactttatggtacaacatgagatgaatagcaactagattgtgttagatatgatttagaaagtactcgaaactaacggctgatgagtagagtagcttattgtattattagaacgtataaatgaggtaaggaaagtagaaaaggtacggtaagaagtatgtcgttccatttcaaaactaattaggaatgagtagtccatgttattattaatggtattaaggtttccaattaaacttaattagttgttttctcaatctcccttgcctgctctgcctaatcttgaactgtatttgagacttggctgttgctttgggagattttagggagttacagtatccacaagaaaaaatcgatttttgtagttgcagatgaaatccagagttctaggtttaatggttggcctaaagttcgaaaccatatctgctaccactgctctgtgtgcttgacgtgctatgttgaagttgatggttagggtaatgcttatatgtagtactataaatttgacttccttctacaagttgttctagaatctaggtataatataaacgtgtatggattgatacgggagtagttgatctgaacatattgagacatatatatatgatggatgataagtatacacttttaatataggatcttcttgacgttcttgctggcactgcttttagttgcaagatgtataaaataatatggaactcccctgttgttcttctcttatgttagctctaatatcgacagatgagaaatgttactgcagtaactaagaaa

SEQ ID NO: 3248 - DNA, 1213 bp, Cannabis sativa
tagatagatgaagcctcttcataatcaatcccaggttctggctttggcaatgcagtccttccaaaatagtccaagcttgcaagatacaacgctcgagttcgctcagcatacttaacaattccagcaaagaaaacaagaacagtacaagtccacagtctattgtcggaaggggtaagatagaaactgtaagcagctgcaattgcttgtatgaaaagtccaaaaaggtgtcttatccaaaactcattatcctcaagagcaaaagaagtaatggaatcaggtccaccaagatgtaccaacagaaaagcagcccaaaatgcataaatttcttggtttacgaactcacctttgtgtttctcctcagtttgtgtaattaaaccaatagcaaaagctgcaacccaatcggccagcaagtaagccatccaaatcaggaagatgaaaaatgagttctttgatctttgtctggatgatgcgaaaagaactaggaaaacttgtaaggagagactcagtgtgatgaaacccctaagattccatacgtcccacagcttcttcagcttcttaattagggttggtgatgccatgtatctgatggtcaacaacaatggagacttgtccagaaatgagggaacggaaatttcataaatatacacttttcactaatcagcattgctattggctatcctaagcccattattttttacaggtgatatcttagtatttatatattaacggtatttcttaaaaattattttcttaaattactagattcaaaatttaattaaatcaatattattatgataccgaaagtgctagccagtagcattaccttttagcaattctcttcactaatttataataaataatgtctattttgatttactttatccttttcaaccctcatattaataattgtattttttttttttaaaaaaaaaaaaaactctctctaactcactcatctatgtgctctctttctctctctctctctatagtaaaaaaaataacttcacgaccacgacggtcggtgatcacagcggaaattccgctaaagaatcacacacattgaccgtactaaacccactgcatctgcaataatgggcaagtatttttcaaataatttgttaaacattttgaagagcatgtagttcattttcagtagatatgtgtggttattatttgcattggtgttatgttgttgttttaatttttttttttt

SEQ ID NO: 3249 - DNA, 717 bp, Cannabis sativa
atcacaaggttttaacttgtgatttgcatggtattttctcaaaaataaatacaactaaaagatgagtataacattacccgctaaacaaggggggtgaacctctatgaatcattgtgtcaactttattatttgcttttataatttatacttggtgattgtcagtcgtaaataaggctccgttgttagttgaccaaattttgagttaaccataaccatgtgaaataatgaaatatgaataatattatactatctttgtttgttttgaattaatatatgtgtctcttagtgtatcaaattaatttaattatgacacattaattaatctaagcattttaagtaaaaaaaagttgtttagatggttaatagagtagaaaagtaagtttttaataatataaatttagttagttaaattgtcacactaaaattggtttaatacattatgtgacactaatttttaacatgatcttaattcttttattttgtcaaacatttcaatattgtgttacatctatagtaacttattatatttattatatttagtactcttcatattattttgatgcttcatagttggcggcttatgagttatttgattgaagatgttgttagggtctttgttctatttaatgtaaacggcttggttagcttatttttgttgattatgctctttgaatattatttacatgtaatggattgtatttggtttacctattaatg

SEQ ID NO: 3250 - DNA, 1006 bp, Cannabis sativa
cttccccctttcgcccacgtgaaactaggacccagaaatcctaagtcgatcaaaccagctctatgaaccattcttcgaaagtcaaatgcgtattgggagacattaccattatagttgaagcattccttatcatttagagttccattcatgtcccctagcataagcataggattctgggacttcagaacaatgtcacccacatttacccaaaattgctcttcatccaatctgttgggaggctcgtaggtacccaatagcatccacggtatccctggggggtcagaggtaattttgcccattattaagtatttggaggatgcttgaacactgcacttaactcccttcatccaacacatggcaagaccccccgagagcccaacgggtggaagataatgcaaattcaaaaagtggagtttagtacatactctggtgaatttttccggaggaagacgaatttcagacaggatcatcatgtcgggtttatggtggtgcaccaaatgcggcaattgtcgaactgtcgcggagttcccgagaccgcagcagttccaagctaggatcttcatggcgacattggagacttttccgggctagtctccatagccccaaactgaaaatccaactcagaattctccttcatctcttgtctagcttcaacaatttcagtgatcgtacaactagtacttggctttctctgtttttcaatgataacaaagtgattatctaaattaaccttaagatcaaaggtttttatcttcccggtggttaatcgttgtggagttgccacccaatttagatttggcattatttcctttcttgaaagacttaggcgttgcagccagcggggattgagtttttggaagtctgcctcttctttttcgagctccagcttcgacaggggccacatgggacttggcttgcctccttcctctcttcgaagatggcttcgtttccccatcatagcccggtgaatagttactctcattcggcactcctgtgaggttcactt

SEQ ID NO: 3251 - DNA, 922 bp, Cannabis sativa
gcctttgcctttgcctttgcccttgcattaggcaacctctaaaggcagttggccccctgcagcagccctgacctcttcatcaattccttgcttatggaagtccgagccatagaggctgtagcaaataagaaaaactccatcagtcacaagtttaaaccagtaaagaaaagtcagaaaagaaggattaaaagaaaatgcttttacttgggattttgaagtctagcgaaaggtttggaaccctcttcacgggaaagccagatgagaagaactagtattctcggagatcagaggaatgccgagtaatgttgtaagggcagcgaacgtctggatacctttccagcttatagaatccaactttacgcttgttggcgcacattggttgaggcttaacggcgtagcagtatagaatctcttccgaacttggcattcgaatatctgcattttgcataaaaataccaccttgacaatagcttgtaggagggtgaaataagttgaaagttccaatctttgcgaagtttttcgcaaagtaagtcctcagaggtagatgtgccccacttcagatgtggacccagctgcagacactaaacccgtctgtgctccgagaagcatattgccctgcgaacgacagtctgttccagaccaatcctgggatattgcggactcctccagcagaagacagattctctagcatgtcgtatgctcgaaactagttgacgttttggtccatctcctaaatggatgagttgtatactacatgagctagaggtggagcctctgccttctcttactttcagttcgaagcaactttcgacaaagtatctttttggggctcctcagccgaagccctaaccttggtctcctcgaggttcatgacctcgaggtggaattcatcgtcgaggttggccattggaaaagaagagaa

SEQ ID NO: 3252 - DNA, 1473 bp, Cannabis sativa
gaattcaaattggatatcttactttgaaaagtatatatatattgactatttcttttttatatgagagagccaagtcaattcataatttgataattttgtcatagtttttatgttgtgtggatttagttaatacaacacaaatttcagattattacgtacacaaataatatttataatacaaatgccattaattctcctaaatattagctaggttagtcaatgtatgctgcttgaccatagatgaaattaaaattataagatacgaataaaaaaattcttaaaaagaaaaaaaaaatacaatttattgtaattcataaatatattgttattataacatgcaactaatgggacgaaaacaaaattgtgacactatgtatttaaatattattttttaattttattataaataaaagtaatatttaattaaaaaaatatattataattaaaatgttgtcactaaaattgtagccagctgggtacacaaaaaatgatgatcaattatgttattgtaattaaaaaaatttattacttttaattaaaaattcataatttttcttggtattttaagtaaaatttaattaattatataagctcattcatgtatatctaaaataaaaatagatacaattgtcttccttgtttctaacaaaattacaatagagaaatactaaaaaatattggtatcaatttttacataatttaatttaataattataaatatcgttaaccatttaggtacccaacttcgcctaatataacaatgcttaatacaatatatcaataataacacctaacatttttaaaaatattaatgtaaattttacccgataaagctaaaaaaaattatctatatttatactaatatacttaattagcaaaaaaaaacgttaatatatataaataatataattatgtggcaaaataaaagaaaatgatcgagagaatataatgcatgtgaaaagtataagtattcatccgtatatttatctagaatagatggacttttatataacttataacattaaaatgaaagggaggaaaaaaaatgattctcactaaattattaaggttatgtattagttagtatagacatttctaacatttatatattatctagagtaatataatgatatatgttcacgcaatatatacacactataaaaaaatttatgtagtacactaaaagagttgttctgatagatcattatctctttcttagaaaagttttttagtctatatatattttatgattccgtatgttatagctataagattatttgtaaatttttagaaaattttaaataatttacaatgtcaaattaagattcaactagttacttatcaagtgtataaaaaaaaataactagggctgaacatttcgagcgggttcgacctgaacccgagcaacccgcccgaacccgaaccggtgaacccacaatttttttttttaaatgttcgggcgggtcggattca

SEQ ID NO: 3253 - DNA, 600 bp, Cannabis sativa
atcaaagtttggtagattctatctgagaaagcaataaacaacaaagtaatgcagaaacaaaatgaaagcaatggacaaaaaacacaaccagttttatactggttcggcctaatgaatggcctactccagctcctttcagaagttccactatgagcaaagcatgttacagactaatcttagatcagcaaagattgatgtatacatgttttgaatgagaaactaaataaccttttacacccaagaacttgtataatcactcaagccttatacaactctcttctaaaatcccatacaaatctctcaaagtgcttctcaatccccttctttcaattctctctagaacttcaattgttgagcccaattgctctttctctcctctttcggtcttaatgaaaatggaattggactttagagtatataagcattggtatgcaacaccaaatactaagaaagccacacataacaatctagactaatctagcaagttgtcagttaaaaaagttaggttaggagaattgcacacaccataaatacttttgcacatgaatttttattttctttttaatttaaataaatttagaaaaatttgaatctagcatt

SEQ ID NO: 3254 - DNA, 2431 bp, Cannabis sativa
aaaaaaaaaaaaaaaacacgtttaaagactaattttaatttcatttaagagttatttggttaaaaattattttaaaaaaaattatattatatacttactttatttaaatttgagaaataaaatttttaaattcaaagtggaatttttctaataacacaaataaaatcttttatatcatatattatttttaaataatttatgttatatatatataatagcaaatatacaatttgttttaaaaaaaaaaacatacactttgttttagaatttaaaaaacctatttcaaaaagaaaaaaaatctcataaatagtaaattggatttttttttttattttaacacttcaaaataattttttttttgtatttttataaaaatccacatagcagctcacctagcaactaacgaagcaatctaaattgcaagtcaaatctatatagcaacccacataaaaattaccaaagtaacctaaatcgtatttttttttttaaaaaaaaagattaaaaaaataatatatagataattctaaaaaaaaatcacataaataataaattcatatattattattatcatttagggggggaaattacaaaacgacgtcgtaaggaagaaaacccaaaaagaagggtaagaggggtaaaattggtaattagaaaaagaaacgtgaaaggcataaaaaagagatctttaggatttccctaatcctcttttcccttctcaaactcaaactctgctcttcttcttctcctgcgtttgccttcccttaactccaccgatttctcgcccagagatccaatccattcgagatccaaggagtttgggaagcgaaccctaaaccccaaaaccacaaattttcaatctttatattctatcactttcatcaggtactatctaatctcactcttttttttactcttttgcttcttattcatggagttttagctttaatttgagttttagggctggatcgattgtttttatggctttatttgcttttttgtatctgggtttgtttttaatgggagaaaacctaggtttgaagatttggtctgtgtggggtttttgttttggtttggtttgatatatttttgatctggaaagagaatagtgtttattttttttttctgggtgttttgatttggatttggatcgatcagtgtttttttcttaatggaatatgttatactgataaaaatttagtttcaatgttttgttttgagattaagctctttgaattgatatggtgtttggatttggattggagtttgttaaaacaacactagaagaaacttgtcatgtatgttataatcatgctcagtattgaagagacttatgttcattcacatgtagaagtacagtgcttaggcttatcaattcatgattctcttttttgctgtatagtttttttggatgaattgaattttgggtgtgttttagtttttgagtttgacatggtttatgtgcttttcttcagtcatggcaggcttagctccggaaggctctcaatttgatgctcgtcagtatgattctaagatgagcgaattgtgagtttctccttgtatcgttacctttcgttttcggttttatgcaataactaatgctttgtttacttgtgggaacagactgggtagtgatggacaagatttctttacatcatatgatgaggttcatgatagtttcgatgttatgggattgcaagagaatctcctaagaggcatttatgcttatggtatgtaccgcatcttatttttatgaggggaatttcgataatattgtctgtgattggaatcattggatgatttagtattgtatatctaagttgataattcatattaggttttgagaagccatctgcaattcagcagagagggatcgtccccttttgtaaaggactcgatgtgattcaacaagcacagtctggaactggaaagacagctactttctgctctggaattctgcagcaacttgactatggcttacttgaatgccaggctttggttcttgcacccactcgagaacttgcccaacagattgagaaggttatgcgagcacttggtgactatcttggtgttaaggttcatgcttgtgttggtggtaccagtgttcgtgaagatcaacgaattctttccagtggtgtgcatgttgttgttggtacccctggtcgtgtttttgacatgttgaggagacagtctcttcgccctgataacattaagatgtttgttcttgatgaagctgatgaaatgctttcacgagggttcaaggatcaggtttataaagctctcaaatttctttatctttttgtgatcaccatgtttcgagtcttttatttagttaacaagctattactcgtgttgataattttgatttgtatttttgcagatttacgacatctttcagttgctaccatcgaagattcaggtcggtgtgttctct

SEQ ID NO: 3255 - DNA, 1292 bp, Cannabis sativa
ctctctctctctctcttatgttttctggcttcaagcacccttcatcttctattgatggtgacgcacgatagttcataaccgaagtaaaaattattagtatttgcatctacgacaatagcattggttacaccaaccaaagagaattctttatatgtcacttcaaaattgaagcaaaaagattttttggtagtactgatatctcatttttttttcctattgttagtttcccactattttaacatttctctcggaccaagttagtcatttttttatatccaacaatctcacttgattatttttttctgtcctctcctccatctatatatataatatttagagtttttggcggctaaaccctctcaactatcatttcacttgcaactaaccctctaagctaaaaattggcagtaaacaaaatcgttagcaaatttaaggtgtcatccatttactacaattaactgccaacatgaactgtttagatgtacattcttgtaaacgtgatacatttatattggtacacttaatactattattttaaaattacaaaaaaaaaaaattaagattaaaaaatggattaaaaattaaataaaaaacattaatattcctcaaacaaaataatttttaaaatcttttggaaccgctgcctcaaatctagaacttgaacccaaacaaccctgaaccgccttagatctagaacttgaaccccatcaaccacgaccctagctgaaccaccatcaaccatgaacccaagagcagtctttaactgccaaacctggaacgacttcgagcttcaacgtgcatcgccgacccctaaaataagaatttacaagatgaatctgagtactgccaactctattactcaccagtaaaagaatacttgaccagcattgactttacaccattctttgtagtacaaatgtaagatatgaccatacctgcatcggatcaatctacataaattaatacaaattcaaagttatagtagagtaataatatagtcaaaaatttcaaaataatggcaaatcccagatcatttgaaacatctaaaaagccaaaactaaaacaaagcctcctagccaacgaagtcaaagatttcataaatatattttttttaataaatcagatgaattgtattgcaccaacaatctttatacaacctatatgcaccccaatgagggccaaaatctatatacaagcagtgtgtattcggctaaatccatacagacaattatattttcattacaaagttaggaactaatctctatcagtgcttttaacttttctaggcatga

SEQ ID NO: 3256 - DNA, 2130 bp, Cannabis sativa
ttgtaatattatgtgattttgatacgtttcatttgattaattaaaattatttttggtatcttattaaaaaaaattatttttggtaccaaagttgtgttatatataattatatttgaaccctttacaacactttggcttgattgaatttggatacttaactactatttatttttatgaaaatgactaataataaattattatatgtgtatatatgtatatatttattttcatttatataaaataaaatttctatcattaatataaaattaaaaaatctctaattactttttttagttctaaatatttttatatgctgttgtttgattatgctactcgcttactaatagctttttatatattgtggttgttcgatgtgtattcaagtatgttcgatatatactcgatgatgtttaatttattttcgttgttccaatacttacagattcttttaaaattgttagtttcattgagtgaccatttttactgcactgggtattttaataccatcaagaaaattttaaagaacacaaattgatggaaatggtgaaaaaatttccttttaaagagttttttttattgctgagctaatggaattatctacagtaatagtgcaccaattatttttgcataatattcaaactgacaaagaggacaaagtatacttctatcaaacattattgtacatcaaataggtgaacaacattgaccatatcaacttaaaataaaataaaataaataccacaaaaaacatatctacaaaatgtataaatcaaacacatcgttgaagatatatcgagtaccatcaaacaagtatcacgaaataatcaaacaaattagataactttctatgtattgaagatgcatcatgtaacaatcgaataggtactataagtaatctatatcgagcagataccgaacactaatgctctaactaataaattgacaaaacacacgactaaatgtatatttaagatacaaaaacaacaatatatttgaacaaaactaacattaacaattaataaatttaacatacactcaaaagaacaataaatttaacataaaatcacatactcatttcttttccaccagaaaaacaacttaaaattttgaaaactttgaccttctcctccttgtaataaggctcttccttgatagaaatatgtttatctttcacatataatagctccaaaaattagtgtaatggctatatatatatatatatatttttttttttggtgtagagaagagagaaaatgtttggtgtgcatatatttgagatggtgtaaaaaaatttgtctatttttttagtttagtataaaattatgcattaaaagtaaaattttccaaataaagcatgcgtcgtgtttatgtgacaattcaatttggcacttaactcatactattttaatggtacgaccttaattttgcaaacataatctagcaggggtgtttacggattggtttggttcaaatttttaattttttcaaaccaaactagtattatgattttttaaaaattcaaaactaaaccagactaattaaatgatcaaaccaaaccgaactaatccactcaacaatagattggtttggttcaaaactatagtttatatttcgtaattgttctaaattttttttaccgtaattattcatttttatgattttttttttacttttaataaatttataatacataaataacaatgaaaaattattatcataacaaattaagtcaatatcaatattttacttaaaattatttctaaagatcaattcatttaaatatatatattttttgacctagtgattaaaatcattaatgaatttacgatattcaagccgcgcaagagttttctcaaatcaagataactcctcctctaaccgaaatacataattgtcaaatcataaactgctaaattataatggagtaactgaaaatggtgttagaggaagagagataattttttcaaatgaaagtattttgaaaacaacttaaatttttgcttcctacctctaatggttgctgccgtgttttgtattttccttcatattcattgtaaatttccttttaaaggaaaaaaaaaaggacaactctgacaatttacaattatcatagttgtctccgccacggaa

SEQ ID NO: 3257 - DNA, 1076 bp, Cannabis sativa
aaaagattcttagttaataaatgcatattaatggtctacaggaccctgctctaagcaatagtcaataggactaaggatgattatgaacttgtgtttcttgttggttttcatggtacttgggaatcagtcagatgaagtggatgatattgtctcaatgacaagtaggctaggtgttgaatcagaagaggattgggaagaaaatgaagaggctgctgcttcatttggcggccgttctgtagtagggaggataatttcgaagcaagaggtcaaggagagacgttttacgtcaatctttaatcgattgtggaaagggatttcagaatgggaagtgaaagtttttgatgaagttggggatagtacttatattggtgttactctgaaatcgagagaagatgctcgaatagttgtagaaaaacaaccatggatttttaatggtggggtcttgctgttggaagattggcctgacacggaacagtggcgcgatgctaagctcgacaaatgtactgctaggtgagaatgaaaggcatgcctctgaaggcttttacaaaaaagaatgttaccaggttagctgagatggcgggtacattagcggagttgagatggattaatgagcaaaaaatgtttcttaatggctatgtcagggcaagaattggattcccattacaacaaagtatttttgtagggcgttatgtgccatgtggtggacaacaacattgggtccagttcaagtttgagaggctccctctactatgtttcaagtgtggtgtttggggtcatgaacaaactgactgtaatggtgaaacgatcatggtaagaggtgagaatggattgagtgtgccaaagtatggagtctggctcaaagaagaggaagcaatgcccaattgctttgttgcttctcaacaaaaccgaatatacagctctgtaggactggctgggtgtgtggatacggaggaggtgttgacggggggcgacagtggaaggagtgttgagaagaggccggagatggagatgggtcctgtactggtggaggccaccaccattgcacaggaagcggttattggaacggttagggaggg

SEQ ID NO: 3258 - DNA, 1754 bp, Cannabis sativa
aacaagcatatgagacattctcggggccccataatcggcaacttggcaaccgtgaagccaaccgcgggtctcatacttcttgattaatgctgagagaccctccgcacacaggatatacaaatatggtgaaagagggcatccttgtcttatacccccagttggactgataggacccatttcccttcctccatgaatagtgtagctagccgaggtaacacatgttagaaaaaggttcacccaggctctatcgaatcccagtttgagcaacacagccttcaaaaaactccactcaatacgatcataggctttactcatgtctaacttgagagccatgtagccatctttgccttggcgtttcatcttaagatagtgaagcacttcaaacgagactaaaatattgtccgagatcaagcgaccatgtataaaagcgctctgattaactgacacaactttttccatgaacggtttcattctgttttccatcaccttggtgatgattaattttgtaaagaaagttgcacatagcaataggtcgaagatcagtaaccaactcaggatttttcttcttagggatcaggactacattggccttgcttgtgttcatatcaagaaatccactttgaaaaaattgttgcaccacctgaaccacatcagtacaaactatattccaacatttctgataaaatccgggtgtcattccatcgggcccagaacttttcgaaggatgcatctgaaagagagctttgcacacttcctcttctgtaataggaaggagtaattcctgattcaccaagtcagtaatggagcattcaacttcatctaccacttcagaacaggatgcacccaatgttgaaaacaaagaagagtaatagccagcaatcatgtctgatagtccattctcccaatcaatccattgaccatttccatctctaagttttgaaatagcattattgccccttctagtagtagcagccatatgaaaatacctgttgtttttgtcaccttccatcagccaaaattgtttggctctttgtttccaaaatgtttcccgttgatccataatttgcgagagtttatgttttaactctccaaatcgttgcactgaaattgagtctctcttgccccttaactcagctagctttacacttcttaattctctccttaaacgaaccagtaatctctttaccccattcgactaatctttctacacaagcttggattttcttatcaatagatacatttggcaaagaatcccaacaatctttaatcagttcaacacatagaggctccttgagccaagcattctcaaatcgaaacttacggaataagagattagagatttcaatttcaggttctagaaaaattggagaatgatcagaaggtgaagtgtcaaggttacgtagcttagcttgaggaaaaagttgaaaccagttcatggagatgagcgacctctcgaagcgaacttcgacccagttagatgtacctcggcccctttctcaagtgaacggatagcccctaagctccatgtccgtcaacttgcagtcacacaagacctgttggaagccttgaattaaagcacggggataaggttgtcctccacatttatcttgctgagagacaacgttgttgagatcacctatgatgcaccacgagaagcttgaggaacgtttcaatgttcggatgagatcccgtgttgtatgtcgatgattccttctgggttccccgtagatccaagtcaaacgccactctggttt

SEQ ID NO: 3259 - DNA, 1098 bp, Cannabis sativa
atatatatatatatatatacccaacttaaagaaggaaatacacccaaccacttgaggagtggttttggattgaagtgacgcattacaggatgttgcatattgtttacaatgagcaactaagatgaatgttcaattgggcaagaggtgcttcaccaaatggttatgacatcttcattcaaatgccaactaccgatgcgttggcaatgtactagctagcgtaggagcaattttcagattgtcaccttgtggacaaggtggcgttaggcctcaaattagcctaaacatgtcactccacaagcaaagttaattagggttataatagtcgagttgtcaagtgtttagttgcagagatgtaatgtttttgagtgggatgttaattacttagatttctattggttggctagttaggagtttgttagtctaaccacaaagtttctcgaatgacttgggattttgtattatcccttactcttatcaattaaaagcctttcatagttattttaaaaaaaaaatgaattgtgcactagtgcctattagtttagctgtctttatacgtggcatttattttagtcgtattagaatgttgaggtacgtagtttgcatttctactttctttcatgtttcgaagcccttgaaaaatgagattcttatccttactcgatttctaggtttttgatacagtatgtggctacgtgccatgcaatatattatatcttgatttgttgcattattatgctttaatgtttcttgccttttgtgcaacgtagttttcatgttttgatagagacctttcggaagttgtctttatagtattagaaaaggtgtagttgcctttatacttggcatttgtcttagttgaataatgttgaggtacgtagtctgcattaatactttctttcatgcttggatgcctttgaaaatgaggttcttatccttaccagatttctaggtctttaagatagtatgtactctccaaattattgattatgtaattgtggatgcattaacttaaaattaggttcatatcttaactatgggtggtcttgtatgcaataaattggtcattatctggattcactgtaaataattggtgcctac

SEQ ID NO: 3260 - DNA, 1444 bp, Cannabis sativa
aagtattttgattcaacaattagactgatatgtgtgtgtgagagagattgattggaagttctaactccttttttcagtgtgcagctttattaactctgattctgataatcattctaaatttggcctttggatttctccctcacgttgacaattcagctcatatcggaggcttcatggcgggttttctactcggcttcattcttctgattcgtcctcagtttggatacgttagccgtaaatacatccctgcagggtacaatttcaagcgcaaacctagacacaaatgttatcaatacatcttgtggatctcagctttgctagtcttacttttggggtgagtttttctatacacatttcctcttcttgtgaaaacaacaaaatcacattgactaatagtaattgcttgaacttgcagatatgcatatggcttgcttaagctatatggcgttcggccaatcaagaataatactgctttgtagttcaacaatagacaacagagaaatactttgactgttttttccttttttttctttttctctcatgctactatatcatatatataatatatagagattaatagtatttccacacacacattttctaataagaatatcatataaatatcacttgttccttgtaaattagtatacaattcaatgcctttctgaattcaatcgtgtactagttaataaacacagaaactaacttgcataatccatgtaacatacaatacaatacaaagcaaagctatatagtattggcagagcaagatctctgttttaggtactttccacatacaggtacagtacaatagaaattactgatgatataatctatagctcacatgattctgaacgaccaaaaattgtgtaacgattgtttgcaacattgtcatacataaaatctctcgcaaatctgcaacaattcaaagcaaaaaaatagtttcaaattatgtctattttcaatgttttgaaaccaaaatttttaagttgaatgaaaaaacttacagtggtacaaagtgtaggaagaaagctaattggggaaaaggcaagtctatatattccattatctttaaaacagcttctgacttaatatatgatctgaaattcaacaaagaaacattagtttgggcaatgaatttagcattaataacaacaaaatgaatattattttacctatctttttcaacaagaacaacacttgatatatcatctggtgctcttcctgacctcctaagaagattcttgccagcttcactttgaagagcctcaaaccttattctcctgtcattattaacacattccctttagtaatttgttcattataaatttgaaactgaaaaattccaacaaataattatttataaaagctcacctatttcgatcattatcacgtacaaactttacacctccattacataagttacaaacacctatatatataa

SEQ ID NO: 3261 - DNA, 983 bp, Cannabis sativa
taatattttatatatatatatatatatatatatataagctagcgtcaatcaatggatagataaaaagtaggtaattatatttttacacagggacacaagatccagaaaaccctccaatacaaaaacatccagatgggcaaggagtccaaggagaacaaaactgaccccgacattgactattttcctgtgacgatgacaatattatctctgcaagagagttaggttcagcaatagtcatcatctttccattttgaccgttgacatgatcatgatgatgaagttggataatgttattgagacctcttccacttggaattgcaaaagtagttgatggaataagattaaacacaagaccaacaaccactatataactcatcatcattttactactcttctccatattcttacaatagataatattggattgtttatgtataagttctacaaataacctttctatttatactaattaaacaggacattaattaagaaagatcatctaattaattaattatcatattatctatgctctctctgtcctcatttattgtctggtctgcatttattatttttggactctgtttgcccctgtttaatttccaattgttgttctcgattatttgttaattttgtcattgctaattgtttgattgtttaaagtttagttaattgattctgactattagtcataattttctggactatatattttttaagttattttttttgtgcacttattatattattctaaataaatttatggctaagatatatagtggcgcgcttggtgggttggtacacatttatccaatcgctcctagcgcgtcactataggccaattttttttttttttaaaaaaaataataaaaattatgagagttactttttagtgaaccagattataagacattaacattgaatttttagaatcctcttgtaaatgtcactaaaactcattcctaactctttattggcccacactt

SEQ ID NO: 3262 - DNA, 2009 bp, Cannabis sativa
cctagctggtccaaaaccttcaaatcttgagctagtctagtcaaagggatcaccattctcgacatacagatatgccttgccctttcccaaattcaagatttcaggaaggaagatgtatagcgcaaatcaaatactttgagagggagctcgatcgtcaaaagattactgatgatgtgcggtgtagcatattcctgacaactttgtctgcaacatcatagcaatggtactttatacttgatccaggaagattcaattcttggaccgagttttctcgagaagttacacacaattctcgtcctcaaagatcataccatcattgcttgaagaccttatcgacgtcaaacaatgacaaggagaacctttgaaggattaaatctagaggttcttgaccaaggacaccaaggtcaaagagcttacagacgatggttgatatacgaccatattgggggcatccttccattgagtgacttctggaaagatatcaagaggatctcaactaacaatatgaaggagtttctcgacagactggtggtttcattcaactagaagaagttgtcctacaatagttgacagagcaagtcaacaataagcagccacaactctgccaaaacctcaagttgcaagaacattgggagacactgcaacaacaactttgggagaagcagtggcaaaaaggggaagtttaacacttctcccacgccataaaactagaaggagaaggaggagaagtatacgtgcttcactctcctaatggagaaacctgaggccatctttatggacacttagggaatagttccatgcagaaggtccttatccatcaaaagggaactgagcaagagggacatgttaaagttttgtcaatttcacaacaacttcaaccatgataccaacaagtgtcgaaatttgaagagggagattgaattcctcataaggaagaacaatcctcacctacgttgttatgtgcagaatgagcaaacttaggcgcaaggttcccaaaaagaagatccaatgcgaccaatagcggtaggtcacttaggggtcatcattggtggaccccataatgcatgcaagaccagcaaagctagggggagatatgctcgaacactcaatcacgaacccaaaagcgacatcttggcatcactgcacaaacttggaacatgactgtggcaacgacccctggtcttcactgcacaaacttggaacatgtttatggcaagatgtatattggacaatggagcctcctccaacattcttttcaaatcaacatatgaaaagattgggctccaactcattgattaggcaccctacagtcaagggatatatggaatctttggccaagacatcgcacccatcgactatatcaaattgcctctcactgttggagaaaatctaacaattaaaactctgatggcacagtttgccataatcgatgttaccttggctttcaatgccatgataggtcgagcacccctatacgacctgaagggagtaacatccatctaccacctcatccttaaattcccaaccaggcatggggtaggaagtttaaggggagactaacaatctgcatgtcactattacaacttgtacctgtccaaagcggagagaagatgcccactaagagctttgaagaagatcccaataaagggcaatgaagtctagcccaaagcggggacgatgtcatagatccttgccttggggatcctataggcagctttaaacttgtagaagatttagaggaagtggaggttaaacccacttctctaactagaagactgaacatcatgaaaggtttagcaccaaaaataaaatcattactgataagatttataagggcaaacttggacctttttgcatgatcacatggagacatggtcggaatccacccctctactatgactcatggtgtgatcattgatccaaacatccaacttgtacatcaaagaaggaggttgttggacaaagaacgtgcccaagcgcttaaagatgaagtcgcgaggctacgagcc

SEQ ID NO: 3263 - DNA, 501 bp, Cannabis sativa
aagccgacccaaatccacctcgcgaagtcgacccaaccacccaagtctcgtcagcattaactccggccatctccccagatctccgccttgtacaaacattaatggcaaacttacaggtattcaattttccctctcttatctcctgttcagtgtcaaatcgagcctggaaaataaagctcgaatttgcatgcttcgattcaaatttggtcttcccattaaattacctcctgacccaactcctttcagagggttttggagtaatgggaaccttgtcaatcctctgtataactacgatttttatgcttttgtcaaaaagaatttgatgtgtttattaaatgttttttatactgagattgttctgcctaatatcaaacgtctagtctttctgcagcaaacttatttccccttaaatgctacgggtacttacttcttgctcatacactcttcagcagtgtctatttaagggcagaaatgccctttcttcatgcatcctagttttac

SEQ ID NO: 3264 - DNA, 965 bp, Cannabis sativa
ctggtaagatcatacattagtactttctttataactcatatttttcttttaattttgttagtaacattagttttatatatgttatcaattgtatgtagatcaatactcacccatgtgcgaaaacgcatggtatttttttcatcgaaaagattcatcttccacatttaaaaatagtaagagatcgaaacgaaaagctaagaatggaacttggcatggcaatgctcaaaaaaaggcaatcttgaataaacaaaaagtcgagattggttttagaagaactctggattttatggacatagataaaaaacgaactcgatggaagatgatcgagtatcgtttacctgaatctaataacacacaggtatacatatatatattgattatcactaccaaattttgatactcactttaatttgattaatatactaatttaattttaatttattttttgcagcaatgtagttgggtgttatgcaagatttacaaaatgaaatcgaaagaaaagaaagtgattgtaataaacgagcataaagaatcgaacgtgaaacgacaaaaaatagtatacgagaatactttatcagagtctacatcaaatctttatcttcttgatgatattggcgaagagaagaatatagcggtacaacaagaagtaccaaaaacttcaacaaaattaacgaaggatgagctcgaaagcatatttggcgagttcgaaaatttctcaaaagatcaaacgtttcaagcagagttagatttaatttttcaaaataatgtagtctgctaattcttattcaagagattagttaatgtttctttctatctttctactattgcaaattataaaagaatataattcacataaataatattactataattgtttttgacgtgttttaaattatgagaaaatgatcaattcatgcaagttcattacgtgttaatttggttgtttgtattatttttgttcttaa

SEQ ID NO: 3265 - DNA, 1812 bp, Cannabis sativa
  modified_base (1672)..(1673): a, c, t, g, unknown or other
ttttttttttttttttttatgaatcaaagagattgtattgctcaaaaactgtctttgtacaaacaaatagcaccccacaagggcctaagatgcaaaaatgctatacatttttaattttgtatattctatgttaaactgtacacactatgaactatgaccctttgccaccatttacaatttttgaaaccagttggtatcctcaagagatacatttttcggccatactacaacaagtctatggagaacctctttttttattccttcaagcagtctatcaacagtcggcttagacttttcccacagactgagatttcgagctttccactgatggtatatcagacacataagagcaacaacaaggacaatcttcctgaacttgctgatctttgatctcccaatccacctggttagagtaagcatattatcagctgcaacatgccacgacagacagatcttaatcccctgtaagcaagcagcagagatactacaagtaaaaaataaatgctctgcattctcattctgtgttgaacatagttcacaatgttcatcaatattcattcccattctcctcaatctatccttggttctaagtcttccctatattgctaaccacgagataaaacaatgtttttgggtatttaaccgcccccacacctactgagaccaatacactttggtctgaactggacagagtagagaatacccagttttaacctgatattgttgttgttgtgtataagtctgaaggcctgccaaatccctaaaatggtcctttaagttcacaaggctcctccagtaccaactacccttagcaggggccttgtaactccaccattcatgatccttgagataaacactattaatccatttcaaccaaaggctgtcttgtttttgagcgctattgcccagatgtacttccccatggcagcttggttccattctttcattttcctaaagccgagaccacctgtagctttagattggcatagagactcccaagctattagacctggacctgttgcacaagcttggccttttcatagaaaagctttggatattggttcccattgtctaatcactttcttaggcaaaataagcacttggcaccaatatgcatgaatagccatgagcactaaattaattaagacaactcgagctgcaaaggaaaggttcatggaactccacattcttattcttgcagtcatcttttcagccaaagcaatgcattcattcccagaaagtcttttagcacaaatgggtacgcctaattaagtaaaaggcatatcttttaatgaaaaaccagatgctaaaaggactctactaacctcctcctgtggcatgttgctgcagtatatcgctgatttttgagggttcagttgtgaaccagatgacaatgagaacaacttcagcccctgaggcatatagaaggtacttttgaaatctccattgcagaaaagcattacatcatctgcaaaagccagatgattaatcttcaagtctgagcatctctcatgatagtgaaaatctctgttgtctccaacttccttaagtattcgagataagtattccatgccaagaataaacagcaggggagacattgggtctccctgtcttaagcccctttttgcctcaaagaaaccatgtatagaaccattaaacatgatggagaatnngggtgatcttacacaattcattacagtttgaatgaagagagttggaaactgaagtcctagaagcatctcctctataaactcccattcaattgtatcataggctttctagagatcaagtttgatcatgcagtttgccttg

SEQ ID NO: 3266 - DNA, 991 bp, Cannabis sativa
agtccaccaagcctcaaactgaaaaggccttcttgaactatgattagagttcacaatgcaaataaagagaggtcaatgtggttcgagttacaagtgtggagtgacttaaacatagcctttggaaatagacgtaaccgcccatcattgactagagctttgttaagggccaatttaatgtgagtcgcaccatctctatggttatcccatgtcatgttgtcacctttaatgggcatatcaatcatcgcatggctattgattaactcaataatgtaagggagaaatttatccttccctttcaaaccaatacgctcagagttacttaagacacaattcacatcaccaagaattaaccaaggcccaccaaatttgttgcctaaccttataatgtttgacaagaatttcttcttctcatggaagttaagaaacctataaatacaagaaaaacaactaaagattatgcccagggtcagagtacacaatatcataaatctaatttttagaaacacaaatactctcaaaaataaaaccagctttccaggctgaaataatgcccctgaacaacccaccacaagaataacaatgttaaagtaaaaaattcaaattactaagaatacgtacaaaatttaaggcctccactttcagtttgataatgaaaataaaatgtggagagcacgaccgtatcagagcttttagttccaaaattatagaggtctaccccaaccctctacagttccaagcaatacctctcatggctcttgtggaggagggactccatcctcctccacaggggtaagaacatcatcttgcacaccaattgaaaaaccctcatcctcgatcagcacatcaattttgagcggtataacaatgtccaataactgagatttggctttccacgtcgtaagtctagccgattggccttcagagatcggcttgtcaacttgctaagagcactaatcattgtcttggtaccaatatttctctcaacttcatc

SEQ ID NO: 3267 - DNA, 998 bp, Cannabis sativa
cggcgtacttaacgagcccgaggatcacgggcggtacggccgggatgttggtgacgtggtgagtttgaatggctttgagcattgcgttgaggtcgtatcgctccattagaacggttgtggttccgcagcagaagagtccgagtccgaagaaggccaagccgtagatgtggaacattgggatgaagcataagtacacgtcgttctccgctcgcgtgacgtccacgctccacctgagcagcgccatgatggagatgaggttggaatgtgtgagcactactcctttgctggttcctgtagttcccgatgagtagaggatggccgcagtgtcggactgagtcgggcgatttaactcagtttcgtctgtgtctgaccgagtcaactcgaccggatcgcaactcgagatcagctcttcgatggagagttcataaacatcatcatcatcatcattgccctctggtgaccgtgtggtttggattgtatggaccccggttgggattagcttgtttaacaaatcgggggctgcgatagcgagtttggcgcccgagtcgctcacttgcttggcgatttctgagtcggtgttgagtggattcgctgtggtcagaactgctccgatggataacacagctaggcaaataattgggtaaagtaacgaattgggggaaaggacgaaaatgacctcgccttttctgattcccaacgcgtggtacaatcccgaggctagggagagaacagagcggttgagttgagcgtaggtgagtcgctgattcgtggccgagtcgattagtgcgactcgtaactcggcctggtgatggggtgggaattgtgataacacaaatgtggctgtgtcgagattaagcgttgtgggaattttgtgatgtttacttagttggtggaccgaatggtaaattccagtacttttatcgaagctcgatggccggagattactaccggaattatctctggtggcggctgctgctgtacggcatgattcctccgcc

SEQ ID NO: 3268 - DNA, 1265 bp, Cannabis sativa
ttattcagcaacaaagtttgtaagcaattacgaccagagaaatgagaggcagtgcaaccttgatctacgtgagcatttgaaccgtagacaaccaaacctgcacgaacatttgaatcgaaaagttccagatctttgtgatcaattaaattagaatgtagatcgacaaccacaagttgagcaacaatccaaggatctaattcaattacgaataatacaattagatgacaagtttaggtgataccaggatggtgagtatgggaaattgtcaggatgcgtttcagatgaagagacagagcctttccatcctggtatattgaattcctaattccctcagggattcaagaacccgcatgtcgcacagtatgacaggataattatcatgtggctaatttgagtatgctcctcttctctttagggagggacagaatgtgatttgccctatcccttttctgcaatgtagggatggagcgcttgtaaaatggcacccactggaacgggcagtatcggatctcgtggatgtcccaagcgatgaagtaattctgggcatacccaccaacttttgacatggttgtactgttggtgtcacccaaccactggtggccaacctagctaaagtagaagtacccaatccagttttactttggggcagacttcagattaaaataatatctaatctcatatggagtaggatgaggtaagcctatcttcctatacaaaacaaatatcgctgaaaggtacttgatactttttggggtgaattgtgttagacacatctcaaaataagcaccgatgtctgtgaagtaagggtgaagcagtaacactgcccctgctgtatatgacactccgaccatgccatccaactaaaggcaagctagtgcgccctctagcctctagtgagtatctcataatgaacgcccatcactagaccactggttagtatcaatagagaagacagatacggaagagacccacctgtctccttgtgatatagcatccagaatctaaggcacagaagactagatcaaaacatggtccagacccatcatggaaggttgaccaagcctttttcaatggctccccaatcagtatcatatccaccaagagggtcgttagggaggaccgaacaagttctgtaagtccttctcctgacaggcataacctcctccactttagattcgtagtaagaaccctcgaccccctggtcgaccttaggcacttttgcctggccaatttctagatctccatcctcatgaggctgtgtggcc

SEQ ID NO: 3269 - DNA, 2149 bp, Cannabis sativa
aatttgattgtgacataaattttttaaatcaatatattagagtggtgttagatgagaaataatacaaaggaataggtgacatgaaagtggtaattattgaaagaaaaaaataaagcccatgaaaagtggagtcaaagcccatgaacatatggagtcctacaggcccaaatattatgaaaatggcccaagagtaaggacaacaacatttttttttgaataaaatgactttttttttcaaagaaaagtccgctattaaaaatttaaagaatcatttacaacaagagagaaaatgacaggaggaattttctctaaccacatacaattattatccaacactaaaatttgtttggctaaactatgagcgacttggttagcatctctacgaaccgtgagatacacaaacattaagggaatatgataattaatttttaacatcaaaaattagatcttgcaaagctagatttctagatgctaaaccattgagagaggtaacaaccagcatagaatctatttccaccatgtccaatcgaatatgcaaatgtcttgcccattgtagaccatgaaataaagccttagcttccatttcatgtggcctaaactaaagtttcctgcaactggtttggaaagtgcagccagcacctgcccatgtgagtttcgaataacagctcccaatctagttctgtttcgagaagaatcaacagctgcatcaatattcagtttcaattgaccttgaagaggagcctaccatggtacatgatcagctactgaagaacacacttgagggaccaagttagtggataaattctgctagaaattgcagagatatgcaattgattttgcatatatttcagtagttttctagggagattttttaaggtatgtgtagttgcaaatgaataagaaaatcaccctccttcatcctattcctacttgttacttgaaagtaaaatgtgtagtctgatgaacgccaaacagattttgcatgtttacaactaaacatagcatcatgtctgtctaaccgattcccatgcattggaacataagctacaagcagcagaagtgataattttcctctgaaataatgcagcagcaataagtatggagtggtagataatcctccaagcaaaaattttcacttttgatggtagttttaaaccccaaaaagttttccaccaagacattggagacatagaggttgaaagagatatcttggtcttctaatgagcaagcaaaatgataaccgatttggactgagtattcacttgagacatgatagttccaaacccaacaatcagctggagcacaaagattaatatcaacagctaaaaaatttctctttaacaaatccaaatactattcacaagctggtgtaatataatatgagactctattgagttaataggataaaatgacttaaatcatcattaataggcaacatgaaaaaatcaaccacaaaacacatcaataacaaaataatcaaaaggggactttcaatagaaattttgaaaacacacaaaattaaaatatatatgtaatacacgatacattacaaaaatgaaacttgtgttaataccaaacttttacatacaaactattaagattttttttttttttaaagaaaacaagttcattaaatcaaagaaaaataattgggaattacaagaggaattccctctccttaaaaaacaccggactcccagacaatctagcacttttggccaagccgtctgcaagagagataaaatctctatgaacaaattagaacctacaatccgaaattaagattgtttgatttataaaattttcttgtcccttaaatataccaattcattccattagtaaaattagtagttcaagaaaagtttttaattaggaagcaaaaattctaattagcgaaaaataaaaataaaaaattgttccattctatagttctttgctcattcaaaattttatagaattcatcattagttgtgtttattgcaatgataaaagaaacatgagatacaaaaaaaaaattacaaagctatcgagaaaatggtaatatcaaattctcataacccataccaaccaaacaaattgcaaaacatctataacctaagaaaacacttgaaaaaaaccagaagattctttacttctttttctttttctt

SEQ ID NO: 3270 - DNA, 912 bp, Cannabis sativa
  modified_base (80)..(81): a, c, t, g, unknown or other
taatcctcccccttactaaatgaccgaaatgcctttggtgcttaaacctaagataattcaagcctaggggtaaaatggtnnaaaaccataaccccgctcaaacccaatattttatttatctccaatattaattccactaagaaaaggttctagtcatacccacgtgactcaaatggccatccattgcattttttgtcgtcgccgagcaaaaattataaaaatcgcataattcatatataacataaatagtacccttagagtttaataaaatcttcggaattgggaaattataactttaatgcccattttaataatgggaaccaaatcataataaaatcatgcattactataaaaatatcaataattaatgctaattgccttcgctaatccatattctaaaatgcggtcattacattgggtgtcaccctgagcttgaacccccttatagtcttgataccccgtggtacccctttagggggtcagggtatgcttcccgagggaccccctttaggggtcggggtgtgtaccccgaggcttcactacccgaaacacccaccccgagttgcaccacctttgggggtcggggtatgtacccagatataccccttcaagggtcggggtatgtagcctaatacaccccctttgggaggtcgggtatgctcctttttcattttttttgtttaccgcgatcatcctgaggttggggtaataccccaacattggtgggtcgtggtacaccctgagtaaattcgcctttttgttgttttttttttgcagttgtcggggcaccactctcaagtgggggtcggtgtgtgtcaccccgagatcaccttatgggggctcggggtggtgcaccccgagtccacccatgggtgatcctccatgatgactgtaatgtggcctcacgaattg

SEQ ID NO: 3271 - DNA, 1700 bp, Cannabis sativa
tcgagtgggattgatgggtggagtaggagacctgcttcgaggattttgagttgtcgtttttgccaaaggtggtattcgtgtgagtcgttgaattccgatggttttaaatggcggagaagctctaacggaagaattatcgtctctgctcgcctacccatctgttataattaattaatgattaatcgtaattattatattaaaaattaattaacttaaaataacaattgatggttttaattaagtgaacattaatgtcctattgcgattaatacgatcaaaccaagaaaaaataataaatagtaattagacgacgtcaaataattatcatataattaacaaattatattaactaattatttctatttaaattaaaatatattatccacatttttttttaacaacagacaatattaattaatcttaatcatatataatgaaaaactgataaatcacacattaatactatatatatttccttacagttaatatggttgtgattttgaacgaagttataataaagataagaaatggtctattattattagggatatggaaaaaaatttaatatttgaaattgttatatatgattttaataaaaaaaaatgtaaggaaaattattttattttaagattttattgcagtacttttttgattgataagtgctaattaagaatgttaaatgtttgttcaaaaatacttgacaatatattttttaatttttagcgtgatcaaataatatcttgttatatatatctgagttgatatttaatgactaaaaaaaaaatatgcttataataaaattgtaagataaagtattttgttattatttttttttattaaaattatatgtgtaataattattaatatttaaggaattttcccgtaaatatcctatattttaatatgagtttaaatttatttaatcaattatacaaaaatttatctaattataaggtacgtacacaccatgacaccagtgatgtattagattcttaataatattaattagcgtgtagttataagaaaattataccgcatgtaattattataaataaaaaataaatataaatttatatatatataataatatacgtacgtacttggcctacgagagttctcatgagagtttttcggagcctattatcactctgctcggtgacccgcatttgctgcctcataatctcagccgaagtcatcggcctcctcgctcttcccagctgaggcaccgtgaaagacattcccggcgacccaccagcgttgaccgttgacccaggagacgacggattcgacgaccctgaaaccatcctcctcgacggcgaccgctttatcatcttcaaccccaaagcccgcttaacccgactcgttggagtcgtaaccacatgcccactctgcttaggcccacccccaagcccaggcccattcacacaattaccattatgcccatccccattattattgttactgctcatcccattattattattgttattgtcattgtttgagtaaaaattcaaggcgttccggccgccaaagccgggagaagaccggcaagcggtgaagaagatctcgtaggccgtctctcggacatcgtcacggtctataccgtggagttttccgaacggccagacgagatctgaatccgccgccataactggtggtccagttaggttattagatcttgacatggcgggataagatcc

SEQ ID NO: 3272 - DNA, 1088 bp, Cannabis sativa
caatgaaaaagtatacaaaatttataataaaaataagaagaaatcaaatctgtaagtgatcttttatacccctttataacatacactaaaaactgactttgtagtatacatataaaatcaaagtttccctttgaactttcatacctttatttaacattcttttttaacagaaatggaagttaaagaaccttgagagtttttataacttagtggaaagtgaaaaacacctatacaatgcaatatgttgtcaagtacaaatcaagcatatccaataaataaaaaagaaaaacaaaatgcacactttcctaaactttttttttttgcaaagttaattgtaaactttgaaagggtctagtactttactaaacttaattgtactagattgcttactatttactgtgaaatggtctattgactcccattcctacaaccagtcacaagtcactaataaagcttagagtaatcactttccaacaactataagcaatctcttatcactttacagtcaaaatctttgtaatttatgaaaggtcaaattttagttatcaaaagcattataaaatcaactatttctaacataaaaatcaaacccaatgaatttcaattttaattctcatcattacctttacaatatgtgtagtctcatcattggtgatagtattcttgatcatggtgtatcattctgcataagaaagcactacaagaatgtgcacccaagctatttggtgcataggctaattcagatataaaattatttgaaaatatactcaccaagagtacatatatgcatggcaaaataggcatacaaatatgaagcctagctagctaaaaaggaacgctaatataaatgtgctattatatatatacatatatttgtttaccttattaagaaagcagtatagagaagaatgtatatataaaaatatatataattaattaagagcttttgtgatcgattttcttgggatacaaatgattgtgggatggagttctaatgttaggactcaggtgttgccattataatacaattaacagtgtatcatgactgtttatgaatatatataatataagatgaatgatgatatgct

SEQ ID NO: 3273 - DNA, 1165 bp, Cannabis sativa
aagatctgaggagaatgaattaccaacctctttagtaaatgttgtgcatggattgaaactaaagcttgactttactattaccctattccatgcagaaagcttaagacacctgttcaaaaacaaccccataaaaggagccttaatcagtgtgtgttagttaccaacaaaacaacaaaaaaaatgcataaaatatttgaggtgatatatatacaaatataactaatttgttaagtcaaaactttgctttgaattcatctccaagaagacatggatacacgtgtgcatgcgtgcatatgtgaataaaatctaaattactgtttaattttttatttattttccacacaagtgacaagctttcaacatttagattgattgagcacggcaaagttaagatcttttcttaattatttgttttattttttacagtaaacaaaaaataaatatattaattaagaaaaaactctcagataataaatatatatatatatatatatggtattttgtagatttgggggactcccactatatataatacagccaaaatggtggttgaacaatgaggtttgcataaaagatagaatgagacaaatttggttgaataggatgatgatgattatgatgatgatgatgatgatcaaatggggtttgttcccatggctttaggaacattttactaaaagaaaaaagaacaaaactaaaaaggggttatgattatccaaaatttattcttttataatatacttttattccacccataatggggcactaactttatctttggtcttatattacattaggtggcatgaaactcttgttattcttattccataatatatattaaataggattgttcaaggtttttccatcctctattttcctatgtacaaggttagcttgtgtacctaagtcctcacaagtcaaatataaaagatttgaatcaatatataataatagatatttcaatgacaaaatcaagaagaacaaaaacaaaaagaaaagcccatttctttatgtctatagaaacatgcatagacctttttataaataacaatacaaagatatgggcattgttataagtgataatatttaaaaaaagaataccccaagactctaattatccaatattcttacacatcaacacacccccaacacttgcctagaactc

SEQ ID NO: 3274 - DNA, 2929 bp, Cannabis sativa
ttccccattcgaaacaagtttataagctcttttcctgagaatcactttcgctttgaccacgtttttccagaaccaagagtctgaatttgtataggtagcctccatgaacgtctttctctttagatatttagctcttaacaccctgcagcacagtgactgttcatcagtaagaagggcccatccccatttttctaataaagcctggttcaattccatggacttatgaaatccgagtccacctatagatttgggaaggcataaatggtcccatgccttcaagcacaaaccccgattaccctgctcacaaccccaccgaaaattcctgatcataccatcaatttttgtagcaagttttttggagagcttggtagtttgcatagtgtaaacttgcaaggctagtcccacggatttgataagggtagcacgaccagccttcaaaagtaatttcatcttccaaccatgcagcttcgagaccaggttgtcaaggatgaaattgaaatccgcatccttatgactagatctaaaaagtgggagtcccaagtaattaatgttcgtggtagccaagttaagccccaactcatgcatgataccccttttcatcccctcactagtattgccgctgaagaaaatagaggttttgagcttattcacacattgccccgaccaactgcaaaatttcttgaggcattcccaatagcctttggcctcttcaatggtagcccttcccacaaggataaggtcatccgcgaagaacagatgagacaatttaggaccgtctctactcaacctgatacccttaatagtacccatgtccataaccctctccaagatacgtgaaagaatgtccacagcccaaataaagaggtacggagacaaagggtcaccttgccaaagcccacattcaggaataaggctactaacctttcccccattgaggtggatgttgaaagaagtagtagaaatgcattgggaaacccacttttgaaataagtctggagccttgaagctgcagagaacatgatcaataaagcaccagctgagtttatcataagctttcaccaaatcaatcttgatggcgaaaaagccttcttttcctttcttgcgcttaaatgtgtggataatctcctggaccaacacattattgtcattgatgcttcgtcctggcacaaaagccgcttgagtagggaaaatcagtctaggcagcactggtctaattctattagcaattattttagaaatgaccttgtaaaccacgttacagagatagataggccagaattgagagaccttcttagggttagccaccttaggaatgaggattacattcgtagaattaatgcatctgtgcacgaagccaaaccgaaagaaatcctccacagcatcgtagaaatcactgccaaccgaattccaatagtgtttatagaacagaacagacataccatccggacccggggctttcagactacccatggagaagagagtttgtctaatttcctcggagttcgggatgatcaccaaatcacttcgctcttggagggtaaggtggtctggaaccagatgatctaagcattccaacggcccatggattgcttgtttaaagatgcttcccagaaactccgagaattcgttgccaatgtctcttctattactcagccacactccatctttgttcaagatggccccgatctcatttcttctatttttaattgtggcagtggttaaaaagaatttagagcacttatctccctctttgatccaagagattcgggatctttgttgccagtagagggctttttgtcaaagcgcttcgttaagggactttctagtatccaattccacgtcccaagccctggacccagtaggaagagtctgaatacggttcagcttgcattccagctgagaaatacggttatctaatttgccaaatttgtttctactccacttactcagagcaatgcgagtggcccccactttcttgaaaatcctcgctggggcccaattatgagacacagaaccccaggcattttccacaatcaaatcactgcgggggtccctgatccaccagacctcaaaccggaaaggcccatggggtttagcttcctggcacacattgctgatacatatgggacgatgatctgagttgcacgtgtggtaggactgaacagtcgcctttgggaaaagaccgagccacaccccattaactaaggccttgtcgagaggcgatttaatatgagcttcgccatcacgatggttatcccacgtaagacaatcccctttaataggtagatcagttaatccgattctattgattaaacccgaaatgaatggcaagaattgatctctccccctcgatccgactcgctcggagctattcaacacaaagttcacatcaccaaggattaaccaaggccccccaaatttatgtccaagctctatcatcatcgaccagaaacttttcttttcattaaagtacaaggggccataaacacacgacaacaaccagggatgatggtcaggatccgagtacacaataccagaaatatgatttttcgagatacccacagtttcaaaagtaaacccggccttccaagctagaataaggccacctgcaccgccaatcgcaggaacaataatattaaaataaaaatgcaagcttttcagagaacgtaccaaatgagtgtgatcgctcttgagctcggaaatgaaaatgaagtcaggcgagcatgaccgaaccagggctttaacttccagaactgtaaaggtctgccccaaccctctatagttccaagctatacctctcatggctcatgtggaggagggctgtccgcctcctccacaagggtaacaatgtcaacattagtacccacagcagagcctatatcatctatgaggacatgattcttcaaagggatagcaatatccgccagtc

SEQ ID NO: 3275 - DNA, 654 bp, Cannabis sativa
gatggatcctttcaaatgtttaaagctcgacttattgccaaggttaatcaaaaggcaggtggactatggtgaaacatttaggccagttgtaaaagcatccacaatattatcaaacaacttcaataaacaatgccttcttgaatggctatctagaggaggttgtgtacatgtgtcaatctgaaggctttatagatccaaaaaaaccagaccatgtatgcaaattgcacaagtctctatatgagcgtaagcaagctctaagagcctggtttgacagactaaggaatactcttcttgaatggaaatttcaaaactctaaagcagatacatctctatttttctacatcaacaacaatattatcatccttgtactaatttatgtagatgacattattgttacatgcaacaacaatactcatctcaatagatgtgttcagcaactagacaagtgcttcactctaaaagaccttggagctctccacttcttccttggcattgaagtgtttcgagatgaaacatgtatgtatctcacttagactgaatacattgaggatctattgaggaaacacaatatgcttcatctgaaacccaatccaacaccagtcacaactagaaagtctttgtctatctctaatggcaaagaaatagaaaatataa

SEQ ID NO: 3276 - DNA, 1185 bp, Cannabis sativa
tcctggtgatttgtcggggtgcatctgcttcacagctctattgacctcttctgcagtaaccggtgcaatcagctgtaggttctggtctgtagaaatcgaagtaggaatgctgtttgtaatagtttctgatgagtgtggaaaagaggtaaatagctcagtaaaataatctttgataacgtcagctagtccattttgccaatccacccaaaaacctgctgcattttgaagctttgacagagaattggtgcgtcttcgagttgaggcataagcgtgaaaaaacttgctattttgatctccctctctcaaccaaagttgtttagatctttgtctccaaaatatttctctctgagtgtaagtttcaaagagattttgttcagcttctttatgctttctaacagacaaatcatctcttccttttttccaacattggatttcttttttgagtcctttgattctatctttgaagttacccgagtagctctctccccaggcttgtaacaagtggctgcaatgagctattttatcagtaatagcattagatggacaactagaccagccctctttgataacttgtgcacacattggttcacggagccaacaattctcaaaacgaaatctctttttaggaattgtagtatcaaaagaattaggaaccaataagatgggagtgtggtcagagcttgaaacatcgatattgaacaactttgctgagttgaagtggtctaaccaatcctgggtagccaaagctctatctagccgcacttcaatccaattagccgttcctctactcttttcccaagtgaagggataaccgatcaactacatgtctctcaaattgcagtccataagagcttgattgaagccgtctattaaccaagttgggtatgcattgccgcctctcttatcttcaggaagacacacattgtttaaatcgcctataacacaccaaggcaggttatatctagcagataaggttcttaacatatcccaggttcttgatcgaaggtttctattaggttcgccatagcaccctgttagtctccacaccatgttatgattacaatgaacactaacatcaatgtaagaattagagtaaccaagcaccttgacatcatcctccgttttccaaagcaaagcgattccaccacttctaccaacaacatcaatagccaagagaccatcgaa

SEQ ID NO: 3277 - DNA, 1048 bp, Cannabis sativa
cgatgcagagagaagatagagagtttaggctatataatagcgtgaaagactccagattttcacaaccatggacaaaggcattcctaatattgggaaagtaatctagagaaagcaatttgaaggagctagaagagatacgtacaacaagaagttcttggagagattcataaacagaggagggtagaaattctagattttggcaatgatccagatgtaaggactccaaataatcaaaattttggaggccattacatgatttgagtcctggaatcatgtcacactcctcaacacgtaggctagtgacgtttggcatatctgggagtaatgaagcaagctttggacaataatctatacgaaactctgttaaagatggtaggaggcgaggcagatctcccgtcagactatcacaactggacatagtaagtgatgttaacttcggaaacacttccatgtttcgttttggtgctgaccattctttccagtttcgcatgtgtttgaatgtcaaggactccagcaatggaaatgatcgggaagaactagtcccgtaaaaatcaacacccaccacctctactgttgcacagtcttcaatcgaaagagtcaagagtgcaggcaattccccaagtggtggcaatgtactaaatttacaacgactcatgtaaagatatctcaaattaatcaaatgatgtaaatttgtagggaactttgagagttgcagacacctaatcaattttaaagtttgtaaattgtacaacaaactcacagattcgggcaattctttgattgaagtccaagaaagatccaagtggcgaagatgtattaagtcacctactgaattaggcaactcgctgacattttcataacgcgctaaagataaaaatctcaaacgcctcaatttcatcaaatctttcatcacatcttgtacttgcagcaatttattcgaataactgtcataatactttttagtaacaggcataaatgtacgtaaacgatttgcttcaaaaattaattggcaagtctcatgaaaagcattgcagttgatgtccacttc

SEQ ID NO: 3278 - DNA, 891 bp, Cannabis sativa
aaagtgaatcattagatgtctttagaatatttaaagctcaagtagagaaacaatgtaacaagcaaattaaaatagtgaaatcagatagaggtagaaagtattatggtagataaacagaagatgaacaaacacttggtccatttgtgaagtttctagatgaaaatgagattgttgcccagtacacttgagaaaaatagtattacagaaaaaaaaaaaaaaactgaacattaatagacataatgcggagtatgcttagcaactctaatcttcctaaattcatgtggattgaagctctaaagatatcggtgtacatattaaaccaaattttaataaagacaatttcaaaaacttcttttgaattatataaaaagattggaaatcaagtttaaatcaaaataaaaaaaaaacatcagctgcccattgttatggccttattggctttgaatcacttgactttttcttctattctgacacaaatacactgccctaattaagtttcaaaattcaattagattttaccacgtaagagtattagattggcatatttaatttttatttaatttacattattattaaccaaaggatatatattggcattgtccatgaaaaatattgtctcgaactcttattttttcctttattataaattgggtttgttttaataggttataaacagaatgcttttttattattattatacttcaattttgtatttttttttgggcttgtttggtacacaagattagattggattatatagattaatttgtctagtctaatatttgaacatgctgaaaatttgaataactaatccagctaatactatctatttgggcttatttatcccatccaagagtgtgggataaataatcttatactggtcagtttttt

SEQ ID NO: 3279 - DNA, 1475 bp, Cannabis sativa
gctaaatttagatgaaaattgtaaattgttaacgatatagtgattttgggggatttgccgttaaaatttaagttttaagagttaattgttggagaaataaaactattaagagttttaccgcaattaatgcaatttaaattaagatacttatagttatacttctcacgtaaattactaattttttcttttctagaatttataatcggttgtctttctttctaatttgattaacaatcagtttagattctttaatttttttttttttttaaaaaagtattgtaattcattgatacacaaataagttcaaattataacttaagaattagtgatggtataacatgcatgcttatgtgtcacaccatttgcttatcttgatatataagcgaaaattatagggtaatttgacttttgatctataaatttaaaccaaaacaagaaattgacttaaatttagacaccctctcaaatgtgagctcatctttcccctaatcccaaaactaccccctaataatatttcccacattttccctttctcttctctttcccttttaccatcattttttctcttcaacacaacaaaaaaatcatcatcttacctgtttttttatgccaaatcaagtagaaaatgcagaaatcagtatgaagcctagctttactacttagttccacaaaaaataggagaaaaactatataatttacaaagtttggagatcttagaggaaatcacaatgggtatgtgattttatgttcaactttgttcttacggtttattttattttatttttttttaaagtatattggatttttattagttgtacgttgatttagtcgtgtgttctgttaagtttagtgtggaaaaattagatctacaattttgtgattttttgggttttttgcatttttttttattaaatttaatgggttcgatatgtgctcaatagatttttgctctagagattagaggtgaagttttgataatgctccccccctttataaaaaaaaaaaccccccctttatcaaaaaaaggttttgataatgctcgataagtgttcaataattgctcgatagttcatatttgtaagcaatgttcaaattgtttgatacatgtacgatacatgctcgatagttattcaatacatattactaaattttagaagaatatttattttgtttttgatagatggtgatttgatgtttctcaatcttcgctcgatatttacctgttctatttttatcttttttttagaaaaaatgtgttattagtgttttcagataggtgacaccattggaacttgtattactaagatttaaattttctaacatgtatatttgattataatctataatctaacatcctaaacatgaatttcgtaaaataattaaataaacacataaaattttagaaaaaccttacattggtggcagcagaatataatggattctttcatttagatctctaatccttgttcatttct

SEQ ID NO: 3280 - DNA, 907 bp, Cannabis sativa
taaacaaaaaacgtcgttgagtctaaatgacagcccaatttcattgatgtagttttttttttctaaatacagagcgactctatgtgtagatagtctagtctgttatagacttttgggttttcttttgcccttactatctcactcaaattgtctcaagtgtctcaaggaactttcctgctctttctaaggtttcttcaactgcgtgaaaatggttatggtaaacgagtttggcaactgtggaggttgtttcgacagataaagatattggcaaagtgatggaacgtgacagcgacatgaaaattgaaatgatggaactttttgaagaattatctctagaagatatagtgatgaacaaagcctgcgtcggaaagatagtggggtgtaagactatggcagcctcagtagttcggaaagctcttatgggtatatggaacctgaagaaatagtggagaataaagaagtttaaagagggagtgctgggatttttctttgacttggaggaggattgcagtcttgttatgaacagaaggccttggctcgtgaacggaatccttctgaacctaaaaccttggccagtggagggtgaggtgcgcatgtcggactttgacgtcgcacggttttgggttgagtttcatggccttcctgcgcgatgcttatcggaaaacaatgttcccattctcgcaaagaaagtgggacagatgattaagtcggacaggaagaaaaaggaggacatggttagacgtggcttcctacgatgttggatcgatgtatggattcagtactcaatccctgctagttttttcctcaaagccaccgctcggccggactcgtgtgtacagttcaaatatgaaaaacttctttttttatgtttcgattgcggaatgtgttgggttttatgccctaaata

SEQ ID NO: 3281 - DNA, 1092 bp, Cannabis sativa
tcatattcttctctttttttttttttggttcttctttttaacatatattatatataattttcaaaatgctaccacgtcatcaccattttttttatatttatatatccacctacacaagtcaaatccctcattaaccaataccatttcgccacgtgtaaaacaaatttccacttgtcactcatcacccgacctaattttttcttttggtttctctaaactgactgatcactctactaagtattctttcatctccctcctttttcttgtcttttaaatttcgattatctaccaccaccaccactgactcaacggtcaacatctccgccgtaacggtctactttcggcgagtcgtgaaagtctggtacacgacggttccggcagatggaaactcatccgcggcgcaactcctgcgtttcaacccgagtggttcgagagctgaggcgactcgcccccaaacatctctacctgctgaagtcgtcgaaaccgacatggtcgctggtcggaaaatctgagctactttcttcaaaaccctagcgatgtcgtcaccaccgtggcgggaaccgactgtctcgaagctggcgtagctgtagccgtcctcaggcgtgacgtggattgtggagtaacgatcaccgtcgattccattcatggagtaaccgcaaggatcgaaagcgtaatcacagattaatgcggaaggattgatgttaccgatggcagtagcttccgtcatctccttcccggcggaatcaccgttctttccatcactcggtcgccggaaaaactttccggcagagaccttatcgagctcggtcatgcagatctcgatcgtgaagacgtcgcctagatcgatctcggtacttgctgtgaaaacgtgccatgaatgagttggaattttcgaaggcataacagaggctttcctgaagcgaagactgtttgggagagaatcttcgagatatacaacctcatctttgaaactcgtatggggaaaaggctgtgactcagggaagatatagttaccgcgggtataccgaacggacgacagagataagcccaggtggcgagcgtgatgaatcaatggacggacggatttgagca

SEQ ID NO: 3282 - DNA, 900 bp, Cannabis sativa
tatatatatatatatattgagaaagagcagaatagtttatacatctcagatatactagtctatatattaagctagctcccacacatggtcaatgtgtggatctctaacgatcgaccatcagatatgatctcgtatataataacatattattaattatagtactgttcaaatcgtgcgtaaatctaaatggactatatatatatgtaaatatgtgagtcaaattcaagatgaaatactataggcacgctaacaaaataaagctattattttttttattacatcatataattttttggtgattaagagccatttaattaatcacaaagaatgtagctgttagctaaatatagttttaatcatataataatgaatacatattttaaaaggaaggataactttattaatcaaataaattcaaattattacaatagctaaaaaattagttggaatatcatctaaactgaaactgtgatttgaatacaagcaatacaatcatgagtaactttatttatagaaggtttaacaaaaataatttgacaacaacctatggttgctattttggaggctcattgtaacaacaacaataccctatgtatggtcaatttgggtcatcacaacaacaacttgtgtatggtcaatttggatcatcacagcaacttgtgtatggtcaatttggattattgttgttgtaacaaaccaatgtatagagtatagtcaaatgggaggatctccacaacagcctatgtgtatgatcagattttcactccgcagagtcagcaacaacagcagagtactttggttcgttcgcagactcgacaatttgttgagatcttatcaacacgacaatctagacaaccttattaccctatcccgtcggcgcctcaatctcgtaataatcgt

SEQ ID NO: 3283 - DNA, 1227 bp, Cannabis sativa
aaccaccgcacccaccaccatccataacatcaaacaccatcgaacccactcaccaccgaaacccattcttctattgaaacccatgcccctgtcactccttctttctttttcttcatttgaaacccatgtcaaatccgactcaccaccgaaacctagcaatccaaaatttaaaagggatttgatgtacattagaagtcccgagaatcccacacagattaatcccctacttttggtaaggtttttatatttttatgagttttagagattttttttgatattatggtgtagttttttgatcaggtttgaattctgggtttccctagatttttttttttgcaatttattgatgtttatcgatatattatcgacgtctatcgatatcatcaaccttaggttaggaattaaatattgttgcactatttctcgacaaatttgcaactttttttgataccgtcaatctcagttaagctagaattggaagttgaaatcattagcaacatatagtgatatgttgttgacataatttgcgatattgttgtttattatatattttctcaatgcatgatgtacttagcaacatgtagcaatatgttgttgacaacatttatgattttgatatttttctgttttatctctctgtcttgtggtagttagtgacatgttgcgacacgttagtcgacatatcgcgacatatgcctttagaatcatttctcacacagtaaacacatgttttagcaattactatcaatattttgcaacttaatttttgatgtttagagatttttttttgtgacatttgcgacacatttttatgtgttttcatatttcctcttttttgtcttaaattttacagatggctcttgaacttaagctgccaattctgaccatttcataggttgtcttacctatcggggcccagataggtttaaagatattaaggccaagtttgaagcgatgaagtttattgagagggttaatgccagtccttttagaccattcagggaagctggagaattgactttctcgggtgcattggtccacagcgtactcctgcaaaagatggaagttcaaaatgagaaggaaaatgagatatggttttatgttggtaaaacaaataggggatttggacggcttgattttggattaattactggcttacctatgagtaggtcctacaaaggaagagatagaagctaattccaatgaacgtttagtgaggacgtattt

SEQ ID NO: 3284 - DNA, 1609 bp, Cannabis sativa
atatgcagcatatagatgcaaccgtccatatgctgaggaggcgacacttcttctttccattgacatttcgatagaagggtatcattctctctacatatgtgaccactattattagcagtgcatggacaaatcacaggggtcccagaaaaagtttatttgggaggattatatcatggagtactgcagaggtgatcatcatgtattattttagtaagtttttaaagtttaaactatgattacaagtttattatggtttgttaattgtttagctgttctccataattacaagaccaattctatcctagatggggataatgagttcatttacttcattctgcatcttcccacacaaaggcaccgggtggctgttgaagttgacattgagctatgaaaaattaacatgtactactgtgattccaacatttgtccttggaagaacatggaagccatcttgaagccctgggaagagttgttgccatcattaatccatggaaccggagatttctcaaataataaccagatcatggtgttaactatgagcgagatcaaggagcttccgaggatgcattcatctcgagtcacccacgacttagttccgaaggccaaaaaaaggtacatagtgataaaaaattactatagtaataaaatatgcttacagtctactaattccatattttgtgttgcatttagtggtgattgtggcatttatgtcattgagtacgtggaacgtctattgatgcaacgtccaatagctgatgtcacgtaggaacggatgaagatgtttcgtgaacggtggtacgtcgatctgtattaccaaaacctcagttgaatatttgtgtataattaaaaatacattgtatactttatctaatttgcttaatttaagatatatattggtttaaatgttttgtaaatgaaaggttggcgaacaaatggaggtacctacaacttataaaaaaaaaatgaaaggctacctctactgccagggttcgctgaagggtgtcgtcgatgcagattaggttattttaatggagaatcggtcaagcctggatcgttgtgcccgtattgcgagtctcactgacacagtacagagttttaattgttatgttatgattgttttgttgttagttttaaagtttgtttagtctttacttatgtttaaaaaatttcacttatttcttgtttactgtttaaaatttttcaattttttttctcaacgtcaacaatctatcgacattcactcgataaattatcgacaaacatgaatactagggaatattcttaaatatcgataaaatgttaacaaaatatcgacaaactgtcacacatcgcgaaatatcatcggcaaaatatattttcaaatttaatcgacaatatgtggatatactatcgataacaataattttattttaattgctatagttatcgacatgatgtcaaaaaaccatcgatatcatgtcaataatggtcactcctgacgtttctttgcatattatcaacattacatcgatattgtatggacaaactatcgataaactatagaaaacccagattttgacataaaactagatctaccatttcataccaaaaatactagttctaacaaata

SEQ ID NO: 3285 - DNA, 1013 bp, Cannabis sativa
caacagttgactgccctttgtcggatggatatttaatccaccttccatttcggagccaaaaaaaatagcttacctaggcatatgcaacgcccaaagcaacaccaaaacatcattatacaaatgaaatcaagacatttattctcttgcttaggcccggacgcacgaccaaagcacacaagtccgaccctaagtataagcggattaagtctgtgccttgagcccacctagccgaaaagctaaaaaaaactttcatttttaatattacacaattttttaattaggttttaaaaatactatactttttttttttttttctaaataagagtccaaaaataataattttcctataatttactaaatttcaaaatccgccttaaaagcacactcaccgattgggcagcatgctcaattgagaagatacctataaactgctaggttttgtaatattaaaaataaaataattttatgtttttctttatttttttcatacacagtactactaagcattgttagttagaggttattgaagggttgttatttctattttgttgttgcccacactcagccatggatcttggactcgagtgatcccccactacaagaaaaaatagcaactatcttaatattattagcggtaggacataaacaataaaaaaaataaaattattcgaagtcataggcaaaaagttacatgtgcctcacttaaaattaggaccaatcataaattatttcgaagcttgattctaagtatattttttgaatctttatttaaatatttttttaatcaaataataatatataagactgtttagtgtagtagtaaaaatatttttaaagtttaaaaaagtcacaagttcaacacttcatatctttattttatctttttgaaaagaactaaaattattatgttgaatttgaaccacctaacaactatgtatactatgtcttcggtaatatttttaaccacctaaaaatatataagactgtcatgattcaatcggtggctttgagcg

SEQ ID NO: 3286 - DNA, 1294 bp, Cannabis sativa
tacagaggttcatttgtgaattttctgtatctatttatgcaatattatgcttaatcactttagtatttcttttgtctcatcatcataacaccagaaacatctgcctttgattatttatatataatgcagtacttcagtcactcctcttttttttttttgcaaggactttagtcactcctttagatactagttaagtgagaaatgattcaattgtgatctgcagagtgttctgcatctattctggtgtgcacttctcagtttctaccttgttgcttataatggcattatctatgtcatttaacatcatcctagtaactctttacctgcaaattcttatcccaactataatgtcattataactcttccttgttgcttataatggcattattcgtaatatcatttaacatcatcgtagtaactctttacctgcaaatccttattcccaactatatctgtgtactgattatttggtctcttatgttttacaggttcagatagcagatccttttgaaaaccctcacattaaaagtttatacaatgagtggcttgagcaacctggttcagaaaaagctaagaaacacatgcacaccgaatatcaccctttggtgaaaagcatcacatctcagttacacaattggtaaaagttttgctttgctttccttacaaaccaaaccaatccccattacgagcaacatggggattgcatttatggaatccagttttgatagtcaaatcctatactttgtttcagttttcaccacatgtatgtatatattccaacttcattagataaataaaaaaaaaaaaaactggaaaaattactccatactttatcctttgacagaattcaaataagcttaagtctgttcatgtattgtgtttttttgacctctcacttcagttgaagaggttaggaaagaaagaatggcgcgtagtctttagtatatttatcgattctttttctatgtaactcaagtaatggaaatttaaacgaggtcgacctgtgttggtatttctgctttctgttattgataagttgtatttatttgtgtaacactttgttgcttttatagttttattctcaatattattgacttctttaaaacagatttagaagggaatttattacattttgttttttcttaaaaaaaagttcattagaaattatttataaagtgaaaatgtacacaataatgtatcatgagtctttatatatatatatatattatatatatatttatatgaaggtatatatatgtgtgagattggtaagctcacaaatattttcaaacat

SEQ ID NO: 3287 - DNA, 817 bp, Cannabis sativa
cagattatgtgtgtctcttacataagtcattgtatggtcttaagcaggcaccccgggcttggtataagtgttttgctgattatgttttgtctattgggttcattaatagcaaatgtgataattctttattcattttcagcaaagggtcggatatggcttacattttattatatgttgatgatattattctcactgcttcttctgatactctgcggtgttctataatggatctcctttgcttcgaatttgctatgaaggatcttggccctttgaattattttcttggtattgcggtgactcgacataagggtggtatgtttctttcacagcgcaagtatgccgaagacataatagagcgtgtcgggatgtcttcgtgtaagccgtctactacccctgttgacacaaaatctaaagttagtgctacatctagtgctacatttgatgatcctaccctatatcggagtcttgcaggggctctacaatatctcactttcacacgaccagatatctcttatgatgtacaacaagtttgtctccatatgcatgatccgagggttgatcatatgtcagctctcaaacgggttattcgatatgttcagggtacgttggatttcggtcttcatttatattcctcttctacttctactctggtctcatacactgatgcagattggggtgggtgccctgacacgagacgatctacttctggatactgtgtttttttgggtgacaacttgatatcttggtcgtcaaaacgacaacctacgttgtctcgttcgagtgccgaggccgagtatcgtggggtggcaaatgtggt

SEQ ID NO: 3288 - DNA, 1890 bp, Cannabis sativa
taccgtttctgaagaaacaactaaccgtttcatctggcaggcctgggtaaatcgatacttgtttgaggatcgggttacccatttggggtgattgttgaataccttgatttttgtattttcttgatatttgaggtattaaaatgctatttattgacaggataacttcagattataagtttaagcccccgaaagtgttttagtgagacacttactaattttatgttaatgtgacttaggacttctaatcatcaagtagttttttcacttagttgactggcacatctaattactgaatcgaggtaagattagtataatagatacacacatatacatatgtttagcatgcatgtttcattattgtctttagattaacatatcacggtatggtgtacataaagttgcacgagataccaacatatacatatcctaggcaaaataagaaagccatcagattaacgtatcagatggttacctggaaacagaccctattgatgtggacatgaatgtttgacacgtggaaagaaagaaaacatcctagaattgagtagtcccgagtcatagcagttgacttgggaggggtccctagccctgcacctaggttggctcaaagaactctacagtgggtgtttggatcctgcaatgttgtttcaaactcaccatcctttagtattctaaaccaataagacaataaaaatcgaagtctaaggcctgtaaactaaaatagagataaaacaacacccttgaattcaattcgggtgcctagggttttcaccaactgcccaagttgacattccaactagggtttcagttttagggtagtgaaaatgactcaaactttgtactttgacaagaataagacctatcacaaatatgtttgagtcaccagaataagaattagggatcttttcattttgagcacctatggcacctagtgcacccaatgcccaagttgacatattgtcaaccttgggcacttctgaccctaatattgaagtatcttgagcattgtattcgtctccatccaaaatgagggtacaagtgctttcgggagagaaacctatcatcttggagggaaaataagggacccaacgcccaggttgacattgtgctgggtcgaacacccaggttgagatttttcaatttgggccatttccattagtagtttagaagaattcttccgggcgtattctctacttttgtcaacaattgagattttggtgcttttgagaaataaacagagtcatctagagccgaaattgggacctaacacccaggttcacactagtcctaagccaagtgctcatgctgacattgacattaggcccagtgcccaggttgacatttcgtaaacttgggccatttccaatcaattttttcaagaaatcttttggggattctccgttttcacaaataaccgagatacaagtgtttccaggaatcaaacaaaaccatttggtggcaaaaagctggacacagctcccaggttgacattttgtcaatctgtgttatttctagtcatatttctcaattaagtgtaccaggaatcttttttattttgaaaaataatgaagataaaagtaattgcagggagaaaacaagatctctaaggagcccaaatagggccccagtgcttaggttgacatgtgtgttggacgttgtgcccaggtttacattcaacctggagcgcgtggttacgctcctcaaataccaattttgctccaagagttcttattattttggtcaaaaatggggtaggagaccttgtttgcaatctcaaatgcctttaaagtgtcaaaacaaaccccaagaagccacccgagaagcacccaatgcctaggttgatgtatggtctggtgcactaggttctgcttgttagattccaatttcatc

SEQ ID NO: 3289 - DNA, 552 bp, Cannabis sativa
ttccaatccacttttgataccaatctatacggtaatctgctttctctctaaaactaattttttcaattaagaaaattataatgtgtttatttgattttgcgttctttttctttatattttggatacatacatattatcttcagtcaatgaagcttattaaatgctgtcagtacccaacctttttgtagttttaaggagagttgatgttgatgttgatattgtatgagatcaatcattgtctcaagaaattttcacattggaagaaaactcttcagctcttcttttatctttcaactcggtaaaaacaaaattgtgagtacctgccatgctatatcacatgtccaaatatgagaaagctcttgaactatagttttctgggtctgcgaattagattaagcggtgttttatccttgtaacttggactggcgcctagtggtctatgaagaacaggactttgaaactgataatataacacaagaaatttgatgtataagaacacgcttcatgttaaagttttgctctttcatgctttttcaatttcttttagcttta

SEQ ID NO: 3290 - DNA, 2608 bp, Cannabis sativa
tttttttttttttttttcaaatggccactttgatatattttattagaggcaacatacaatgccaaatctgctccacaaaaagtcttttttccccttatttgttgcttgtttgaatgtttgagcattgagcacatgtatacacttccatcttaacagttaccagaccatgcctctgcggaacctgattgaaagttgcgaatgccaaatccagctttctcaagattggaaattctaatatatagtcacatgttaggccaactttattgatctcattactttgtattattcctcatattgataacaaaggtattttttttccttaaaaaaaagggaaaacatgttaggccaacttctttaagtgctatttgatttttgttaagtttttcatttttctaactagggtaaatgatacaattattcttttaaaaagaatggtaaacagatgcggcacattgcaaataatagaagtgtaacaagaaaaaatgtttcaatttaaaataacaaagtggtcaatcagcaaaaaacattgaattagtggggatgattatgtagtttacatttcctaaatcgttgtagcgatgataaatgaagaatgctaatacgtgatcatatgattgtgtacaggtattgtttgatgttgtgccacacatagaatttcaagatgccattaagttgatcagtatgcagccggctgcctctagctcggcaacctggcagaggtgagtattctaacataagtagcatagggatgactattttgggtgcttgtttaattttatttcattaggcttgccctacaagtctgcaaacgattgtacaaaatagctgggtctattggtaggcgttttggcatagtgctgcttatcagtagccatttttgcttgctcttcactatgtatcagattaagatgctaattccatcacgcatttatttgatgctgatgttgttaagggttgcgtaacagtattgtaatgactaggactttgatgggttggttctcatttcctacacatgttttagttgtaattgttgataaatacagaaacttgtgtcctctgattgcttgttctaacctgtaaggctgcttatgtgtgttgcattcatggtttgttcggatatgagttgatgttggtagtatacttgagactaatccctaggttcattcttgattgaagaacttgagcattatagcttagagatacaatcatttattcttccatacccgttgatgatgctttttcttttttccttcataggctgcaggatattgaacttatgcacatgcgttatgcactagagtcagctgttcttgcacttcgagcaatgcagaagagcatgtctggtgaaagagaaagtcatcatcaagagcccttttgtcatttgaaagatctacaaagccacatggatgctattactaatattccacgcaaggtcttttgaatttgatttgcaatttttcagctttaagctatctagatttttatttttagtagtttatattgttgcatcatgcttctccccatcttttcatccacaagaagttcaacccataagtacacattattgaatgttatctgtatatattcttgcacaagatgctaactgtggaaagtatggagaatagctttttccgttatacttcaaccctagaaattgtggcattcttatatgatttgtactataggagggatgggagaaggtatggtgtgaaggatgtgaagggtagtaggatttactcgttctttttaccaaacatccttagtttcaactttccacaccctctttttacctcgcacatgactgagtgtgaatgtcttgagcgaaattatatattaacgatggtgatctatgcttgtcattttaaaacttaatttattttcatttttgaatgcttctcatgcaatttgtaactaagcttgtcaaattaaaactatattattttgatttgctttccaaatattgatgattatgtgacatgcaatttgtcgacaatgcagataatgatggtgaatgttataatttcactattgcacatggattatctctctcttaatttggcgcattgcatgtcatctcaaagtcgtactgagtcacccgatacttgtgtgtgggaacataatgatctcggtacatctgaaggggcaaacaaaatggttctatctttcataggattgctacttgatatactacgtcgcaatgttccctcaactgtaactgaactacgaaatgctcaaattgatggtttgactacaagtggaagacatgcgctagagtggagggtgtcaatagctaatcgtttcattgaagaatgggaatggcggttgtcaattttgcagcgtcttcttcctttagctgaacgccagtggagatgggaggaagcattgactgtgctacgtgcagccccatctaagctacttaacctgtgagatttatgagctgttatagagaagttttgtgagatactttttccttctacttaaaatgcataatatcgggtattttgtgaaaattcaatgtggatcaaatcttatgcagaggtatcttatcatcttgtaaactcaagatgctgctgatatatttgtctattgtggtttttttttttttttt

SEQ ID NO: 3291 - DNA, 1759 bp, Cannabis sativa
aaaaatataaaattttttcacgtctatacttattgagtaaataattatatattagtgaaaaaataatatactcaaatcctaaaatctattattatatatgagtccatctaattgtattattttgaataaaatattacacactctaaaactactcactatcaccaacagtttccatgtacataattttgttaaaatttacataaaaatcaagaaagcaacttttattataattttacctctataagagtagaataatttttatccctctttttttattttatttatcaaaatacattttgcacactcataaatacctttaaaagaacctttactgcgtcaagagagagaaaaaaaaaataatcaataagtgaaaagcaaccaaagaatgctaaaaaaaaagagaaaaaatattctataggaattggtatcatgataaattcaaataaaatcaccatcttgagaaaaccatagaaataggaactacaaaaacttggattacaccaccaataaaagaaagataatataaaatattgcaaaccattgatccagctatagcaatatcagatgacttaattgtaaaaacaatattatgaaatcagaaaagcaatattatctagatcaatttcaacatatatgaagattaaacagaattgtcaatgcaataagaaatattttagaacttcatattcatgtgtcaaatataatattaataatattttatgtttctgtaatattttagatatgacatacaaccttaaaataactattatgcaattgataagtttctcattgaaaatgaggtattgttggttgttgttgtgttgttggctatgttcacacacaatggatatattgtgaagtcgggttctttcaatttttgttgtatgtaaaagaataggctcggatcgtcctttatcctcaatggttagtaaccttatttcacttggtctttcgattgttgttaagtattttcttggttatattccagcacttgcttcaacttgtgcacaagttcttcatttttgcaatcccttgagatgaattcgccactaatttcataattcacataatttattatttgatcaaactgcccattaaattgtatgagaaatgagattgattttgtttcttgaatttttgaaaaattcaaatatggtcagctaactataagaaaaatgtaaacaaattgaaacgcaacagagcattgaagatacatgtacaacatcagctatatatatagcacatataatgtcaggcatctatttgacaacttaaaaacaactattgagtttcctctatacgagtatgtattgtcaattccgaatcctgatttattacataataatatttttagtagcataattgttaggcaactgataggcatcgtagatacaactatgtatgaacaatttgcttggacatcgttaagaaaaaatttaacaaagtattattacattgatgaacaatgagttgtagtttaagaatatttttgtgagaaagaactttaagaagactatgaatcaacacgaactcaaccaatgttaaaatatgaacacactgactatattggaattttttttgagagccttgtgctggtttgtgtatatgaaagacctgcaaataagactaaaaacagtgtagccttatcattgcgttattattgatgcatcaattatcagggcgtcaacaatgcaactacatagaacaataaagacaaaaagacgttgacagattcatgacacgagatgaatgcaaattt

SEQ ID NO: 3292 - DNA, 1547 bp, Cannabis sativa
atggtacaggaatgaaaataaacatttagctcctgggaccatgattcattttgaatatcaagatgtttttcaggtgcatgagtatttaagaaactagtttggaaaaggaaattctatttcattgaagaacacattttgagagatataaattccacctagcctctgtaggaactattgtaccccacattcacacactttagagagtaaaactgaaacttatggttttgataaggccttatgttgggaaacaggcaactctaaaagttttaatttgcttgtaatctagttttttgtggaaaagtattttaaaaggggttttgtcatgaaggatgggagttggaagcatatcaataaggtacacagaggttttaaaggcatcaacccaatatttaagaggcatgctcgcctatgccagtaaggtcaaacccatctcaataatgtgtctgtattttctttcaactcttctattttgagccgaagtgtgaggacatgagtgttggaagtaaatatcatttgttttcactaagttttcaaacacttggcactctccaccccaatcaaatttaatgcttttaattctattttcaaattggttttcaacaaaaactttaaattctataaaagcattgagcgcatctgatttgtttttcaaaggtataactatgtatgtttgctaaaatcatcatgtatgatttgaagtttatgttagattcaattggggcaggtcccggcagatttgtatgaattaactcaagcaccttagaggttctataagaagacaatttaaagagaaaagcatgtgatgtaccaaactgggaggctttacaaaaattttctatttcatctttaggaatttttatattgtcggaatcacaaataagtttaagaaatgtagtggatggatggcctaaacgcctatgccatatatccttatttgaaaatttaaaattagctatctgagcagcatttgatctagaaacacttgagacactagagaaaaattgagattgattttgcccaggaacaattttgctggtgaattggaagagaccatctctaagctctccctccagcaacaccttccttgtgagtttctccttcacaaaataataatcaaggttaaattcaacaaatacaccattgtgtgatgtcaaacttgatacacttagaattttttttgcaatatttatagtagcatattattcagaagcaggaatttaaacacattatttgtttgtaatttaccataaccaagatgagaaatctttaagctatttccatcacctatgatgagtttaattttcttaccaccgtactcattcttctacatcatgttattctcatatgcagtcacatggttactagcaccattgtccacaaaccaagctagcctctctgtcaacaacttcaggtgtagcagtgtaggctggaattccctaattaactttttaattggtttgaccaccaattttgggatcaaatcccatgtatgcttcatcatatctactgtagcaaatagctcttaaatgaccataatgtctgcaaac

SEQ ID NO: 3293 - DNA, 1287 bp, Cannabis sativa
taatgctctgtactcggattcggtgcaagatcgtgcaaccacggtctgtttcttcgagctccaggaaatcagattggatccgagatagacacaataagctccagttgatcgacgatcatcaggacaactagcccagtccgcatcggagaacccttgaatagcaagtgtgcgagatgatcctttcttaaaactaacaccatgagtagcggtggctttaagatacttcaaaacacgtttgcaagcttgccaatgagccgtagtaggacagtgaagaaattggctaagctttgagacaatataggcaatatcaggccgagtaatggtcagatattgtagcgcgccaacggtgcttcgatagagactaggatcatccattggttccccctcgctgcgagagagggttttgcgaggagcagctggggtagagcaaggtttaatgcctgtgagcttgagccgagagagaagatcagctatatattttgattgagaaagatagatgccggtggtgtctctgtaggcttcaattcccaagaaataatggagtggaccaagttgtttcaaggcaaacataccatggagatcagatatcagtttcgaaacaagagaaggatgagaaccagtcaccaaaatatcatccacatatacaagcaagaggagaagctgagaattcttgtgataaatgaagagagaaacatcagctttagatgaagcaaaaccccaatgaaccaatgctgtatgaaggcgctcaaaccaagcccgaggagcttgtttgaggccatataaagctttcttaaggcgacagacatgattgggaaaatcggggttgacaaaaccttcaggttgagtcatataaacagtctcctttaagacaccattaaggaaggcgttgttcacatctagttgttgaatttcccaaccaaaatggacagcaacggtgatgataatgcgaactgtagctggtttaataacaggactataagtctcataaaaatcaagaccaggggtttgattaaaacccttcgcaactaaccgtgctttgagtcgttgaacgctcccatcagcattgagtttaattttataaacccacttgttgtctatgacatgataggtaggatcgggaggaaccaaaatccaagtatcattcttaataagagcatcatgttcacaatccatagccgcatgccatttcggatcaagtagagcttgtgtcacagtccttggtacaagatagccactgtttacaacaaatggatgcttggtggcagcaaggattttgggcgtcattat

SEQ ID NO: 3294 - DNA, 1487 bp, Cannabis sativa
cgatggtatttgttcagcttttgtggaattttatactaatctctttcactctcaaggcacgaatgtgcattccattcactatgttctcactggtatttcacataggatctccccccagcagaacaatttccttgataacccttatgatatttctgaggttaaaagtgccctttttcagctggctggtgacaaagcccctaggccagatggccttaatcctttgttctaccaaaaaagttggccaataattggccaatctttcagcaaggcggtcttggatgttctgaatggggatgctgatatcactcccattaacgaaaccttcactgttctcatccctaaaaaaagcaatgcctccacggttcgagactttagacccatcagtttatgctccaccatctacaaagtggtgtttaaagcgattgccaataggcttaaagttgttctgaacaacatctattcccataaccatgatgcctttctcaacaataggattatctttgacaacatccttattgcaaatgaggtcataaatgctattaatagccgtaaagctgggaaaactacctgggctgctcttaagctggatatggagaaagcctttgataaagtggaatggagcttccttcaacacattatgctccacttaggtttccctcctcggctggtttctctcattctcaattgcatatccacagtctctttcagactctgtattaattcaagcctttctcctcccataatccctacttgaggcattaggcaaggggatcccctatccccttacttattccttcttgtggcggagggtttatcgattatcattctctccaaagagcagcttaatcttctcaagggtatctccatctgtcgatctgcccctcctatctctcacctcctttttgcggacgatagtcttctgtttactatggctactccccaaaatgctcacactaaaggatattctgcagacctacaatatggccactggaaaatctgtgaatcttcataagtcctctgctttgttttctcaaaatactccttcccatgcaaagtcttctttcctttcctccattggaatggaggataagccttttattgagcaataccttggtgtccctcaatgtctctcgcgctctaaaaagtcctcattccactttatccttcaaagagctaattctaaactcaattcatggaactccaagtgcttttccaaggctggtaaagagatacttctcaaggctgtgattcaatcaatccttgcctatgtcatgtcttgctataatatccctgtttccatttgccatcagttggagaagttaatggccaatttctggtggaatcctaagagttgcaataagtcgagtattcattggaaatccttgactaagctttgcaaatccaaattttacgggggtcttgggtttcgatccattattcatcaaaactaggccatctaagccaagcaagtgtggcgtatccacaat

SEQ ID NO: 3295 - DNA, 759 bp, Cannabis sativa
acagtccctgaatggaggggttagcatgtattagaactctcaaattaataacttcaacagtagttaattacatgcacattacttcatatgaaaaagaccgttgacctctaccttaacaaacgtaacaaaaaacacccagaatagatattgtggctcttgaaatgggaaactaaacaacatgatagtctgagtgagatgaccaccagagaagaatttcaagacgaaaacagaaaaacattatcaattaacttcaaaattgtcaaatgcagctaaccaaaccaatataatagcaattttaaaactcggaatattcattatcaccataaattcccgctgtttgttaccaaatgaatcccaaattataagcaaacaatatttataacaaagacacaattttttaagtaagaaaagatacactccaatcttcaacatgcaaacttaatcgttggaaccaaataactcgacaaacttaaaaaaacaagggaaatggaaagaagagaaaattacctccgagggtacagttgattcggggcttggaagtgaatctggatcttgtacaggaaggcgaagagagaacagagaaagtgggtatggagttataactgtacaaacaggacatgttggacggagaattgggaatttgaagctttaacatctctcagtcctagtctgagagattttcaaaaagtgaagaggttgaagtagaagaaagagtcgaagaaagaaattatctatggaagaacagaaaacaaaacaaaa

SEQ ID NO: 3296 - DNA, 838 bp, Cannabis sativa
attaaacagattcaaatcatgtaaatgcagattgtaacttgatacaaggcgaacaaaaaagaaaggaaaaagaaatatcgagtttactgtaagtaaatttcgaccagcctagtgtaaatttcgggttgcaacatccaacaaggaacctgcctaaataacataaaacaaactattaacccattcaatattgttggtcgatttggacagattatctctaatcccaatttttttttccattctgattttaatatttcctatcatcctgatatgtacattcaaaaagtttaagcactaattaacgtaataatcaactgaacttaagcatcttaaactcaaatctgatgaatattttataataacagatccatagaacacaaagatgcattttcgacatatttggttgttgaacctgctcaactacgccattccgaagaaacttctaactcaacatcttcttcccaccaagtagaactctgaaaaagaaaaatatgttttctcactcccataaatctctctgaaattgaaattttgaaagatattcaaaggggaaaactctatataaagagagacaccttgtagcctctgcgaggaaactcattataaaaattataatgatttagatttgatgcttaaataaatttggattagatgattatttttatcttattcctttcaagaaattatgcaactatacaaagatcccataatcatagctacattagcttactcatttttaaattgaggttttttttttaaggtggtagatagagtcacatatgattaataaagcaacgaactacaatgatgtaataacaaaaaatggttcaatgatgtaatt

SEQ ID NO: 3297 - DNA, 916 bp, Cannabis sativa
taaatttacaaaatagggtttggagataggaatttactactaaatgaatgatgtttagtatatgtatgatgttaattagcctgattaacaagacaataaaaaatgtttttttttcactaaaattaaaattgaaaaaaaaatagcaacataaacaaaagacaacgggacctctaaaattgaattgacacgtttggtgagcaaaaaaatctgcaaatatagcatttactaatatctggtgagagcattaataataacattaatatctagtcgttacttgttagatatgtatatatattataaaagcattagttattatcaatagtgtttaatactttttaaatctgtcatcttataattatcagcaataatctttaaaagttattacatagtcttgatacttaattacatacagttagaaaaacagagagaaaatataaaagagctcacctagcttaattaatgagcttgctccaaaatttatatttagataagaagtggttacaaatttagtttggacgtgtccattctgttaaggagaaaactaaaaaaaataaatcctaaaagattagacactaacttcctaaccaactacttaatagtcgttaacactcaccttaagttacactaaggtgagtaagtgttaaaattgattctgaatttatcgaactgtggtattgacaatggtttggtaaagatgtcaactacttcttgatttgtggagacataacgaacatcaagttattgtgttagaactctgtcacgaacaaaatgcagatcaagtttgacatgtttggtgcgagcgtaaaagatcagggatagaactacaaaaagaaatactatgtaagtttcctaattgacaagactgacaaaaaagtagattattacacttggaatgggagggtaatagctttattac

SEQ ID NO: 3298 - DNA, 1345 bp, Cannabis sativa
gtgaaactttcctcaagatccagatcccgaggatcttgcgagagatttgggtttaatgtgagctttagcattaattctcattttgtgcgaatgtacaaccatattttggtaggtaatttagacactcctccccctaattttactaataattatatctatgtttttgaattttttttctaatttctcattaattgtgaattgacctgttggtcttcttacctctgtggcttttggatgggatgtgaagctaatctcttccccattaattgctttcactagtgttcctactataaaaggttttttttaccatttttggtatcgccacttgaaaacctgaacactagtacaaagcctaaattagttttaacattttcatatttgctcatgtacacacaccatttactttcaatggatgacttagcgtactctttgtctgtggccctcagccttacagatgttgaatgtactatgcacactctccatgatcctacaccctcgaatgtctctgatcctaatgcccctgccatatatatctttctggtggcaaaactccacaccatcaagtccttcaataagaaagtctttatggagaaaatggactgaagcaatatctctcatttccctgtcaccataatagaaaggaccaaaggactttttttggttgaatttggatgtgtgggagaccgtcgtagggtgctacttcaacaaccttggacctacatgagccaagctatcctcatggacatccctaactcactggacgcactgaatggagatactcttatcaagcttcctctttgggtccaagttcacaacacctccttcctcaaaaaatctgaacaactcggtgagcttgtttccacaagccttggccatctcttggaaatttactgaccttcccttagggaaacctggggaccctactttcgtattcaggtcatgatagatgttgctcttcctctgcctatgggaattcccatcaatttttttggcatcaacaaagttgtctggctcgagctcaagtatgagaatatccctgacatttgcttcttctgtggatgcatgggacatacctacaataacggttgcatggaatacatgaaggcttgtgatgaaacaccactacctctgtacctcaagtacgatagcaaagccatcactggtaaagttaaagttttagctaatcctcttctgtcttgtcccgaacagataaactttgccaacccccctattgcaaccttgatgacatcaaaccctgccagaaatgtttgtgtctcactccccgaaaccatatcttcactcccaccatagcttccaactgagcgaccaattgcctcggcccaat

SEQ ID NO: 3299 - DNA, 1630 bp, Cannabis sativa
  modified_base (871)..(873): a, c, t, g, unknown or other
  modified_base (1388)..(1395): a, c, t, g, unknown or other
tatattttatatatatctcaacctgtgtagatttttgacttggtgaaaaataatgggattacatctctctccaagtccctctctctctcgacctctcttgaaatccagcagaaaactagggttttctttcaatttcattgtgttctagcaggattttggtaaagtctataagaaccaactcaagataagcaagctccctctttttcctttgaattttttatgattttaggtctagatattcatgcaatttttaaggttaaggttcagttggtccaaatttagtttgattctgattttagaggtcattttgatgttgtttgagctgatttaagactgaattgttgcttgttgttgtggttgaacaaagtttgagctttagagctcaaacttgctcttcaatggtagattttatttcagaggttgatattggattttacttcttgaattaagtgtattgtggtctaaataggtacttttggaaggtttgaaacgaattggggttggtttgggacatttttggaggttcctggactgaattggttaaccgattcagttttgcactataaaaccggttaactagttaccccaggcagaacctttagaactggttttccgattggaatctggtttagtggttgtggcagttttgggcaccctaaattttttattttagcgatatttagggtatgttatctatcgatggggaaagttttagttttgattttagatccccaaaaagtgatttagtgtatcactcatcagtattacgaatattgtgacttaggggcctataaattgtcaagcagcagttccactcaggttgaccggcacacctaaactacaaattgaggtaagattagtataatgatannnatatgtgattacatgtttagcgtgcatgtttatgaatgcatgttagataacatactgagatagcagtatccgtatacatagaattatattggatactaatgcttgtgtgtttggcttaaatactaaatgatgttattggtacaactagagtaccaagtataggctaatattatggtcaatagtactatcatgcgaacgttctagactcacgtgcgacgcgagatagagttatgattgggtgtatgggcgcctaattgtaatctagctagtttaccgtttatggcaattttaggcaccctagattttcttgttttagtgatatttagggtattgccatgttatccatcgataggaaaacttttggttttgattttaagtccccaaaaagtgatttagcgtatcactcatcaattttatgaatattgtgacttaggggcctgtaaatcgtcaagcaccagttcaactcaggtttactggcacaactaaactcgggattgaggtaagattagtataannnnnnnnatatgtgattacatgtttagcgtgcatgtttatgaatgcttgttagataacatactgagatagcggtatcagtatacatagaattatattagataccgatgattgtatgtttggcttaagtactgattgatgtcaccacattggtacaactagagtactaagtataagatgatattatggtcaatattactgtcgtaagaatgttctagacttagtacgcgtgggatgcaggata

SEQ ID NO: 3300 - DNA, 3800 bp, Cannabis sativa
gaaataaagccgccgggacctacccgtgtgtgatctttgtcattgagacagagcatctccacccaactctaaaaattgccacaaaattttacattactttaaaatataaaattttattttttttctcattcatatcatttttagcaatttattattaaaaagtactccatcacttagcaactctaaaattgctatcatagtcccagacgctataatttaatatatcattcatttttataataaaaactatcgtaaatatacattgaaattcatatattaataaaaataaatattatatgaaatttattttacaccaaatttaaaaataattcaaaaataatatattaatgattaactaatccaaaataataaaaaaaaatactaattaaaatgctttccaaatttaaaccatatgtgttccattaagtctgcttgaagattacagtgaatgtttctgtcacaaatttaggcatttttttgaagcataaagtcaaaaataggtccatggcatacttcaattgttagagtgtcggtagagccttaatcataattaaaatcaaataactcataagtttgtctttcatcttgactttcatgttgtgaaattaaatacatgaatacataatatctttaagagcatctctttaccagaatcgagttggacctcgtataatggcataacgagattaaagtacttcaaatgcccgctcaacatctttgcgtacagcttcttgaaattgggcgaataattttctcttctcaagacaatgagattgttttaacaaatgtacctcattctcggtagatactatctgctagataataccccttgttgtactgtgtgccatttatcataaaatcaactcttggagcttgcccctgtaagatgtgagtgaataatggtgattggtttaaaatattgagatcattataggatctcgaaacaccaaaaaaatgcatgtcaactctaaaattcttgtgatgcgtctgtttcaagcatgattgtcggtgcaccgtgatcacctcgtgtaaattgtccttcctatgcaattggaaatttttttcatttctaatgcatacaatcaatatttcccaatatgcctagaaagtcacgcctttctcccatttaaattaagcggtgaatgtcactagcattgggtcgtcttatatattctgccccaaaattttgttcactccatgaacgaaattgagtagacattcaatagcagtggtttcaccaatttgaacatactcatcaacgtaatcggctggtgctccgtatgccaatattcacatatcagcggtacacttctatagtggtgaaagcctttttctaccaatttcatcaaatctcgtttgaaaatactctgaatgatgttctagagctttcattatgtgcaggaaaatatgtctgcgcattctaaatcttctttgaaaatgatattttgtatacactagctcatcagaaaagtagtcacagaataagcattcgtgtccttctacacgacctctgtcaatatgagctctttttctttctcgcattcttgagctactcgcaactaagtattcatttaaaaatttctcatcgaaatcgtcattacattttgaaattatgataacagtaacactcatattctcaaacagatcaggagagcttgctgaattcattgcccaatttttagtagattataattgagaatgttagatgaatgagagtgtaaagtaatgtatgaaatagagaagtaagtgaaagaaagaatagaacttggtatatatatagacttggtgagtactttgatgtgttaaaatatagtcgttaaaatataaccgttaaagtagagctgttaaaatagagccattaaaatataaccgttaaaatatagccgttaaaatagatttgttaaactataaccgttaaaatatagacattaaaatagagctattaaaatatactcgttaaaatataatcattaaaatatagccgttaaaatatagcaattaatatgtagccattaaaatagagccattcaaatattatcgttaaaatatagatgttaaaatatagttgttaaaatatagccgttaaaatatagctgttaaaatagagccgttcaaataaagccgttaaaatatagctattaaaatatagctgttaaaatataaccgttaaaatagatccgttaaaatataactgttaaaatagaatcgttaaaatatagtcgttaaaatatagcctttaaaatataatcgttaaaataaaactgttaaaacatagctattaacaatcaaaatgtgattgttgtaatggaatagtttaaataaatgataatttatttaataaaaatatagttattataattagataagaacaataacatttaaaataatatataacatttagttaaaattaaagaattacaaatttaagatattagtcttaatatgagctaccaaatttttgtaatctttcttttgctcaagagtaatatttgattggttaaagaatagataatccatgtattttgccattactttttttcttgtatcaccaccagtttctctaatatatttgctttccattaattaagatcataaaatgtagcaagctgctcatcttgctcttcatttccctttctctttgtcgctttttggccaatagggcgctcttcacggacttcgtgatcactgatgtctacattgaatgatgaaatatatacccgtgaatcagggccgactctgagttgaaatgggccataggcaaaaaatttgtttgggcccttactataagataaatggtattttcaaaaattattagaaaaatatgtaaaaaaatatttttttatttgggcccctaaaataagtgggccgtaggcgcctatgcctaggaccggccctgcccctgatcttgacacctttgctctcttaaaaccttttggttggtacattgtaatctattttggctcatcttttaacaatctccaatagtctacaagctaaaaatatgaattgttattttcacacttgtacatctcatgtgcattctcaataatttgctcattagaccaaccattgtgatgtgcttgttatacttgcttgtaacacccattgaaacatgtcacattttgattcatcttgttccaatggtctttgcattgctttccagttctttattgatcatctttgtagtgggtgttgaagtaatttgcgatctgaccccagaaatttgcaaaagtttggtcagtttccacgacagcattcttagatgtattaagtcatgcactaatcagaagtatatttgcttccttgcgccatttaggtttatttttttgacttggctcctcttcactatgcagaaccacttttgctaacccttcaacaccatgtgttgaatgggttttagaaacggattgtgtcgacgatccaacattcaaagcttgaaaccattttgggttggtttgaaaaaggtgagggaaacacatgtgggagtaaatgtctttgtgtgaagattggaccatgttgggaagtctcaaaagagctaaaattttggtaaagaaaagaagagattggataatttggagaattgggttgaattgagaatattagaaattaaaattttgggggttgttaaatggagggttatggacttatggttaaattaagaaaatagaaaatttagattttgagagttaatatatggaaaattttggttaattggaaaatattgcattttgaattttgtgggttggtttgtggagaattttgataatttggttggattgagaagattttttttttttttt

SEQ ID NO: 3301 - DNA, 1942 bp, Cannabis sativa
cccccaaatcagcttgaacactcttgattggcaagtcaaattgtttttcacaaggcttttaaacttgatgaacacatcaaaggcttgtcctttagttgttaaaggaaagatccaacaataccggctatagtcatccaagaagtgaacataatacttgaatccttctttagatgtgatgtgtgaagggccccataagtccgtatgaatgagagccaaaggctttgtggctctactgttggaatttgggaatggtaatttatggcttttaccttgatgacaagctttgcagaattgtaaagaggcaatagagccactgtgggaaatatgtggcaagattttggccaaagtgttattagctgggtgtccaagtttgcaatgccaattgtttatatcattagatttagaaacttgaaaaacttgacaattggaattataagtggagtaagaagaatctgttttattaatttctgcattattacacaagttcacagattgattacagatacaattcagcttgtcattagcacttgaagcatcagtaagatgacattcgatagtagggccatttggatcaccgagttgatataagcctcctctagctttccctttgagaagaactgtccctgtgagtttgtccttaacaaagcaacaggatttatgaaattcaagaaacacatcgttgtcgctagttaattgaggcacactgataaggttctttttcatggaagggacatgaaggatagaatgtaattgtattggctgagattgggaacaagatggaagggtagagtgaccaatatagagataacaagtttcttaccattgcctatggccatggtttcaatccctgtgtaaggagccgtagtgtacaaattctgagttcccatagcaacatgattggtggctcccgaatccacataccacgactcatcatcaccaagttcaggaaccatgttggtgagaaaagcctgaagatcaaaaggaatatcagtttcaactaaatgagcttgggaagggaagttaccgtatctgggagtaacccagttcttgtcgaaccggtagtgacacacagtagcggtgtgtcccgttttgaggcacacttgacaaacaagaatgtgattgccattgccacgaccaaagaaccgaggtcgagagttgtcctgtgcatttcctcgatcatttccacgactcaaagggcgataattagtgtttcttggttgttgaacagcaacatttgcttgaagcttgatagacatatcagctactgagttgtggtgctcaagacgggtttcatgagagagaagaagtgcttggacttcttcaaaggaaagaaggtcactgcgggaggtaattcctgagacgactgcatcaaattcaggccccaatctgttgaggagttgaagaatcaaatcttggtcactgactggagatccagaaattaagagggcatcggcaatggactgggctttatcaacatagtcagatattgatgaactggctttttggagatgggagaattggcctttaagttggaggagacgggctttagtctgactagagaatctttgttcaagggcacgccaaacagaatatgaagtagtgaaggaggcaacagacgcaagaaccggtttcgacattgatgaacgaagccatgagagaagtaattggtccttctttttccagtgaccatactcagggttggttgttccattgataaagaattatggggggtggacatcggagaacaagatttggtcaagatcatgaccaataactgtgggaacaacttgtgatttccacgagaggaagttctgtcgatcgagtttcagcgtaagtgaagcggagagagaattggaaaatggattccatgtggagttgggagttgcagcggtggtggtttgcacagcaggaggatcggtagaagaagattccatggacgtga

SEQ ID NO: 3302 - DNA, 1431 bp, Cannabis sativa
accgagaattaaacttaaaatattccaatttccaaaccctaaacccctaactctgcgcataaatattcagagataagaaaacaatgtgttcttattctactgagtaaagctaagctaacccactgagctttctccactttcacaagctttctcctttactttcatcgccaccgtcaatggaatctctcatcctaaagctccacgaaatctcagccgttaaattcggtaacttcaagctcaaatcaggcatttcttccccaatctacatagaccttcgtctaatcgtctcatacccttctcttcttcgtcaaatctcccaaaccctaatctcctcaatcccttcctccaccaaatacgacgtcgtctgcggtgttccttacacagctcttcccatcgccacctgcgtttctatctccaatgacgtccccatgctcatgcgccgcaaggaggtcaaggattacggcaccgctaaagccattgaaggacacttcaaaccggaccaaatctgccttatcatcgaagatctcgtcactagcggcgcctccgttctcgaaaccgccgcgccgttaagatccgtcgggcttacggttactgatgctgttgttttgattgatcgggagcaaggtgggagggagaatctcgagcagaatgggattcgacttcatgcgatgattaagcttactgagatggtcagggttttgagagcgcatgggaaggttggcgaggatatggagggtttggtgcttaggtttttggaggagaatcggagtgtggctgtgccgaaggttgagaaatcgccggttatggtcagggctttgggatttgaggagagggcgaaattggcgaagaatcctaccgggaaaagactgtttcaggttatggcggagaagaagagtaatttgtgtttggccgccgatgttggtaccgccgctgagttgctcgagattgctgaaaaggttagtagtcagagttatttgaggaaattttctggggaaaataatgctttttcttacataccaaacagaacaagtaaataaattttggcactttttctgctaccgttgaaatatacattaaaattgttaaaaaatgttaattgaaaaataagaaaaattcgcacgtgtgagatgacaggacacacgtgtttaagaatgtcaggaaaaaagattttatgttccaattaatgtcggccaataattgtttgttggttctaattttttctttttcttattatataaaactgaaattctatataattaattaccaatgtaatttaaattaatattcatttattataaattttatttgtgactttgtagtttttagaatatagaagaaagaagaataatgtagaaagatagttgttaatattttggggcaaaaatactaagttattaggtgaaatttgataccatgcaagtaggggcggac

SEQ ID NO: 3303 - DNA, 1432 bp, Cannabis sativa
taaaacatgacattttcagaaagttgaatttcaaacttgtaaatattatcattgaaataagagaattgctaaaggacactcatggtgtctagcactcttatgagatataatatagttatttgtgtaattcaatattgagtaccacttattttaatttaataaaaattatagaaaaccgctaactgattataagatgacatatcatagaagtactaagcattttggtgtcccataacaatactcttaaaatatgtaaaaaaaaaaaaaaagcaagtgttgggaatttattcttgaatccatacacaattcactgaactaatcaagacacacaatgtagatcgaacttgatcttgcaataaaattcacaaaatctattatcaaattgcataaatcatgtcaattgaattgttaacttgttaatgttaattaaaactataattttgatcaagaaccacagtccaactaatgaattaaagatgcaaacaatcaatctttgacataaacatgtaatgcaataaaatagaaattaaaagatgaaataaaccaaaaaagtaaagatcaaatgcaaaaattttggcaaggttctacctaagcttagacagttacaaaaatagtagagatttctaataattagatatgtcacataggatttatttagttccaactgaagtgtctttaattatgtcttgagtgatcaagtgtgcaggggctcatgataagttgtccttgcttatgatggagttcaattcaacagagttgctaaacaattaatttcaacaacatttacacaaagacttttggttcaaactagaacaaattaagtgctataattgtctaaaatttagaaacagtgcccaatttggttttttgttggtcaacaagtctaagagaaaagtcaagtaatacataccagaagcttgggttgtgtttggtagatgggaaaagtaagaaaataaaattttagagaaaagtcaaaagtgagtgaaaatgagtatgtttgtttgggtcaatatgcatggtcaacaagtcaagagaaaagtccaataataaatatgtggtatgttatttttgtaatatgcaagtaacaagtgatacaatttaaagtaaaatttaaacattaaagtctaatttaaagaaagcaaaaataatggtaactaatgtgataatataaagtgatgaaaaatatgagttgaattactaaattcaactcgaattttgttaactaagaatataattaaagcacaaattctaaaagttgatgcaaaactaggtaaatattacataattatatcttcactaattgcaatcttataagataatagctattcattatttcagataaaaacatagttcactacactatactataatagatttatgagatgaaataattatgtaataccataattatagctttctaattgagtagtgt

SEQ ID NO: 3304 - DNA, 664 bp, Cannabis sativa
cctggatattggggtattttttttgacctggaagatgactgtgttgaagtcttggagaggaggccatggcttattaacggtaaacttctcattgtcagagaatggccagatgatggtctttggtacaacgttgattggggaaaggccattttctgggtacaagctactggtttaccaaccccttttttaaacttggtgaatgcacctagaattgcagctaaggctggtgtgtttaagggatctgatgtagtcgaccaaagaactaccttgagaagaggctttctaaaattccaagtggagatttccactagacatcaattatcggcggggttttttcttgatatcaaaagaggtagaaaagaatggatccaattcaattattacaagctacctaaagtttgttttaactgtggatatttgggtcatgacaagagttcttgccaaagaccaactttttatgcttatccgccagaggggaaagcagttcctgcatatgggccttggatttgagctgaatcggcggtaatcagctgtttcaacactataaaccagttagattggtttagaaaggaaggaatgatgggtccctcgaagccatcccagtcgttatcggagaagaggaggttccaggtggcggtggatgaggtctccggcaagggtaagg

SEQ ID NO: 3305 - DNA, 1056 bp, Cannabis sativa
tttaacgtcctcaaatggcccaaaaggattggcgcactccagatttgtagcgtcatcctctccctcgtcgttagtcattgaggaaacacattaggacatgcagcaggcgaattccttagttggaatttcaaagagggcgtgatcgacacccttaggcaagccatggtctctttaggctaacacatataattgttaaggatatattttatgaaaaaacctttcttgaacttataaaggagttaccgactcgcccctaaagcaggttcattagttgtagaggaaaggggcacaaccttcttcgatgttatggggcattttgaactagaacatgccttggagacagtcccctcatgtcaatcaactttgtttgacatcggggtcagtatttctttaacgttatattcttcatgttgagggttagcgaaggattcatggggcagactaggagaataagctggatcccctcaagaaagtggctacgtaattgaggcaaaaggcaatgtagctagtaaaacatctataaggccaacctccttcaggcatcatggagttatgaggttcttggccaccctcacatcctcaggaaggttgaaatacttttgcaacgcacccaaggactcactgctcaaaaaaagaaccccattggtaactaggaaaacaaagtgtaagagtaagttagcagaaatagccgtaagtatacaatttagaaaagcaacatacatagcgctatccgtacctaaaaccctaaattcaaaggaaacgccagtgggaatcttgtaattgatgaagaatgctgaaggcttaaaaggaatttttgaaggcatcctagccacccctttatccttgggagatggaatcttcaagaagtggcaggtgctaggggatttgtgggtatggtgtatgttgaaaatagaggggaattctacggccgtgggaaagcaaccattttcccctttgaaggaaatggcgaagcatgtcaggatcacgttagatattggagcaatttgaagaggcgcgaggccaaaatatgccaatctacgataaaaagaagatgga

SEQ ID NO: 3306 - DNA, 1075 bp, Cannabis sativa
ataacaagcacacccaaaagcttttagaaaggcataatcgggtttgtgatgaaacagtacctcataggatgttttgagatgtatgacaggtgagggcagcctgtttattgtgtaaattgcagcgacaaaagcctcccaccaaaaactcaatggcatatcagcctgtgcaagaagagtgagcccaatatccacaacatgcctatgttttctctctgcacgcccttgctggtggtgtgtatgtggacaggggtgcctaaactcaatacctaactgttgtagcaagggtttaagaggtctgaattcacctccccagtcagtctgtaaagctctgatttttgtttgaaaacttctctcaacataggcattgaactgcttgaaaataggagtaacatcggatttaagtgtcataggaaaaatccaagtatatttggaataattatcaatgaaacttatgtaatatttgaagccttccattgaagtataaaatgcaggtccccatacatccgaatgtactaattgaaatacagcagttgttttaggtacaaaactagaaaatgacatactatgaagtttgccaacatgacaagcttcacaaaaagaaagatcattacatttgattttagaactgaacctatttacagctgttcttaggaatttatgagagggatgcccgagtctccaatgccaaagttgagattcaaaagtagcagtaggtgagtctttggtgcaagtaaaagcgcctagtgccataagagaattttgtgatgtggttgacataggcaaagcctttgaaagatcaagattgtatagtcctcctttaagagtaccccgaagaagtacttggcccgaaatcttatccttgatgagacatgaatgagaatcaaaaagcaagattatgttattatctgtagtgatttttgaaatactaagcaagttcttagttatagcaggggcataaagaatatcatttaaagctaaagatttattagagacatttgtgcaaactgaagtagaaccaatttttgaaataggaatagaagagccattaccgactgtgattttggctttgcctttg

SEQ ID NO: 3307 - DNA, 1011 bp, Cannabis sativa
tcatcaaaattggccaaatcgatacatccaaatttgttgttgcgatttgcccattgagccacaaagtgggctacaccattgcaggttctaggagtccacacaatttcgcagaggttaaaaattgctgcagtagaacagaaattgaggactttgtcttgtatattgtaatgaagcttatgaatttcggatagtttgctcttcaaggctgctaccgcattgagagaatcgcattggaagattatattcctataacacaacccagctgcgacagttgcaccttcacatacagcagccacctctgccggtaaagcttcacaattgttcagccgaaaggtatggattcccaggatagtaccattatgatcccgaaagacagccgctcccgtggactgattactcccaatggctacatccgagttacaagctatccatccctcaggaggggatttccattcggcattgcaaggatctgttgggttggtggatgggaagatttcttggattctgttattgatggagttgattatgatagctaatgggatagcctttttctcatgtatccgcccattgcgttctctccaaatattttcacacactatcgcagtcccttccataaaagtgttgaagtcgaggaaaggggggcggttagcagcatctgaaaaccattgaaaccaactatcccaatttgatacggtcagttcatcagctcttaggttccaacagcacccaaaccagatagctcgagcataggtgcattcccagaggaggtggaagctgctctccacagaattagaacaaaatgtacaagaagtatcttgaatgggaataagggagcagagttttccttttgttggaagacaatttgcaaggatcttccaccagaaaaattttaggcgattatgcatctttgccccccaaatacgattccacttcctggcctcctccaagcttggattaaaattctttaacaatttataggccgacttgattgaatattctccagagggattc

SEQ ID NO: 3308 - DNA, 966 bp, Cannabis sativa
tctcaaattaaatatactcagtcaaaagtaatacatctcaatcaaataaagagaactgcgacaagaaattgtaagctcgccacatcaaaaatttctatttctaaatctattttctttctctacctaaatttcctaacatttagttaaaatctaaaagtcttccacaattcaaatgagcacccaaaaaagaaaatcaccttcttaatcataagttgtatataatccactgctgctgatccttccagtgttaagtaaagtcaaagttgccgaagaaatatcaaatcaatatcaacacaataaatatccaaaattaaaacttgaaatacactaacaatgaacgtacaatgaagttttgtatatgcaaaattcatgaaacagaaataaagaacaagaaaaagatttataatatgtacgatgagaaagattattacagttcaaatctatagaatattgggcaaaaatatccataaaaaattaaaaccctaccagagtaatggagacaaaggaagatccaaaacttaaatctaaacatatacacataccagatttcagtggaaaattcgaaaaattgttccttcctttgtctcatggatcttttgaccaaatagagagtgaagcaggaatgagattagagttaaagaccagagcaaaaacaagatggagaattgaaaaaaaaaattcttacagccttaatattccgcaaaccagaattgagaatgataagcttatgagataatatgtttgtttttctttgaaattgaagagacgaaacttttttttaccgccttaatatttcgcaaagcatcccgcttttattttaattttttgcaagcccaaaggttttgatttttatatcctctatggtctcggtttaaaaccgagacttaagatttataatttcttttaagtgtcagttttaaattgagaccaaaggagtattttgtttttaattttttctttttaaat

SEQ ID NO: 3309 - DNA, 963 bp, Cannabis sativa
gtaaaataatttccaacaagaagcccctcagggagctcttccctaagaaaatacttggaattgagatcaaaagaaaaaggcctgatttgattatgttaacacagcaagggtatttaaagaaagtcataatgaagttcaagatgtatgatgtcaaactagttgtaactcccttagctcaacacgtcaagcttactaaagatcaagcaccccagactgaagatgaaaggagacacatggatagcataccatatgctaactatgtaggatgtctgatgtatgtcatggtctgcacaaggcctaacttggcctatgctatgagcattatcagcaggtttattactgatcctgggcctaagcattgggatgttgttaaatgggtaatgaggtatgttatagggtctttgaaccttggcctagtctacaaagaagatgagaaaaaaagctctgaagtggaggactttgttgactcagactatgttggctgcatagatacaagaagattacttacatgctacattttcacctagagctggatgcatccgcttgaaatctaaccttcaaagagttgtagccttgtcatctacagaggttgagtatatggctgcaattgaagccataaaagaagcaatctggttgaaaggccttaccaatgaacttggatttagatcagaagatgtgactgtccactgtgacaatcaaagtgctctgcacttgatgaaaaatccaatgttccataacaggtgaaaacacattgacataaaattgcattttattagaaaaatcattgcaaaaggggaagtgcaagtgaagaagatttgtattcgcaaaatgtatcactcaaaccaagtttagacattgtctaaacgtggtcaacataaaataaattggatgagtttctcatcctctacagaagttcagcctactcaaatcctaatctccaagtcttagtatctataccaatgt

SEQ ID NO: 3310 - DNA, 781 bp, Cannabis sativa
ggggggggggtgggggacttattttcttttatagttagcttgtgcatttattttcttttagttgtttgtttccttgtgcatgtgtaaattaagccgatgatatggatgaataattgctactgttgtcacttgtaggatggattaaaattaaactctgtgcttgactttggattaacttggttgcctcttagaactagttgtatcattgtaaatttttagtatttggattatatcatacatattttactttgggttgcagtaagattgatcgaataaaatagaacttgtatgaattttttcttgagacgaaatcctcaacaatgcatgttttgaaaatgatttatgcaattttctttagatagtttggccctttaggttgcggtaagattgattgaatagaatagaacttgcatgacgacgaaatctttgacaatgcttgtttagaaaatgatttatgcaattttctttggatagtttggccattttcaagcttacacctttatttttattatcactagtttacgtatataaccctcaatttgctcaattatttttaactactttattaagctaactttgaatccacttactatgttttccttgtccttcgaattatacataagcttaaaaataagtttgaaggagataagttgtgtgtgggttaaattatttttataagtgggtgatgagacaaatttgtgaataaaacatcactattttgtttgtttcttgttcttcaagagagagagagagagagagagagagagagagagagagagag

SEQ ID NO: 3311 - DNA, 688 bp, Cannabis sativa
gatgttccacctatacttgatttagctccttgtaactcaagtgcggaggatgatctagtgtggcattatatgcccagttgtctgtattcggtaaatagtggattttaaagttttctattttaccctgatcatggtagaaagttcctcaaactaggttatggagaaatggtggactaagttatggcatcttgaggtccctcaaaagattagaaatttcatttggcgtgtttgtaaggttccggccagcgcaacccttcaagggtgcgaaatgaatatagctacggtctactgctggtatggaaacaatgacaaaattatagctcataggttttttttttgtcctacaagttctcacattaagaaggcattctcattcaagggtcttctttaaccgaatatagaggatcctactgatcttctccttgcagttcatcaacatttgtccaggtgttgttggctctcattcgtcactttaatttggctcgtgtggaattgctggaacaagaaaataatccatatttttcttccaaataatgctcatttacaataatccttcctgctctaaacctcatatggtgcctagatcaagtgggataatctgcccctggttgcttttgtatcaatagcgatgcaagtattctggtcaaggagaactactgtggttttggagctattatccgagaccatc

SEQ ID NO: 3312 - DNA, 720 bp, Cannabis sativa
taaaccacgatcgaattcattttaaattaaaactagaaaaatctaatatataaagtatgcgattgagtgtgaaagggaagaaggatttacaagcatcgtcgtgatgaccagaagaggaaaagttgcgcttaggttgagcaggggctcgagagccaccgcgcaaggcggttcttaaacccgatcggaccatagccatagccatatctcagaagtctttctctttctctctgttcaattttggagagcgtagaatgaatgaaacccgactctttttcgcaacgactccaggcagcgaagcccttgctagtaacaaatagggtcatgctcagccggtccaggcccactcagactggcccaggcccaggcccaggcccatacttaactgataacgttattgcaaattagaccattgtacaacaaaaatagaaatttgtccccaatttaaatttgttttaaaatgaccaaaattatttaattgataagagtactttacttttgattgggaaagctattttcattctaaaacaataaattaaaaatagaaaagaggatttgagtttttatttagttaacttatttaatttttttttttgaattcaattaacttatttaatttgttgctctatcaatttctttgattattatagggaaatttcaataatcatgcttaaaatttaaaaagacatccaaataattaataaatttcctcttattacatta

SEQ ID NO: 3313 - DNA, 719 bp, Cannabis sativa
aaggggcattaatgaaagtgatgaaatagataaaaatatgtcgtggaagtaagtgtagaagggatttgtacattgctatagtaaatgcggtggttcacaatatttgggaggttggtaatcatattctatggaatgtatatgtatataatgtaaatttacttgtaaataaaatcaaaagagatatttgttttaaattttctcatttttaaagagaaaaaataaataaagatatagattggttgcatacttggagtataactagttaggttggttattctaaattttgaagttgtaaaaaattgtaattacttaccaaaaaaaatattttacaaaggtcaataattgtcactaaattataattggtgtttcttgctctcacacaatttccatacaaattgttatccttgactttttttgtcgtaatatttgattcatatcttaaatattttttattatgattccaatcaattaaaaaaaaatcagtaattatatgtattaggattgaacataaaatttaaaaaatcgttcaaactgttcaaatcgacctactaaatactgctaaagctgaaactgttcaaaccaaaaattaaaaaagccgttaactaagaaaaattacccttaaacggtcaatttttatttcgatagcaaattgaccaaaaaatcgaaaccgaccaaacttatataaaatataaataaatttatatatttatactatttaa

SEQ ID NO: 3314 - DNA, 692 bp, Cannabis sativa
aacgctaccccccagcactacgatcctccattgaggctaggccaacctcaatcgtctcgtccttcagtcttgccgaaaatacccctagtggggttcacattcccaaggaagaatgttcctcttaatcctgtcgtcgtgcacaaggagagggaagtgaatagggctctaaagaggcgcctaaatgattgaaagctgcaagtttgtaggaaggcggcagtgctgtcgtcgatccgcaaggctgaaatctgggacagtctgcaggctttgccatctgcaaggccgactatggaggttgaggccttagagaggtagctggcatacaaggtggggagagaggctgccccctttgccgtccagcttttggacccagtggtcgggagcacctcagagctacccatggagacctaggctttctacagtagcgcggatgctttcatgcaggcccactctgccaagcaatgggcagttggggtaaggcctcgatatactttttttcaccccctttttttctatgttctactccctgttctgatactttggcctttctacttcggcctatttttattggtagccttgttggcggagagggctgccaaggaggctggcatgctggtggctgaactggagcaagttaaagcagataactgtgatttgcataatgccaatgtgacccttctgactgaactcaagga

SEQ ID NO: 3315 - DNA, 1355 bp, Cannabis sativa
tgacacaatttgttaaatctgttagatgataagatgatgacgaagataaaaagaaatacaagtattaatagatgagtgttttctctctattgtatttaatgtctgagttaattttctaacccccgtcatatgagaatgtggtatttatagcctctattggcttaagatacacttacagaaaatgcatcaccactactattacctccttgtttttagatcttgtacgaggcgtggttgtatgctattttgttgcacgccttttcttttgttttcccatctaacgacattctcgtcaatatacattcaactcccacctcacacttacaactcgtgaaacacacacacacacgtatgcacacaatgtacacacacatgcattcatggattgcatgtgagcccccaaccagcacacacaacacacacatacactcaacgcacacacacacctgcatacatgcatgcctggctcgcatgcgagcccccctcatgggctcgcatgtgagcccccaacacactcacacatatgcacgcacgacctcacctacttacgtcctcgctttttgtcgttctcttgtttctgaatcactacaggttagtcattaaattgcttggacgcatcttgggaacttaagtatcaatggtgactttatgaaaggtttgccgagttggtaagcgtgtcaaatgcgcttttgttagtccttcggtgattagtaaactaacctcgaaagttagtagcgctaatttttggagttaacactatctattatcctaccactacccttctaaaggataatacttctaagaaaacatctttcatttagtgatttattttatagggcaaggaagttttcgaagctggtgggcgatggctcattagtgatggtacccaagtttcagtttacaataatcgttggattcctagtatggatggtaacaagtgttcttcctcttgatgtatgcctattatggtaatgtgaactctttattgctaccgaatgggagttgaaatagttctttagtgttaagctctttttctaataaagaggcgctagctatctttgccattacttgtgatcatattcctattcatgataacctggtgtggcactttgaaagttcatgtctttattcagttaagagtggttattagaactttattcgcattctggatcttggttaaggctcttagtggtaagactggtttgtggaataaagtttggtatttaaaccatcctgcaaaagttagacatttttttttttggaaagtctcccacaattggcttccatcctatatattctaatttgagcaattaggttcctactgctaccgcctgtccctatattcatagggcctg

SEQ ID NO: 3316 - DNA, 936 bp, Cannabis sativa
agttagaatggacaaagtcgggagaaaacaaggaaaaattcaatctgactttggcagcggcgagcatgaattatggccgtgacgagcaacttccagaaaggaggttttcaagcttttaacggtcgcagcaactagacctttcgcgttcgcgacgatactttctacgcaaaattgtgaacaattttgtaatttgacaatttttaagtggaagcttgattctattcaagggagttatgaattttgagtccattatttagaaaccaaacctagaaacaaaaagaggacttccaaaagcgacttgtggtgatctgagcaatttctccatctagttctttcttctctcttttagttttcgtatgcttatttctgttttaagtttgatattggatttgatcatagagattatgaactaaactccctagatttgataaatgttgattgaaatcatgccataagttaatgttaattgctatttcttctttcttgattataaatttattcatatttatacttaattacatgtttgaaattgatcactttaggtatgattcatgatctcaatacaaaacttaaaaagtgagtgttgagaatgttaaaattaaataaaccttgattttaatacgaaacgagaatatttgcataacctttgtaatttttaaattattatttaatgcggattatatgctaatctatctcaaagatgaataaataacacatgatttaggacctaagagatctaaaaagaattaagttaattatctaaaagttcaaaaccccttatgattttaagatttttttttcaactttatgagagagctacatttgaggaattgaataatatgcttcaggagtaaatatctaaaagttcaaaacccccacctaattggggtagcataaaacaaggccaaattgggaaattcataaaaatcaagccaa

SEQ ID NO: 3317 - DNA, 1001 bp, Cannabis sativa
tgaattttaactcctttttttagtttcttttccttttctctcttcactgctttgttttctttattttctgggttctatgcatccttttccttccttttttcattttcaatgaatatgaattctgcattaaactgttttaattcaacgctctctctcactaaggaggagagctctgtttttgcacttccaaaaaatatcagtactaattctgtattatgctttgctcatgtggtctttgcccgtctcataaccaacaatgtcctgcagaaactgagttttcttaagaaaatgtctaaacattggagggtcgatttttggttacaattttgacttatgatgatgatatcttacacgttgcttttagatgtgcatgtgacaaatttcgagtattacgcaaagagccttggtattttcagaatgaccttattgtcttacactcaccatgtgttctgcaaaatgtctcaaaggatgatatggtatatacacatttttgagtccaaatttaccattacctttcttgagtaagacatctaaactagcagaggctcttggaaatattataggtgaatttgttgaagtttgtgaggattcaactaatgaaggctggggaccttttctaagggttcgtgttaagatttgtattactaaacctcttgttcgtgggtgtataattaggttgccaaaaataagcgatgaattttcgatagacttttgatatgaacgcctacctaaatttttctttgagtgcggtcgactcggtcatccgtttgagaaatgtcactcttttattgaacaaatggacaacgaaaatgataatgatctaccttttggttcttggatgaaaggtgcaaagttaccaaataatggatatgatcgctaccgaatagatttctcgaaaggaaatgtctggcctttgctaacacgacttgctagaaacactatatcatcaacaattactggtttatcttcttctagtcagccacatccaagacacccttatg

SEQ ID NO: 3318 - DNA, 932 bp, Cannabis sativa
acttcctccatcacccccatgagaacgagcaacatctatcatatatgatcaacacaagtattagaaactttataataatattaatcacattatattatagtaccaattaacaatatacatgtaataaattaccacttattcatcactataataatcatcatcattataagtttcttctaaattatcagttttagggttgtgctcattatcatcttcatcttcctcttcctcctcttcttctttgtcttccttcactacttcttccatgtcttcctcctctacttcatctatgtcttcctcctccacttcattcatgtcctccttaggtggattattatctgtatccattaactctaattaattgattgtaattttttttgttgaattaatacaatcctgagttctagtctttggctctagaaattgttttatgtcttcacctctgttcttgtagcatttttagatttgagtttcatagtcaaaaagatcttcttaatttagatatcattttgattttatttgtaggacattgaatatcacacattgatcatcaaattctatttgtaggacatttgcatcagttacagactaatggaagcccaaagtcattttttacaggttaatacaattagatatgagagtttcaggtattatttgtgtcaattatggctgattcaaacgctcaattttgtcaattatagactgatgcaaaaacttaaacaaatatgtctactgaatatatgtaagtttattgaataaatgcaaatgactaatgtgtcactttgtaatcaacgcaaataagcaatattgcagtaatgataacacaaactaaacctgccaataactaccacccccaaacctgtccatgcaaaataggaaatacaagctaattttatagtaggtttaataacattcattccaaacattataaa

SEQ ID NO: 3319 - DNA, 628 bp, Cannabis sativa
ttagaaattttgcctcaaattataatttagcgctacgtgtaatttaatataaaaataaaacatatattttagaaaaattattaaactaaaaatccactagcgattacataaaaagaggtaaaattaaaataaatttttttacttattttttccaaattaattacagcctatgacatgataataatctacactactacatcctcattctgttttgtgataaaacttgataaaatgactattttacaacactgaaaatattaatagtttaaatagtgcaaaggtcataaatcctaaatagtttaaatgtacaagatctaacatgaaaatataccagcaataatatagatatatataattttgaagtaaaaggataattttcattaaagagaaaagtgtgtcattacaatagcatgtaattcaggcaataaatcagaagcttgaaaaacacggcccaaagaggaacaagagctacgcgtcaaccagtgggcaacttttgtttgcatatcgttcaacaaaatataaagaaatattgttaagagtatgcacaaggctcctacagtcatgaaccaacaaactaaattttgaaagcatatgcaaattacactaaatagcttggacacaaactaag

SEQ ID NO: 3320 - DNA, 870 bp, Cannabis sativa
cagccataaactgctcaggcttcacaatcggatctctaatgctgccggctttggcggcctcgtcctcaaatctcacgttcacgtgcgatggctttatgtcgaaagagaaatcccgagcctgaatgtcgttgacgtgacctaagggcatcattccgagcaggaagccaatcaaaaagaaaattgcccacttaccgaaggctttccccagccccggaggtcccttccggcggaagttaagagcgaaagcagccacgacagaaggaagtgatgagggcgagtatttagaagttgcgaagaggaggttcttgctagaaggagtagaaacggaggcgccattctggtagtgacggtcgtggtaagccggtgaaagagttcttcggatcgatgccattgttcttgatgttgctactattgtgcagtcgagaattgagtgctacatgatccaaaaaaaatccaatctccactggttttcaatcaataaatgggcaatgatagatgtaaatagttgataaaactttatgctccaaggacgaggaaaaccaatttagaagcggctaaatatttctgcataaaggaaatatacatcaaaaatccaaatcaatattaaatataaagattacaaactaacagaagctaaacaaattaataacagtagtagaaagactgaatatcatatgttttatatatcatatacagacaattaattactgctctatcctcctcacaaacctaatgttgaatttgatcagtaacctatggtcattcatcaactattaagaatgcatttccttacagaatcattacctttgtcgatttttagataattaaatattaattagcaattcagataataagaatctaaaacataac

SEQ ID NO: 3321 - DNA, 1221 bp, Cannabis sativa
tatatttaagagttttcggggataaattttcttcattctcatttcacttgtacttaactttttaaattcaaattttagcgaaaaaatctactaataactttagttctgttaaccaaatttggtttctcattcaactgtatataattatgtacacatggcacattcttattggtttagatattttaattgtttagatattataaaaaaaaatagttttaaaatcatttgaaatatttaaaaatcaaatagaaattaaaaagttatatatattaaattattttttcactaaaatttatttctctcttttctctcatgctcttccctttctttttggttcttagctagatctgaaatctccatttccagttccccaacccgatgcccatctccgattgccaccatcctaattcgatccaaaaatactaagtctcgatccgtccccaaaattcccaaagccctctcaatattctcactctattgctcttgtattggcaatcaacttagttttatgatttgagtttggaaggcttagagaatttctagtttattttttgtatttttatatttttttttcttatgatcgaagaaaaatattgggtgtagaaaggattttttgaaaaaattaatttttttaatatatttttattttaatttcaaatttttttaaaatactttttcataatatttaaataattacatgatttggactaatataaatatatcatgtgtatatgagggtaaacataaatattccaacttaataattaattaagaaaaatagatagaaaactaaatttataatcggactaaagtttggcaagtttagccttaaaaaacgttaaaaaaaattaagtacaagtaaaataataatcacaaaaaatttatataattactttgtataagtcatacctgatttttgtttgctttgattagatgctttggaagaatttttttcttctttttttttaagaaattataatagtaatttatatattatctttattagctctcaaactaaaatgaagatagactttttttttttttatggaatataatatattgctgcatttatctcatcttgaaattggttgaaatccattgcattatttataggggtagcggaaaattgaaattcccaaactacccttacataaataagtagttgggtcacattattgttatgcccttgtattttgcatcatatttttttttttttttttt

SEQ ID NO: 3322 - DNA, 726 bp, Cannabis sativa
gtttccaatcgtgccaagaattatgaatgtgataagtttgaattaccaagggcttgggaaccaacggagtattcaattccttagagaacttgtttctcaaaagagacccaattgttttttttttttttttgtgaaactaagtgtcataaatcaaaatttgagggatttgcaagattattaaagtttgacagcatttttgtggtggaggccttgggtcagacgggtgggcttgctcttttatggaaaaataaggaggaaggtgctttgtttggcttttctaataaccatattgatttagttatttcttctcctcataatagagataggagattaacgggtctttatggtgaactagaccgtaataggcgccaaaatacttggaacctttttcgcacacagtccaactaattagagctgccatggtgtgttattaaggattttattaatacaatttgtcatgaagataaacgtggtggtagacaatatccacaatggtttataagtggcttcaatactactctttggcaacgtgggataactgaccttgagcttcaaggacatcccttcacttggtagaaaggccaggggtccaatacttgggtgaaggtgtgtctagatagagctttggtttcgcagtcgtggagcttggctttcaccgatgcaaccctcaccaaccttgagtactctacgtcagaccattctccaatctttcttgaaccgaaagtg

SEQ ID NO: 3323 - DNA, 609 bp, Cannabis sativa
caaattaatcctcccattccattatttataatccttctttctttcttgcatacaaagtaacacgtaattctagttatattaattgtacataaaacttcttaagataccttgcattctagcctcttgttatctcggctccatccatagtagctaatttgtatgctcctttcccgtcgatcccactatgcggtacgggccttcacagttgatagataactttcctgcccgggattcctcagtattctggaagaattttttgaggactaattcccctaggagaaatttcctgagcttaacttttttgttatattgtcttgccactactgagtaatggttctgcattcgagataaggcgcattccctttttccttctacgtcatcggctgcctgcaatagcaggaaagtgttctcttcgttgcttaacttggttcgtgaagtgggcacttgtatttccatgatgactgcctccattccatatactaataaatatggggtttccctggtgctagtgtggggcgtcgtccgattggcccataatactccaggcagctctttggcccatctcccgttaggtttctcaagtcatttcttgatgttgtttatgatgac

SEQ ID NO: 3324 - DNA, 2311 bp, Cannabis sativa
aaaataccagctaaagtcacttttaagtttaagacaccaaaaatcctactccttcaagtagacatcattattctatctcacccaaagacaaacttatttcgttgagagagcccaaatttacttagccatgagagccatattccacttccttccttctctaattccaagacaaccatacttttgggtaagcaaacatgctcccaagaagtaagatgaactttactatgatttcctttagcaccccaaaggtaatttttacaaagtttatcaatctcagcaattaccttatgaggaaggataaatatacccatccagtagtttcttattcctaacaaaattgagtgaatgagttgagctctgtcagcaaacgaaagaattttactaacccaattatgaagtttcttctgaatcttatcaataactcctccacaatcggtagctctctacttagtaggtctcaaattaacaccaagatatctcaaaggaaagctacattcctctatttgaataatattcttgagatgaagcttactatcatgattaataccaccaaagtaaatatgagatttagatttgttaatagctaaactagtagtggcacaaaaacaatcaatagcatcttgaacaatttggagagacttcatattacttttacaaaagatcaccagatcgtcagtaaaatagagattaactaacctcaaagacttgcacataaggtggaaaccaaaaccctttttacaagaagcttgatgtagtaatctagtaagataatccataattagcacaaacagtaagggtgagacaggatccccttgacgaagacctttctcacctttgaactccccatgaaatttgccattcaatattaaggtatagaaaataccctttaaacaaactaaagtccaattaatgaatttagcgaggaaatagagacgattaagaagactagaaacaaataactaatcaagaatatcgtaagtcttgcttagatcgatcttcataaggcatccagaagagatattctttatagaataacccttgaggagatattgaaaatttaggacattatgagcaaggagccgtttcaagacaaaagcaccttgagtgctatcaattaaagaaggtagaacctcagacaatctagagcagatatcttgaagatacatttgtataacgtgttacaacatgtatatgcatgtaatccactgttgtagttggagatcagttttagggattaagataatgaccattttattgatctctctaggaacggaaccctcctgaaaaaaaaaaattaaaatagcagaagaaatctcctctccaatttcattccaaagacctttgaaaatttttgcaccaaatccatatggacccgggcttttagtcaaatggatgttgaacaaagcacttctaacatcatctttgttgaagggacaaataagactcaattgttgagttaaattcaacttagggctctgattaagataatcaaaattaagtctttttaaagctgcactctattttcccatgaactttcgaaagtgattgaaatagtgagccaccacccggttccatgaatgtaatgatacgattctcaactcgtttcttcttggtgctagcatgaaaaaaaggcaaatttttcatcaccaaacttaagccaggagagcttactagttttttgaataaagctatcgtatcgttgattagcaatcaaaaaatcttgatgagcttgttgctcttcaaattgatacgaggaattagctggattgttggctaaattgttctgagcctgatgaaattgtctttggctgctacaaacttcatagatatatcccccaactctttcccgctaaacttcttcaagacatgcttcaattggttcaacttgccaattatacatctgagacctccacccgaaagaggcttggaccagctttgcataacaatatccttgaaaaggttgtgatccatccaataattgaaaattttaaaagttttgatgcccatattcccaatcttcaactacttgataaggtagtagctatgatctgaacaaacatcccataggaaaatagcttcaatttgaggaaaacatccaaccgattctcatttttgaaaaccttgtccaactttaaataaatacgagctctcgaatcatgcttattagaccacgtatactttgaaccgaggatttcaactcatcaacttgaccaatagccagccactattgagcatcaaaaatgtcattggaagtcacttgccaccccccaaactgatcatcaaagggaaacatggcattgaaatcaccaaa

SEQ ID NO: 3325 - DNA, 659 bp, Cannabis sativa
ggagttactttccaaggttggtatattgtcccccccattcttggtaatgttctcttttatcattgttgtatcattgtccctctgctcaacgtggtcattgctatttgaattgaggccctggttggtactcaattttgtcgtgatgttctcaggggaagttgcagcatcaataagttcctggacattaacttgcttggaattttgtccaaatggggcaacttcacctatacccggcagataaaccatgggcagctgggtaataaccatcgccggctcactcccgtcgtgttcttcatcggaatcagacacaatccttcgttttgaagggagttgcattctacattcacgcatctctgcctcttccccatttcggatggctttgtggaccttgatttgattgcaaagaacttgatctttccccattcttttctgcaggacccagtcttggaaccacttggctaggggagtactgaatgttgatttttctttgacgtcgtttctcagccatagtccgtataaggggtagtagttacccaggttatccttgaccacagtaggagctttgatgcatgaactttgttcatgtgagagaattccacatttgaagcaaagtttaggcagtttctcgtatttatattggatccagaggtccttcaatt

SEQ ID NO: 3326 - DNA, 1468 bp, Cannabis sativa
ttcagaacactgttagaatcgagcttgaatatgttgccaaacatccaatggacaacagattccatgcaccaactattggcctgttcttgaaacactcatgattgaacctagaaacatatgttcaatctaaaacactcttttagttgtttttcctatcattttattttatcctcattaagttaaatttctgttgttgcaagctgggttagacaggttttgtgacactcttattttgatccaagaagaaatcgctcaaattgagaattgaagtggtgaactttacaacaatgtgctcaaggtaaacttgcttgttaatagtttgtcactataattaggttgagttttgagttgagcttagatagaaagtgaaagaccaagagtgatttaataggataggttgctaaatgtgaaagaaatttctgttaaaagatgaacttgttagttcatataagaaagataaaattgagaggctttaaaattattttaaagttttgacactgtttttgttttgaatttttgtgtgctttgaaatgtgagggagtggtggggctgaactgattctagcatcaagagactctaactttattaataaaaatccttcattattgaattattcttaccagccgaaaaaagatagtttagtacatagagttacattttttttaatattgattttattttggatagtggtttagcttttttttttttgccaaaaaaattagattgttagatttacatacactttaatagacatatattaggtacacttcagctaatagtaaaatattattatgtaagttaatctgagaattacttgggaatacaatttttatttaatagtatttgaataaaattatttagtagattgtttgtgtctctttcacttttacatttctgtaaattgtagttatggtaaaattttgctaatcattaattatcatggactcacatgaattctctatagataaagatatattaaaaattaatttgtagtaaagccaaaaaaatagacaatcccttctaattatcaaaactataaagtttccttttaattttgaaaactctgtacttagttctctttaaattattaaagcttaaaaatgatttttaaaataatttattattaaaatagaaggaaatatctttaacaaataatttatcaatatttaagatattttccttttgattttgattgcataccgtatcctgtggcttcggatttcttccgtaaatatttatgttatttttattttttactattaaaaaaagatttgaaacgaaattttaaaaagaaaatgattaatgaatttttttttttcaaagtgaaaaacatatggaaagttttcttcaaatatcttcttcaaacaaagcacaacctaattaaaaattttaattagtattttatttatttcctattaatcaaaactattaattaaactcaaccttagtattttaattttaatttttt

SEQ ID NO: 3327 - DNA, 824 bp, Cannabis sativa
ttttttttttttttttgttgctaggtgacacttttgttattcggtattttgtgtatgtttgaaaaataaattacgggatcccaaacttgtaaacactttgtaaacataaagtatgtttagtaaaattttacttaattttaaagtaatacgattttataataaaaacttttaattatcaaaagttaacacagtaattaaaacaacattgtagtctgtttaggctagtagggcattatagtagctctacgcctcccctatttttcaattagtgctgacctagaggtctttggttattttgagtgtttcttgtcacaccatggttgtaaacatagaaaagtgtgacctatagttttcttcaactctcaatgaaagtactaaatattgaccgaaattttcgacaactaaatttaaagaaggaaacaagtatctaagagagctttaatgaagataaacacaaagatttacgtggttgagacattaataaatcttaatccacgagtttttgttattgggttgttgatgcttataactatggaggtttctcaagattttagtagcactttggcatagacttaatatccttgatccctagtgcgactttttatttatatgcaatgagccatacaaataggccagaatagctgggcccaaatagtaattatttatgtttaagccatttaatgtaacatttacaattaactaatgataaacacatacataatctcaacacattgggcaaatccaatagacgtggtaggtgagttgatgtgacctgtctagtgctgatgtgatatatttaggaataagccaccactcagggccta

SEQ ID NO: 3328 - DNA, 851 bp, Cannabis sativa
gcagatattaagaggctttaaagtagagccacatagtgaatttttacaagggtcggcttggtttactatagatgaaattaaaactattgaataaagaaaagaacaactcagagcaaactaaactaatacaacttgtgaattgctactacattagtgatagtgttccattctccaattgggttggaatttttttacccaatacaataatgataataaatatagtactaaattaatttttattttgcattttaaggtatccaatacaacaaaatatttcatattttagtgtgacttattatatttaaatatgtgatgactttcaaattgttataaaattcataagtttggtggtgatccatttatgcatagtactatccaaatactatttgtattgagttacgcatattctttcatgattgtgttatataattttgagctattttctctaatttataaatattagagattgcttcttttattaaggaaaccaaaagagagaaaaaaaattggaactcaatattaaattgtactataatttacggccgaatctcattttcatttatatctatataatttttatttaaattcacttgttaggttttaaatttcacgattaaataccaacaaccactgtacgtacacatgacatatatattggtctaattaaataattttaattatctaaatattataaaattattttaaatagttgtcattttaaggggtattgccatagagaaaaaaaataaaagaataagtatctataaattgaaacataaaacggttttacctgcgtatacagaaattgtactaaagttatacataaatttttgtaaatcgttcaacatgaa

SEQ ID NO: 3329 - DNA, 1779 bp, Cannabis sativa
tttcagtggggaatcgcaggatacagttgatgatattgtttccatgacaagcaaactaggagtgagcggtgaggatgactgggaggaaaatgaggcttctgcgtcttcattcggtgagctttccttggttggaagaatgattgcgaagagggagattaaggaatcgttattctcaacaatttttgggcatatgtggaaatgtgttgtgggatgggaagttaagattttagaggaagatggagatgactcttttgtgggaatatcttttaagagtcgagaggatgctaatggagtattgagtaaacaaccttggatgtttaatgggggtcttctcatgctatagcagtggccttcttccgggcaatggagggatgcaaaactggatagacttttttgttgggtgaaattgagaggattgccgattaaagcttttactaagaataatgtaaatcgcttgggagaattggcaggtgaatcaaggagttaaggtggagcaatgaaaataggatgttcttaaacagttatgttcatatgaaaattggttttccgttaaaacagagcatatttgtgggtagatatataccgtgtggagggaagaatcattggacacaatttaaatttgaaagatttccaactctttgctttggttgtggaatttggggtcatgagaagagggattgtcatcataaggttttgatggaaaaatctaaaagtggtctgaaggttcctaagtatgggccatggttgagagatgaagatcctacacctaattgttttgtagcttttaatctatctcaatctcaggcgcctgagattgtggtggatgatggtggaacaaccgtggcgaaacaatcaggttctttgggtaatactgaacggggtagtgtggtggttgcgccggcgaaagtggtggtgaatgaggcgtctccgagggtgcacaatctgttacctgtcaatggtggtggagttgttgagcaagaaaatagggggatcgtgggcaattctgtttctgtgccaactggcacatgtggagagcctagtcaacataaggaaagccaacataaggtaagtattatgatgggcttggagagtttgaatactctttatgggtcgcaagtggtaagtaagtccaataaggaaggaattgggcatattgatgggtccattaatgttgagattatggggcagggagagggatcatcttcttctcataggaatgtagagaaatccccgcaatctctggaaattgatggagttgaatctgaagctacgaagaggaaagaaggagggaaagatggtgaggttgagaaggagagagagtgtcgggcactcagtaaaggtaaacaagtattggttgatgggggggttagtttttcaacgggttttagtcataaggttagtgacggagtgttgttgggtaagtcgggttctgacgggcagaggaggaaaatttcaatcaagaatcgggctaggaaagctgacaagggaattcagatggtgacaagaacctcttcagaggagttggtgaggcatttagatggaatggcaggggggccgtcgggggagacttttgtgttttgtgttgcggcagttcgtggagcggagaatgatgctactgataacggggtgagtatttctaattttgttaatttctcatctcatttttcaactgaagaagcggcgagtgttgctaagcaagaccgccgagagcaatgaaaatactaagttggaatgtccaagcattgggaatccttggaaattgcgtgcgttacagtccat

SEQ ID NO: 3330 - DNA, 2451 bp, Cannabis sativa
attgaatgtttctgaacacttttttattgcttgtgtgtgagtagttcatagcaatttaagagcagactttaaatatttggaacagtactctaaactgttttgaatatttcttgattgcttgtgtgaacagttaattttctattcacactttaacttgcgtactatttatcaagacacacttgggtatctcgtttataatacatgctatgttatgtgagccgttatttatttagattgcacttaacttgatgttgattacaagacttaaaagtctcgcttactagtgctattttcatttctgctttaagaaagttttaaattatttgacttccggactagccttagtcaaacacctttctttttgcaaatattttattttctaggtattattggacctggttatttctaggtaacaacgagcctagttatttactatgtattttctaggcaaaacctagttatttctaggcattagggagctcagttgtttctagaaattagcaagcctagttattattgagaatatatttctaggcaaaacttagttagtgtatattcatatgccccaagtaattttatagaaattagaactttataattacttgaaatatatatatatttttattaaaataaagatcttctttacattataaaaataaatgaaatacaacaaaacatgctactggtaatacgaccttaaatgtttattgttcgaagtatgttttatcagcgagccattgagccatgctaatttataaactcttgttctcacaacagttttaataatataacgaccttcccagttcaggttaaatactcctgttggaggatctcgcgtattagcaaacacgcgtcttaacaccaaattgcctactttgaagagtctttttcgaactcttttcttaaagtatcttgtgattcaatgttgataagcaacatttgtgacttgcaattcaatgtgctttcatcgagcagatctaaggacatactgagtagttcctagttttgttcctagtcgtagaattcatgcctgtgtgtcgcaatgttcactttcattggtaacattacttttgagccaaatgccagtaaaactggagtatgtcctgtcgcagtttatattgttgttctatgggtccaaagcacctatggtagctcatcaactcatcttccttttactgcgtctgattcttttttatagtgtcttccaaggttttattaacagcctcgactttgtccattatgctgtagcctagatactgacgagaagctcttaataattttattttttttttgcagaactcagtaaataaatctccatcaaactgaggaccgttgtcagacactattttaataagaatcctgaacttgcaaataacgttcttaattacaaactcaggaacttttttacaagtgatggatacaaaaagtttggcttcagtccactttatgaagaagtcaactgcgacaacagcgtattttacgccacctcgccctgttggtaaagatccaatatcaggtcaatcccccatataacaaatgggtaaggaaaggtcatcattcataactcagtgggagatattcttggtatatgcaagctggcacttatcacatttcttaacaaactcataagtgtctttgttgatggttggccaataataaccttgtcaaattatctttttgaacagactttcccatcctgtatgatctccgcagaagccctcgtgaatttctctaataatatcattagcttccgtagagagcacacatcgcagtaagggcatggaatttcctcttctataaagttttccatcaactagagtgtatctcgggattgtgtataagagtttacgtgcctcgattttgtctgctggaagctctccatttagcaagtatttgacaataaagatcatccaagttgggctcgcatctatcatttctatatcttgctttttagtttcacgtatacttggattgcttaacacctccactagaaatagattcaatttgtctaagtcaaattgtgatgcaaattttgctaaagcatcaagattagagtctcgttctcttagaacttgttcaattttttccaagttcttccgtactttctttagatattttgctatttttgtgtattttgcctggtattctcccaaaacttgatttacgaccagcagtgaatcactaaaacactgaataggcttaacttttacgattttcgcgatttgtcacccagccaataaagcttcgtattctacctcgttgttcgaagcatcaaattggaatcttagtgcatagtgaaacttgaaatttttcaggcaacacaactatcactcctgctcccgaaccattctcatttgaagccccatcaacgaacatttttcatacattgttatcatttcttgttatggagtcttctcctgagattttcaaagtttactttttagacacaaa

SEQ ID NO: 3331 - DNA, 1259 bp, Cannabis sativa
attctcataatacatttggctgaaatattattcctagtataccccttaagaaggtcttaaaagatcaagatgttttgggtcaagtgtttatttttaataaaggcaccctggttagcatgaatcaaactccgaagaacctctgagagtcttgaatagatcatcttggatatacctttatagatcgtattgcaataagcaatatgtctataattactagcatctttaggattgtcatttttgggaatgatcgaaatgacagtttcattaagctcattcggcatctcactctcctgaaagaaaagcaaaataacttgagaaatttcctctccaatattagaccaaatttttttaaaagaaactagctccaaaaccattgggactgaaacttttggaggaatgaataccaaataaggccttcttgacatcctctgtacttaaaggtctgatcaacttaacttgttgttgcaagtcaagtttattaccttaattaagacaatcaaagtctatcctttgagttgttgaacttttctttcccataaagttcttgaaatggtttagaaaatattcaacgactttcggatagtcatcaatcacttcattctactgccaataagaagtaatttgattctcaagttattttttcttcaagaaagcatgaaaatagctagtattctcatctccaaatttaaatcaagtaattttggaagtttgttgcataaagcttgcatgtttcctataagcagtaagataatctcaatggcaatcttttctacttgttgcaattggcaattttttgaatctgtttctagactagcttgagtcgcattaaaggcatctttaaactccatgtactcacttggaatatctctccctttcccttcgcatccaaggtcttcagttcatgtttaactctaaaaagactttggattacgcttttgaggcctttgtgactagtatctagatcccaacaacttaaaactatttttttatacccctccttaagcatacaatagttacaaaatttgaaaggccttctcccaacttttccattctcataatgcttcacaatactgtagttatgctccgaaatggtatctcatttaaaggttactgtagtgttgggaaagctatccatccaactctcattaatgaacactctatccagtttgcaatacattgtatcccctattccatgtgttattaaaccatgtataattggtatgcaagcatttaaattcctccactcgaccaacagcgag

SEQ ID NO: 3332 - DNA, 703 bp, Cannabis sativa
acctagcaaggccttattgaagatgaaaagatcccgaaaactcatgccctcatccgctttatgccaacacaagcaatcccaagaacaccaatacagtttcctattatcattatcacctctctaataaaatttggcgcaaagtctatgaatttcttgaaccagttttacaagaagccgaaataaattcatagcatatgttagaatagattggataacaaactttagaagcacttcacgctctcacgcagaaaaagattcaacttttcaaccaaaaactttataccataccttgttccgaataaactgaaaaagattaggcttacttcgacccacaaaacaaaaaagattaagatatttttcatgacaagaaacttttgttcttaaaacatgaaatatttgttttcactagtatatatttttacaaatacatttttttgaatggaaaatataattttattaatcgttaaatacctttactaaatgttggtaataaatcacatgagacatctcccaaaaaagattatcaaaatacaaattaaataaatactctaataaaattatatgacatgttagttgaacgtttagcaaaatataaattaaaacattctccttttattttaacaaaattaacaaaattaattaccttccactagcaaattaattaaccatatatgtatattaaatgtttgtgtatatatacagc

SEQ ID NO: 3333 - DNA, 899 bp, Cannabis sativa
caaactcaaactggagtgcactttaaagttgatgttttacggagaaataagaatgattccagctccagaaattttctcatttggtactccgtctacataaatcttctagacttctagctccgagatgggttcttcaaagttgttgttcatccctgtacactccacaataaaatctaccaaggtttgacctttgatggagattctaagctgatagtgaatgtcgaaatgacttaactccatttcttatttcaagagtctttcgaatgattctggcttttgcaatacttggcggagaggacgatttgttagtaccttgatggcgtgggcttgaaagtacggtcttaactttcgtgaaccaattagtaagcaataagaaatctttttaatcattggatatctagactctgcacccaataatcttttgcttacataatatactgaaagttgtacccttccttcttctcgtactaaggtggcacatatggtatgatctggcactgctaggtacaaaaacaatggctccccctcgattggcttggacaatattggagctttggtaaaatgttctttaagtttttagaaggcatcgtcacactcggctaatccattcaaacttgttatttccatagaggacattaaagaacgaaatccatttgtctattgattcgaaaatgaacctgctgagtgctgcgattcttctagttatactttggacatctttgtgcttccaaaggtgatggaatatctagaagagctttaatcttttttggattttcttcgattccctttggacctgacaatgaaaccaagaaatttcccagaggaaacttctaaagtgcatttctttgggtttaatttcattccatatttttgaataatggagaaaacttcctctagat

SEQ ID NO: 3334 - DNA, 748 bp, Cannabis sativa
gacaatggcatttactgtaaaggtgcttactattggctgaataatttggctgatgggagaattttcttgtttggtttgatatgtctaatgagacatttcatagcataccatttccaaatgagatcatgcctaaatttacagccaacactcattttagcttgttagagtggaaggggtcagttgcccttttccataatgttgttgaacaccctggtttttacgacctgtgggtgattgagcactgtgctgattggatcaagcgtctcagagttgggccgatagaaaacttggggcgtgtgttaacaatttggaagcatgacgagatcttagtggctggtgatcgagatttcaggtcgtacaacatgcatactcgaaagtttaggaaacttcccttttcgggattgacaaaatattgcaaagcttctgctgtttcatttttcaagactctagtttcagtctagattagattctatttactttcattccaacagatgaactagaatggacttgattgttgttatcatttgcttttgtttctgttattggctatatcaattttctgttcattttattttgtttatgattccttgattctatgttccttgggattgaagcaagaaggagaacaagactgactcataaattcatggttgattttgtttgtttatcatttttggttgttacttgtgaacacatattatatatggccataaaagattatcttaattatggaatatccatgtcccca

SEQ ID NO: 3335 - DNA, 1146 bp, Cannabis sativa
  modified_base (344)..(351): a, c, t, g, unknown or other
  modified_base (440)..(445): a, c, t, g, unknown or other
agattatgttgggacaggcggctttcccttgtgaaagagtcatcggttaagtgtgttgacaaattaggagcatggagttgtgcgcacattatctacagggctcatttgtcattgataacttcgctagcttctgcgctcacatagggatcgcacctttctaggttataccacaatcttataagctcttagatggatggtcttcttgtgcagctacgggaactggaagtccaaagtctagaggagattatgtatttttatgtggtcaaatcgcaactcatgcaaaacaggagaatcaagattggattttataacactacaggaaatgtcacttttaccagcacagnnnnnnnntgcgctggtaaaagtaacttttaccagcgcatttcgtaaactgcgctggcaaagaagttaaagttttaccagcgtacatttgcagtggnnnnnntctaacttttaccagcgcatttattacatgctgggaaaagtcatctttgccagcgcttttcattttatgttggtaaaagttctaataccaacattgatttgccaacccccttttgccaacacagcacaagtaaattctattttaccagcgcaatactaacttttgccaacacaaaaatgtgctggcaaaaatgacatttcttgtagtgtaagctagctagagaagcattccagtcagtccacttgtcccactaatttcacaaaatacgtcccaaacttttagaattattgatttttcacaattggattttagctgaagagggttccaactctatctttagacttttttacccctagtaagcgttccaatctttgttctttcctcttatgaattttgtacaagtgttgtatccaatttgtaatggaaaagattttaactctaaagcaaatgtagaacaaacaccaattgagattattgccttatatattacattaattaaaacataggcatgcatacattttagtatttatatatgataatttcacaaagtgcatgatatatatcaatattaatattgattaagttttttatgataattattattaattaggatgggagagaatcccctgttagtcatttggtcttacttgtctcataagacgttataaagaagacaaggttatgactgtactggacggatg

SEQ ID NO: 3336 - DNA, 1240 bp, Cannabis sativa
atgcctcccataaacattagattcatcgagtaaaggagcaggtggcctttgagaagaattgctccgtacacgttctctcaagccaagagcatccttttgagcaagaagatcatctagttcagcaaggatctcagcggcatcactctgtacaactttgtgaaagttaaacaaaaaaggcggcatggatctcagttggtgaagcaccttgctagcgcggctgctagattgatcgcatcttatcttggatcggagagcttcatagtccatcatgtccaccaagtcgttggcttgatagatgacatcttgaagcttgcaaagccactgcttgatgttgtcatctccaatttgcttatcctctgcatcattgaacagtgcattagctgataacagcttattattgagcttgtccagcaacttcagaatggccttcttcccttggaacaggtgggatatctcctcagacaccaatcgatcaaacaggaactcaagtgaagcagagaacaaagcaccagcaacaaattcagcagccatattgaacaacaacaagaataccaagcttcaagcttttttgggcagcaaacaaagaaagaaggaatggtatttcatgcaggtggatttggttaataatttgtttacttattattgcaaagtgtgttgtcttacatgttcaacaactaattaaaataagcacgttgctttcactttgtttaaaatatttggtcatggtcgtagtacataacaactgtctacatgtatagtgatttttttttatcttaggattccattttccatttcaaataacaataataatcttatcacttggtaagtcaacacgataatgaagttaggcacatgcatgatgatacacccatttgaaaatatattagatcagatttaaatcatactaaccgcagtatgatatctcatagtagagctagacgccactagtgcatttttatcaatttttcattttattggtaaacgtagatggaacttttataggtacttgaagaaatgacttcatcatctcttgtaggaatttggatgtgtattttgctctatgatacttctatggtaatgattggcaataggttcataatttggtaacattattcaacggtaacattttgcagggtaaggtggctaactgtaataacagcaggagcttcaggaatcgattcagttcgggaaaaatgaacagaacatgtgactcactctgttgtctctcctctccaatcac

SEQ ID NO: 3337 - DNA, 704 bp, Cannabis sativa
tcaccaaccatttccacatatgcacattcatcatcattttcatcacttgtgagaagcatacggtctcccaagaccaacaattcaaggcctgcacacctcgaacatgcggaaatggaccaaacgttagttaccttttctggattcctcatcaacacgagtctttttgtggacatcctaactttacgatcacctgcagtcagaaaaatcctgttcttagaatttccaataattattatatcatgaagcagatattttactccaacaactcttttcttgtagccaacactgcagtttacagtgagaaatgcccagttcctcaacataactttagtcttgtatcaaccccatttaactttgcttctgatcacattgacttctctttcttctacaactgtacctcaaagcccatcgagtacatctttccatttccagttgactactatactaatggaaagtcatcattcatttgctgcttttcataaggaagcattgcaacaagaaaacttttccctaaactcatgccaatctttagttaacgtgcctgctgaaatagctgatggggtagagtttactaagttgctcctaatgaaatatactgaaatcttgaagatgggattctttttgaattggagtactgcacatagtttcagtaggtgcaagataagtggtggccgatgtggatgtaatcgacctcacataaacgc

SEQ ID NO: 3338 - DNA, 832 bp, Cannabis sativa
aaccgggttatttttcctattctgtcacccatgtcctcaccaaacatttctttgagcagttctgtattccattttccatcctgaagggatacatccgctatagtttgaacctcagggaatctcggtcgcacttgatccatgatgcacttgaattcatcaaagttgagccatggtatccatggttggttccaaaaatccaccgagtttgcactgcccaccaacgtcatacctgctatgcatatcacctctctagtactcaacactcctttccaaaaggctgagtccgaatctttaatacttgtaccacaaaaagacgaatttttgcaatacttctccaaaaagcaatcaacccatggcctttctagtcttgacgccatctgccacacaaacttggtaagaagggctttattcatatcttcagtcttcctgaaccccaggcctccactgaaagtaggacgacaaatctgatcccaccccaccaaggccaaaaaacgctcattttcgacatctccagtccaccagaacttacgaataattttgtcaatctctctacagctggacaacgggagtttaatggttgacatggcgtacaaagggatggacattgccacagatttaaccaaagttgttcgacccgcaaaggagatcaactttgtcttccaaccttccattctctttagcactttctccttcaagtataagtactcttctctcttcccccttttaaacacaaaaggattacctaggtgtttttcatgtccctcacactccctgactttgagcacatccaggatagtagatttgagcgggtttccaacattccttgagaata

SEQ ID NO: 3339 - DNA, 680 bp, Cannabis sativa
acagttagtgagctcagtccacatctcatgaactgtgttaagaaacaatatactgctcttaatatccaaagaaacacaatgaatatccaagacattactatttagctactgcagatccgagaatggaagagatgactagtaggaacgggttgtggaagagttccatcaataaaactcgttttgttcttaactccgagggctaagtgaaagtcccaactccattgttgaaagttatggcggacaagggtggagtcacaagaatcaaactgggatggtcaccagagtcaacgaaatagggattatctttgttggctggacgatcgtgagaagatggttgtaaagaaccgagatcaccaatgtttgaaccaggatttgtgagaggaacattaccaatattcacggggggaatggatcttgaagacacaggcaaagcagccatggaagtggctccgatcggaggtggaatggctaaagaggaccaaatgccctaagatggagacaaaacgatgtgctggagatccgaagcttcagcaacgtgctcgattggagcatcaacagtaggtggaaatgtttcttggacaggaggagacaccatgggagcagtggtggaattagccacaacattactgatatgacggaaatagaagcatgggaagagctgaaggaagatcgggtgtagc

SEQ ID NO: 3340 - DNA, 637 bp, Cannabis sativa
agttccctcactttctaatctaaagttctgattcatatatatatatatatattcaataaccattcatcataattgtacactacaatccacattatttaatatcatcatacatatgaattattaatatatttgtaatgcttcaagatttagttaactagtctcatacttacacaagtattattttagctgctttctagaaagatggcttataagttaacacaagtcttttcaacgtgttttatcatcactcgttcagaacttgagaaaacttactagtaggtcactcagattgctccagatcaaacaaatttaacttttgagttcttctttcagtagctcatcacttaagaactcaaaagttaagcatgcttaacctgaacaatcttagaatgggtgaccttctgaaaagttttctcaaaagacatacgagtaacgacaaaaaatactggaaagactcgtattgatttgtaagatcagtcgacattccaagaactaaagtaacatactcatatatactgtatagatatagaactacacagctgttacgctatttgatcacaagaaattacacaggtagagattagtctctttgggactctatttagatttaatgaatttgcaaagaaacattaactca

SEQ ID NO: 3341 - DNA, 1009 bp, Cannabis sativa
tttctcttttttcaaaaaaaaatcttataaagtcaagtttggcccctttaagatctagcccaaagaaaaaagtaattgttgtcttgacttttcataaaatcaattaacatcccataatgctattgatatagcttagtgaaacaatagacaaaaagaaaattgttagagaaagtaattagacaaaacacctatatcattcgtttactctcaagttttacagaaactagtctagaaggacattgtccaattagaacttttcatgcgggaaaattttaccattataaaataagaaaaactttgaaaattgaaagaaataaataaaaaaggggggttatttcaactaacaagagaagttgtgcaatgcaaaaaagaataccatagtagatactaatgaagaagtcatttgtatacagaaaatacaactagattgcagatataaaccccatgagatgagctcttacccgtccttataaccaaaatagagagaataagacaatgcccaagtattagtcgttccctataaaccacagcttgcctctcaacaagagcacctctgacatcaagtacataaggctcacattgaggcccacctaaaccagctggttctttccgattgagttcctgtgtcaaaacaacagcaaatatttacataagatgagaacagttcgagataattaacaaaagaaataaatcaaaacattagctgtaaaaaaggctaaatctgaagtatggtgaccaatgtttttataagaaacaagaacaacaacagaagttgacaaggtattatcttaaataacaaatagagataccaatctctaagtaaatcagaaaatgaaaagacactaaaatccctggaattaaaactccacaattccacccaaaattttacttttattcccaaaaccccaacaagtccatctccataccttgaaaatcatagtgtgatttccataatgagcattattaaacaaaagtaaaattcttaaaatataaataaataataagaaga

SEQ ID NO: 3342 - DNA, 800 bp, Cannabis sativa
tccagctaaaaccaaataagcatgtatgcacctgatgaagatcacactaatttataaacatacatcgagttatacagccacaaagggatgcccttcagactcaaaaatgctagagctatgtattaaaggcaagttaactgtatgttcaatgatttaatctggaataatattaaagtttatgtcaatgacatgtcggctaattaaaggtctttcaaaaccacattaatgatttgatgggatgcttcagcctcatgcgcgcttataagattaagctgaaccccctaaaatatgatttagatgtccaattaggaaagtttcttggattcattgtcaaatcttgaggaaatgtagtaaatcaagaaaaaataaaggcattgaaagacatgaagtcacagtcagggataaaagacgtccaaagcctcaccaaattaatcgccccactttgtcgatttgtctccaaatcaatcgatatgtgtgttcctttcttcaaccttgtaagagaaactagtaaagggttcaaatggacaaataagtgcgagaaagccttgaaagttctcaaaaatcatttcacccaatctccaatcctttcaaaatcaatagacgacaaagaattattgatcaattttcaatcatggagcatgcatatagtgctgctctaatgcatgagcatttgctgtattacatgagcaagcatctcaatagggtttagtctacgtaacccctattgaaaagttagcttatttcttagtattgacctctagaaatcttaggccacacttttaagctctacaattaagttt

SEQ ID NO: 3343 - DNA, 937 bp, Cannabis sativa
gtttattaagcattctcctactagcatcatcatcttagtggtttatgtagacgatgtcattcttgctagcaacaatctcaaggatttagaagttctcaaaactagattgaatgataggttcaaactcaaggatctaggagatttgaaatactttctaggccttgaggtagcaagatctagtaaagggatttttatatcccaaaaaccatatgcccttcaactccttgaagaacttggatatctggggagcaaacttgttaacacctctatggaagcaaatttaaaactgtcaaaagatgcaatagataccttggttgatccaacattgtacagaaaaacaataggaaactacagtacttagtcataacacgaccagacattgcttactcagttaataaactgagtcaattccatactactcctaggacaaagcatttaattgttgctcaaagaatattgcagcatattaaatcttgtccaggccaaggcatcttattctctgcagcagcttgcatagacacaaggaggtccacaataggactttgcatattccttaaagattttatcatctcttggaagagtaaaaagtagtatacagtctcgagatcttcagctgaagctgaatatcgagtaatggtaaatactattagtgagttaatttgttagagtgtcctttcaattagtttttgtaactaacttactaactgtgtatcgagctatataagctccatcattgtaccttaacaagacaaacaatacaataatacacagagctttgtatactctgtttttctcttctttctttctgcaactgatagaaggagagggaaaggagagatcaagttttttcgttagatttgtgcccccaaccccaaatctagaaactaccaccatcacaacctatgtctcatcgtgatagatagatagagagagagag

SEQ ID NO: 3344 - DNA, 794 bp, Cannabis sativa
attaattaatacaaaatcatttacttaatgggacaatgctttggtagaatcccaagaacagactgtacatagagtcgatcttctctgtcaatctaaagttttgtcttttaattaaattttttattcttaaaaatcatatgtaattatgtgtcacaagctgaccggtggtcctttcagtctgctaattacgtgtacgtacagtagtgcactaactcaaatagagtacatatacaacttattttttatgatttttttttttatcaagtatatcttaatcagttaatcttaatacatcacacataatctaatagggaagctaggccatataaattgaaagttcgaccttcatatatatacatcaactattaatgacttttacaaaaccattttcaagttcaaattaatattattactacatttaacatcatgcgaatcatacaatgtgggagcttcaataatttaacttaatatacccttttgaatggagaaaaataatttcaaattttaaatttagtgcttcaaaactattagggagaaagaaatgaagacaaagtaaagtaaagaaggatcttttattgattgaagtaattgaattaaaatgtgatacaagagtaaagttttatatagaatacagttggagataaaatgaacacaaccgacaatagtaacaacttaactgaattacttaacaaactaattaactctaataggctccatcaaggtggtgtgtaaaaattcataactctaataggctccatcaagctttatatagaaaatgggtttttagggtttcg

SEQ ID NO: 3345 - DNA, 816 bp, Cannabis sativa
tttaggtaaaaaatcatttttttaaatttgttttataaaataaaatacctacctcttcggttattatgaaatatctgaagacataggtctcccatactactaaaactccccgttatgaaagaaatagtggagagtttgaacaaactagggatgaaatcccagaaagaagaagcgagaatgcctacgatcccacgagatatgttccattagtggaactgaaaactagaaaacttcgatagcgactggctgaatcaaatcaaagaaatgcaaaattggagcacgaggcaatgactaaaagggctgcgcgagataatgcccctccaaaacaacttgatatgtctactaaacaacctcggggaagaccaagaggctcaaggaccaggagagatggggaaacccctagggggaataacactagaaacccctcgaacactcaggaaaattaacccaaggacgtgagggacatcccaatggatgaagagattcccagaatctaggaaacactagaaatcaagagagtcgacccaacgatctaggaactttccatggatatacaaaccgtgggaatgtacagcttgaaaatccaaaattatctcgcatgaatgcgaaggccaggcaaatataacaggtcaagtaaaaatcctcgcaggtcaaggtcaaggacccattggcagagcagatcaattagaacccatgcacatgaaaggagatcatgagatggggagggttcacgccactattattgagatgatcaagggagcataagttattctcagagttatcaatctaaaagttattcagcaacaaagtttgtaa

SEQ ID NO: 3346 - DNA, 1365 bp, Cannabis sativa
atgagctgaaaaagtgaaaaataaaaaccactaaatggtaactagtcactagtaggtaactaaatcattttctaacataatatctaaaaatattaaataacaaagtgaatgttaagattttaccagaaggcatcatacccattgaatgggctaacaccatcccttttcctctgctacattttattctacctttctttttcaacctcagccaaaaggttgaaagaatcgattgatacctttctttttcaatctcagccaaaaggttgaaagaatcgattgaattgattgctttattgaagcaagaatcgatttctttaaaactatgcaatagctatttcgacgattttatttggattgtaactaatcatatccaaagaagccatgaaactttgcagaatgtttcaatgagaaaaaccccccaagaactattataagggtttccatagtcaataatttttactaatgagtatttcttgcaattattagtgctattttgattgtttcctcttgaatatgtgtttttctctagcttcctctactcgtgtctttctcggaattgagaatgagaaagagagactcttttagtctgatttttcacataatccatcttttaagtataaacagttagggctaataaatagaatttgtttttcttattaagttaacagtttcgttaacttgatgttaacttttataaaggaaaaattaaaacgttaaaaacatcaccgttaaactaattttttttttcataattaatcacattttataaataatataaataggatttgttttttagtgagagcatcacttttgctctcatccataagagcattttctttttaatttaattggttgaataatagagatgtatgggtttgagccgtggagcatgctattaattagtttttttaatattgttttttttttttaaaaaaaaataacatcttctcagttaagtagaaggatgaaagttgttatttttgatccttgagaagccatggctttagagcgcaagagttttatgagaggaaataagactggagtaattcacaaaagctaattaattgcttccaaacaagtttggtactgaccatcttccaccgtcttcgaattaattttcacccattaacatcatcttaatcttttttgttaaaaaaaaattatttcattacccaaattttagagaagatttcatcctaatttttctatcattgatttattgtatttttaagtgtattaattatttcttttaaaggatggacccaaaatacatttgttctagagtagcatacatgaagaagaaggatgaaaaagaaaattttacatgacgattggaagcagagagtacttaagaccaaaattaaa

SEQ ID NO: 3347 - DNA, 1420 bp, Cannabis sativa
gtgtccttactgaattagcaataatttcaccagtacccccattcggcccatttgatttggattcagcaactcttttcctttttgattcaaggaccagtaaatcaccatcaatatcatcatttatgtcctccctcatgttattatcttttataccatattcacttggaaatcccaaagaattaaccagggagttattagcattgatgcccaagtcaactcctctaattcctccatccaatccccctgatcgaggagcagattgatacatcccttgattgtcgccaccattagaactctcaggcaccgtttctcttacagtcgaactgcctcctaatccgtcaccggagctatcccctcgcaccattaaaccttgccgaagccatttggtaccaatcgtatgttgtctccttcttggcatagcttttaatttcaggttatatggtttctttatcagatgaagtggggtatcgaataacttagaacaaaacttttctgaatgtccaaggattccacagataaaacaaaatgttgggagatcctcatacttaaaattggcataacatatctcacctcctttcttttctaatttcattcttctttttaaaggtaaatcaatacgaacagaaacatgtaccctaaggtagtcacgccatattcccatgaagttattcttatccgcttccacgaaagtgccaatgtagtttccgacatccttgaccacttttgccgacataaaaccagttgataaaccatgaagctgaatccagaagtccagtttgttaagaaccactgcccgtgggttctcaccctctttcagttttgagaaaatcaggggaaccctgtcgaacgtccaggggctaccctccacaactctatccacatctatctgatgataaaattgaaataagtataaattctcatccaattctttcacaaacatacctctgccgggtctcgacaacgacgccatcttgtgttgcatagccatgaaatccagagatctttttgtaaggaaacgtccgacaacacaccatcggtcatcaaagtccaataattccctatcattggtatcgtataagaggcctccatcatcatcctctccacttgttaaagtgataaaatcactttcattctccatatccatccgctcattatccgccatgttcagatcaaagcaacaaaataaccactagaaaccaaaagaccactttacagtttaacagtttgacagcaaacagagaaaaacacaggtcaaaagaccataccttttttgattagaaacacccaccaattctaatttatgtgttccactgttattttataaaaatacagtattttttttaaaaaaaattcgtgtcacagttttttataaaagctaaccaaaatttcaatatttttataaattttcctttatttaatt

SEQ ID NO: 3348 - DNA, 1040 bp, Cannabis sativa
ttcgaatcatgttgcatgttcaagatgtaaggataagatgcaatttctttgttgtttaagaattaggcttttaagcttgtgactgggatattgttgttggtgggcacaaaatgttttgaatagctccttaggtatccctgagacttagtagaagttgaattcttttattgcatggttctgggaaatttcaatttgttgttgaaatgctggcaatttttttttattccttcatctgaaacgtttatggtattggacaatatatgagcctttttcgtttctttttattcttgtgctccccaattttactatctggaacaaatgctccctgaggattttatatctagatagtgaataaggtggggacctcttccaagcaatgattgaggaggatttccctttgcccctactatcttagttggtttggtaactaactgcttggaaccttctttttcaacttttataatgtctagaagaacttggaggagagtggcgaaaattgacgaagaagttgaagaggtggatcaggctcttgccccaaaaatagagttgatgaattcgtctccgtataagatggatcaatataaaaataagttccgaacttacaacaacctccagaaatatgagacctagagagggatggaaagcagccctggactattctggaataggttgtccatcatgggagagaaactgagccattgtgctaatggtggtttcggtgtttggagttggggttatgtgctaatgggagcccatcttcctttaagatgttattttgcggatttttgcgcaattgctggagtggctccttactagttcattccccaggtgtatcgtttgcttgtcgaataatatgtcttgtgcttttataaaaagaaaacgaccccaactatagaagaaatcttgtatttttacaatattaaagcacgaaatatgagaaaccacaaagacaaggttgacttctaccggttagagagtactctaagaatctggtatgccctactagttccgtgcaatatacctacgacatctaggattat

SEQ ID NO: 3349 - DNA, 770 bp, Cannabis sativa
accatgatagagtgtaaacaacaaaaataatttaactgatatacaaacttcaaacaaactggctgaggagtaatgtcttgtctttcacattattgttaaatagattcttgtattgtacctatacttataagttatcattacagaagcaaaacaaagtaataaaaattatatttcaagtgaatttttttttatttattctaataataatatagcttcagattttgatgttattcaagaaatctctatctcccatttattttcactaataaacacaagacaaaattaatcaaacagccccttttataaatggttatttcattttattttttaatttttttatgggaccttcatatgataccttgaaatgcaatgtgaaattatagaatttcaccaatctcacgtcgtaatataaaaggttaggaaccattcaatatcaaaatccacttattttaatttaataaaaattataaaaaactattaactaattataaaacattggtgccttataacaagctcgcaagttaatgataaacccaaaccggaagtcacctttggtatgttttgcattacatagtgccataataccaattctatatattcaccatagatttttaataatctcttgtgtccctaattagtcataaggttagtatacaaaccccacaagttgttcaaatatgataagaaattaatacatatatatatatttatataagatatatgaaaaacactcacaacagagtacggattccatttaaacatctagaata

SEQ ID NO: 3350 - DNA, 2467 bp, Cannabis sativa
gagagagagagagagattggattttgggttttgtaagaagaagcttttgtagatggagaagcttcttgggtaagagtattagagagataaacacttggagagaagccaaacaaagaatcctatcaattgtattgcacctgtgttcttgctcaatcgataaagaagtttacagtggtgtcccagaactaaagtagagataaatcacatcgatatatcgaacttgaacctgtataattctttgtgttgttttttaataattttcttgctttgtttaatttctctgttctactttttttttcctcaatttttaaattgtgttttgttgatattgttattgttaattgtttcttgatttgaatttaagttaatttgaatgcacattagtttaaattttcccacatcttaaaatactcttggcaaatatttttcttcaaagtattactattttgtaattataaatttctaattaaaaaagaatatatatatataagattttattatatgcttggccctttttaccacaactttgaaaaaaattaaaagttgttttttcaaaaatcactatgttataaaggtatttggtaaaaagtcaaaaatcagtatattaaagaatttatgaagaaactacaactaaaagttaaaattggtagaactcaatctatataaaaaagttgtatttaaaataaataatatttaagtctttaattatttcattttgtttaaaaacattttatatttattagatattttttattttcaatattttatgttaacaaaccacgtaaaataagtttttttaacaaccttgagttttttatatactcatatttatttttttacatgtgataaaaaataatttagaaaagaaaataaatcaaaatcaaaatttcagtccaatcaaaacacacataatatgataaaatggcagaccagaatcataataaaatgagataaaaataagaaataattaaaaatgaaaccaaattaatatgctctctcacgagaagagcctccctgaaatgctggaaaagcctttgaacatggaatcatcggacatcaccatggatgatctacttgcccaaacaacaaacctatctaatctggaagaggaaggatgggaagttattggggctggagggtcggaagttgtgacattgtgcgcgatgggacgatggtgctccaatcgaccgattagtcgatcgcttttgaagaccatctttggacgagtctgggggattgctgaaaggaactggggcgtcgaaataaaaggcaagacgacatctgcaagtttcttggtgttttcattcaaatctacccaagatttgaatagaattctggccaaaaatccatggttcttgaacaatggtatcttaataatggagaaatttgaaggaatgtcgtgcgattggaacaaggtcctcaccagatttccattaagtgggcgtatcttgaatcttcctaaccgctcgattacgaaggggaacatggatcgactggctcgttatgcaggacaattgatctctgtccaaaatgcagatatccccaagattgcatcaaagggctacttcaccttcaaagtctggcatgacattgctactcctctctgcccaggcttcctatttccgtatgagggtcggaaaatctggcttccttacaggtaagatcgattaccttttatgtgttttaaatgtggttttgtgggacatgatactcggatttgtgcagaaccaattaaattctttgatgatggatcgaggaagctacaaccgagctatggttcttggctcaaagtgaatgaacgatacgagtgtaatccttccttcattcaagacccgtgtggtaattcaactccgaataaaggtcctcctagttttcctgaaaagcggaatgtttcttcaaggttattgccgactggatccaatttgggagctaagggtgcaagtggtgaatcttcacacaccataatctcgaatccgtctaaggtgccactggtgagttcttatccttcctttaatattaattctggaatattggggaagggtaaaaacattgagaaagatcacaaggcggagaggttctgtattgatttggaagcccctaattacacaaagaattctggtattgacttgggtttgggagtgaatattactgggcagggaagttcaaaaagggatggttcttggagggaagaaagctttctagatatggttgaaattctgcaacagcaacaaactaattatacttttaagtgtcaaccgagtcctctcaataatcacactgatccaatgccgaagttaatagatgttcccataagttatgatcatagttttgcctcgttgaaaaaaatggagggcccatcaaagagaagaaaggtgattcctaaacgatccaagaataaagggggtaatggtactaaggaggtgatgatggaggacgagcacattgaaggtacgggttgtgatacaaa

SEQ ID NO: 3351 - DNA, 1082 bp, Cannabis sativa
ctacaattcatctcttggtcatggcacttgaaaatcctatgttgttactcctcgtggaggtttttctcaaactaatcatcctctgttggtaatggtcgtgccacacttagccttcattctctcatgttggttcttcttttagtggtcgaccaacttattgattgtgctctaaatctagatacattgcctctcattgctatcaaaagttcaatatggaatttttaggagttattgctactaatattgacaaataatctacaaatactgtcgaagcaaatagcgtagttgatgttgcttggaattctgttctggagctacatcccactacacttcggatgtgaacaatttcactcataagcaggcctactttggtattggataagtgcacatgactgatgctattgggatccctatatacaatgttggtaaatctcttttcactaagccttattcctctaaaaaaaattcattttaatggtttacttcatgctttcaaaataagtaaaaatctcttaagtgtctctaagtttgcttcaaataatcatgtctttgttgagttccatcataaccataactttgttaaagatgaggcttccaaggaagtccttttataggcccattttagctcgacttaactagtttttgtgatgctgattgggtatctgatttggacgataagagatcaactttaaatttttgtgttttttttggtcagtgtcatatttttgtcttttaagaagaaaatgaatatttctcgttccagcattgaagctgagtactgcaatcttgctcatgctacaacaaaaatcatgtggttctagttttttttttctacaagcttggtctcaagcaacaacattcccccacaatttggtgcgataatcaaagttcaattctcatggaagtcactccgtttcttcactccaaaactaaacacatcgaattggacttatacatgttcgagaaagaatttttgacaataacttatttgacaagcacacttgagctcataatcaactagctgacatcctaattaaagctcactacagaaaaaatcattttttcaggcgaatgtacattgt

SEQ ID NO: 3352 - DNA, 941 bp, Cannabis sativa
gatggagtttattgttccagatcatctcccacttatcacatctctgacttgcattgagcttaaccaattctgaataagctctctttgttgtaaatcttccatcttgagcattcttccatacaagcatatcgttgtactcacacgggaggcgtttgattttactaatcctatcccccatctgctggccaaaaatctcgtgaagaagctcacaattccattcattaccattcaatgacaaatcagccactgatctcaggttgggaaatcgggttctacatcccatcatcaattctctaaactcattgtaacttagccatggtatccacggctgggaccatatgtctattgaatcccctttccctggaatagatgttgatgccgatctcaaaattcctcttgactgaagaatgcctttccacactgcagagtcactccctcgtggttctatgctccaaaaggattggtttctgcaatactttgccttaagacattgaacccatagcttgtgattgttgctagccacatgccaagcaagtttggagatgagggctcggtttgtgtcttcaagtctcctgaaccccaaaccaccatctaatttcggtttgcacagcttttcccaactaatcattgcctggtatcgatccctcgtagcgtcccctgtccaccaatatttcctaatcaacgcgtctagttcccgacaagtagataaaggcaccttgcaagtactcatagtgtagatgggcaaactcaaagccaccgattgaataagagtggcccgaccggcaaaggataggagcttgagcttccaaccctctaatctcttcataagactctctttcaatcttttgtactcctcccttttccgtctcttgaaaacgaaagggttccccaaatgcatttcattccccgaacattcttggacttgcagagcttccaatatt

SEQ ID NO: 3353 - DNA, 1157 bp, Cannabis sativa
caagttgccttacatcccacgattttgcaacagcgcttgtgagaacaattctgactgttgaagctgtaattacggggctaaatgtttctccaaagtcgattcctggtctttggttgaaaccttttgccacgagtcgtgctttgtaacgttggaaagaacggtctgaattccatttttccttgaacacccatttgtttccaactacattcatctctgcggttcttggcaccaggacccatgtcttattcttcacaagagctttatactcactgcccattgcattattccagccaacatgacttagtgcttcttcaatagactttggtacttcactgatcctttgccaactcgagtgggacagataggttttaggtttaaaaattccagctttggatcgtgtcaccataggatgagaaataggtgaaggctcatgtgttggtggttctgtatgttgactaggagaggaggtttcaggtgctgcatttggtgtgatgcgaggtgagtttgaagtgtctggtagagagcttgactttgtagatctgtttgatacatcaggagtcgaatcaagcaagttagacatttcaaggtgatcaatatgttgtattgaaggacttacctgatccgtgtgtggagacgacaaagcaggtggtgtggcaagatggctagtttccccgggataaacatcaggaacttgagacttagagtgtaaattagacatagagtgtggttgaaggataacagaccaacatggcgcagatatggatacagaggactcaggttcatgagtgtttaagaaaccagatttaaagggaaattcatcctcattaaagacaacatcacgagagatatacagtctacccgtgctgctaaggcatttgtagcctttatggctgtcactataaccaagatttacacatttggtagagtgaaattggaacttatgtgactgatatggtcttaggcaaggaaaacaggctgatccgaagactttcaggaacttgtagtcacgttgtttggagtagaccagttcaaacggggacttgttttgtaacagaggtgttggtaggcgatttatcaaataagtggcagtttggaaggcatcccaccaatactttaggggtacacctgcttgagcgaggagagttaaccccatttcg

SEQ ID NO: 3354 - DNA, 864 bp, Cannabis sativa
aacttgtgttttctgcaaggaagaaacagaggacacgctgcacctaattgcaaagtgtaacattacgcgtggaatttggttcaagagtaaatggggtattcggattgactagatgggttggaccaatattatggagttcgggaaatggtgggtggagcttgaggatcaagagttgcgtgtgttttccgtgggcctcttattagatgtgatgtggttttggcgcaacaagatagttcacaactatactccctgggacatacatctgctgtctaaggagtgcctctccaagacacaagagttttctatgagggaacaggaggtggagattactcctatgacttcaattcctttttcctcccagccaggatgcaatttcattccagttttccaagtggatgcttaggtgattggctctgaagcgggtattgcagcgattgttaaaactgttggtgactggaatgacacattggtagctcttgacttcttgatggttcacaatgtggtggaggggaaattagcagcaatcttactggctctttctacaacggcttcaagaggcttttctaaggtttctattgagtcggactgtgcagaggcaatacatggattacagacgggaaactttccaattggatggggtagttatccgatttttatggaatgtattgctaagattaaagaatttgagttagttgtttttacttgtattaatcgctcttttaacttctttgcggatctccttgcccgtagggctcgtatcaagagaatcaattttgttggtattgttagggaagtagccccctttgtggctagcagtgtgtgttttgttttaatatatggatcttaattagcaaaaaaaaaaaa

SEQ ID NO: 3355 - DNA, 1124 bp, Cannabis sativa
ctcacagcgtaagttttcatgggagttacttcggaaaatttgtcgagaaactcatggagcttggttgtgtgtggaagactttaatgaaatagttagtttggcggaaaaaagtggtggtagaatgaggggggcgcctgctatggaggaattcaaaaaagtattagatcaatgttgtttgatggactttagttaagtgaagtcggattttacatggtgtaatgagcatgaatcggatactattatggaaagattggatagaggattatgtaatagggaatggattgatcaatttgagggagcggatattcaattgttggattggtgggagtcggatcatcgagctagttgttgatattcttgttcaagacgaagtcgtgcagtgtaggaaatctaaacagaatacgtggtttcattttgaggaggcatggtatgaggaggaggaatgtaaagcaattgtggacaatagttggaagagtggggagcgatgtacttcagctggggcttttcatggaaaaaccagtcggcttgggaagcttcttcacgattggaataagaagaagaagaaggatttaaatagaagggtcacaaaggccaaaaagcatctgaccaaactttccttgtgtcaacaaccagaaatttggcccgagattaagaaagctgagaagcaattgaatgctttgatggagaaggatgaacagtattggcgccaaaggagtcgagctttgtggttgaaatggggtgataaaaatacgaagtactttcaccataaagcctcggcaagacgtaaaaagaatgaaataagagggatgatggattctatgggggtttggcaaaccgagatgcctgtggtgatgcaacttattgagagctattttcaaaatttatttttggcttccgaagtggatacgggggttgttgatgaagttcttagtgtggtgaggccgaaagtaactgaggagatgaatgaacaattattggagccttttactgaggatcatgtggttcgggcaatcaaggatatgaatcccacaaaagctctgggggaggatggtctaccggcgcttttctaccaaaaattctggagttcggtcaacacagaggtgattcgtgtgtgtcttaatata

SEQ ID NO: 3356 - DNA, 932 bp, Cannabis sativa
tcagtttgcctttcctcccattgggagggctgtgccgctctatggggcgtggattaaagcgggggtgcccattagagattgtttcgaccctgctatcccgagaatgagaatcgatgaaggaggtaagcatatcggagttcatactccggtgaagaagaatgataagggcaagatggtcatagtaggcaatgaaaacgacggctctagaggagggggacaaggccctagaacacagagaaccgttgggagggagttttcaccaaacgggttattactgcaggatgcaaagaaggcgtgccttaggactcaggggaatggccatttcgggtaacaagaagaacatggtaccagggtctttgaaacatcctatgaccaagattgataacagaagaagagattgtggtattattgccagtctaatggttgatattgggcccacacgagaccaaatggtagataggccacatgaggaaatttgtaaatcaagggtgccccatatgcacccagagcccacgtttgtaacgtggcccactgatactaaccttgaagatgtgattcaacaagtggtaaacccgacccagaatgaacttgggccctcgcaagttattgtctctcacgatagcttagacttttcagttattgggccttctttctctggtgcaaagaaaaggaaagcaagtgttaatgtagtgccagtgattgattcaaacaatacggacataacctccattggagataaacctccaccgactcctaccaccttccttcccactcttgaagtgaataccttttcccctggaagttgcagtcgggatggatccagctccaaacgaaaagctactccccgtaggcgtggagggagttcgaacggtagcaggaggggtgcgaggcaaggtaatagaagcagtgggaagtggtctgccaacaacgaa

SEQ ID NO: 3357 - DNA, 1450 bp, Cannabis sativa
tttgatcacttgagcaataagagagggctttgctcctgtgattaggatatcgtcaacgtaaacaagaagaaataggagcgtaccgttaatagctgtgtgaaacaaagaagtgtccgaggtggaacacttgaatccctaatcaagtagagcactttttagccgttcaaaccatgctcgtggtgcctgcttgaggcaatagatagctttgtgcaacaagcatacatgatgaggtttttgagggtcaataaacccaggaggttgggtcatgtagactctttcttggagaactccgtttaggaatgcattattgacgtcaatttgctgaatatcccagttgtatgtaacagcaattgaaaagatcacccgtatggttgaagcacgtaccacagggctgtaggtatctgtaaaatcgagaccagcagtttgttgaaagcctttagcaactaggcgggctttgtatttgtccaaggagccatcagctttgagcttttttcgatatacccatttgcactgaacaacatgcatgtcatccgaaggaggtaccaaagtatatgttttgttgcggagtaaggcatagtactcggttgtcataacattattccatacaggaatggataatgcttctttcacagatgttggcacacagtaaatatgtgttgaagtagctgcatagtaaatctttggtttaacgatgccggactttgaccttgtttgcattggatgtccactaggcaaaggtggaggatgttgaggaacaatatcgacatgagttgtgtcatcaatagggtcattttgaacaacctccagagtagcatgagggtcattcggagcatcagttgaagcagtagtagtaacaacttctggtattggtgcaatattagataaaggagcagcaacttcagtagtgacctcaatggttgatggagaagacaaagcagcaggtggtacctcatcaacaaatggattagtatataattcatgatgtattgtattataagatgaattacatacctgtgtgttgtcaagatcagtatgttatataggtgctacttcaggatggacattgtgtgtagtggatgtgttgttttgggtgggttaacatggtataatgaatgctggagacagaatattttgacgaaaaatagaggaagaagtaacaggggagtttaggaatagttgtgagtaaggaaattcatcctcattgaaattgacactccgagcaatgtatatgcgcccagtgggatgaaggcaacgatatcctttgtggaaggggctgtagccaagaaagacacactttgaggttttaaactcaaatttgtgtgtgttgtagggtctaaggaaaggaaagcaagaacactcaaagactttcaagaaattgtagtcaggggtaggattgtataggcattcaaagggagatttgtaagcacgtgtttatgtgggaagacgattt

SEQ ID NO: 3358 - DNA, 1102 bp, Cannabis sativa
aaagtaaatataattatgcattattgcagccttgaataagcagttgactgagtttttcttaccactgtagcagtggctatcatagtatagccatcccatctcaaatattctctaaaccttcctctccaagaataatacaaacttgaggcaacttcaacttcaattaatgaattcacatatagcttacaattcaaaattttcctggactccaataaaagacaacaattagaaatgatgggtgttataacaaccatcaaagcatgtctacaatatatcacaatgagtatcatctcgggacattaaatccaagcactataaaaagaagtgaagtgagcacattaaccactatttccactacatgttaatcacctagcaaaagaaataacacatgaaaagatgtttactagtacttacaaatatattaaaacaagaatagttggggtaaagagaagagtatctgataaaagaatctcttgcaacacataaaaaatgtgtgtctttattattgtagtgtatatgattacattctcaaagataataatcaaagaaataaatgccagataatgagaatcaaacttaaaaaaattaatagcaagaacagaacaattacttggttcagtagacaaaaataatagacttttgctaatgcttacatccaagggtagaacaccctcaggttcatattttctaagaggttttcaacaaattctttcaaaaagtacaaactaaaagaataaaaattagtatgcaatgatttcatgacaatagccagagttaacaattcttgtagaattatatacatttgaagtccaaaatcttataattttccctaaattcataacaaacaaaactaaatgttttgaagaggaaatttaaagctcaaatcaacttaaagatcaagttcttagcaagactaaatcagttcaaaactaagttttttcacaaataatagccacaatatttaccaatccataagaaaaagtgggtaaaaaaaccccaattccttcccacaagaatctttttcaccaaagctttatgtttaactataatagaagccaattcaaaactcactttcttcacaaataataccacaatattagca

SEQ ID NO: 3359 - DNA, 963 bp, Cannabis sativa
tattatttatttatttattaaaaagtttgaattatactaatgtatatatataaatatatatttacatgagagaatgttaaattgctttgttaaaaagaaattgttattataaaaataattaaatagggtaatgtcggaaaaaaaaattagagtgttccccataaatataatgcattatttatatattccatcatttaatattgtatttcatccgttatctcgctatatctcatccgttgttatcaccatatctcaccgtattagttagagacatacatgtcatgttaattaatcagtgagacattcaaagaggctatgcgcattcactaaatgttaatgaaaacttgtgttccatatgccctctaattaagtaagtagaagttgactaccactttactatacgtaattatgtacatttgttttaaaaattatttatcaattaatatgaatcaaaaaaatgtgaaaaaataagataatttaaagtaatttttttattattaattaattaatataagttatttaattttttttaaagtttgtaattatttaaataggaatatgaatattttttgttgtttttttataaaaaaaaaactgtaccgtgtattttattttttgaataaattagttaattaagtaaaatatactatttcattaagtttgttataaattcgattttttatttttatttctgtttatctgttaaatatcataattcaaatttaatttgaatatagatatctgaacattttagtatttaattaattttaattaattaatatatatttttttaattttataattgatatttttagggatgtgtttattgtgagtaatgaaagagattagtatgccgtcatttgatgggggtgaaggtagtggctaattatggtaagtatctcgggttgtcgtcatttgtgggtagaacaaaaaaaacagctttttgaggtgatcaagaaccgg

SEQ ID NO: 3360 - DNA, 1416 bp, Cannabis sativa
gttgtcaacttgggcaatgggtgatgcccctaggcatctaggttgatttctgagttgttgtttcgtgtgttttcagctcgtaaggcctggactttgatgcttcttgtctttaaggtgcataatactaaaagatagggatttggaaataacttagcagaatctaaacacccattctagagttctcggagtcaacttcggcatagggctagggacccctccaggtcaactactatgactagagaatactcaactcctagatgttatctttcttgccacgtgcaaaatattgatgtccacgccaccagggaaagtttctgagttaacatcccccaacaacatagccgacgaggtccaaggtttcttttcgttaaaaacctcgtagggtcatagttttagtccttccttggggccattcttgctaaggccaccagaaaggttcacggtggtggccttcaccagagtatttctagatatggtctccacctttcttgcttgcttaggcatgtttagaaagcatgtagggtttgagaaagttgttgttgtaagcttattcttcccaaaataccaaactgcttacgctaagaactcgttaactaagttatggttgaaaaccttatgtaatgattgtgaaaatggttgactaagtgtatttcttagagataaacctagagagaacggagaaaaatgttttgtattgaaataatggattattagtgcataaaggtttcaacccctttgaaatgaaataagaagtatttataggaggctctaatggcctttgttacatcttgaaagaccctaagtggtcccctaggggtaccacaaactatgctgaaaaatgtgagggggacaaggtgaaggatagtgaaatttaggtagtggtggtcaggtgccaggtcgtactgacacatgggatcacactcgcactacgtaccttgtaccaagactaactcctcgtacgtccattgccttgtctcagcctatgtaggggtcatggttgtacctcttgattcgtccttgccctaacgtgtctttggctgctttgtttttgttatgggctccttgccatgcttttgggtacttggtattttgctatgtgtctacccttgtaatggaacccttcatgagacttagtccactatcctaagcatttcaaagtacgaatggtcatttcaaattgataccataagatagggggtcttgtgtgaaatagttgtagtacaaaggaagaaaaggcatttcatggccacccaggccttaagtcgcgccaagtggatccctttttagggatcaaggacaatggaaagagggttcctcttggggactagcagtcggaggggctcgcgaggccccgagcactcgggtcctaggacatagtcctatttcggacttcctttctcactttgagtttccctt

SEQ ID NO: 3361 - DNA, 1228 bp, Cannabis sativa
aaattgtttcaaattgatcatgaatatcaaggcagtacacacaaacatatctcgataacttagttgtaaaaatgataatatcgataagcatcaaatattatgttataaccgaaaaatattagctgctagaattatttacaaagtaaaagaagtgaaataattttgttgcaaaagatagatgtaatgatttgattatataaaaaataaagattaaacttagtactctctagtcaatatgggataaaactttcaaagacataaaatatgtaatatgagatccaaattacttgctacttagcttccaagtgtagtaaaatttccaaacaaagacagtaatatttacaatttgacaagcagaatatttttgtactcattctttttcatttcatgatctttactactcttattcttgactcattttgattatttcattccaggatcgagtgttggggtccgagtccaagttggggctagggttagtggctggatgccggggtccaaattcaggtctgggttcgggctgaagacagggtctcaacaggaagttgtggtctatgtccaggtcgagttcaagccagggttgacatttaggcaaaggtcaagcgtcggaatctaagtctgagggctagggttgggttagggtatgggggtcgtggtccatgttttagagtcaaggcccgagggtcaggggccaagttgggtttggggtctaagtccgggctgaggttcaatctaggctgaggttcaagttcgaattggggtcaatgtccagatccgagttgggtctgggttcaaaagttgggtcggggtcccaggtatggactggggtcagggttcgagtgtaagtccatgtcgaggccatggttgaggttcagaccaggagtcgggcaggcccgaccccaggcataggcaagctaggcctatgcctaggacccacctagcccaaaggcccaaaaaaactatcctcttttaaaaaatgcacatttttttactgattttgaaaatactacattttttttctacaataaattcaaggtctgaaagatactacattgccaaatcagaaatgaaatcatgatctaccttgaaatctaggcattgtattgtagaaaatatcatcaccaattattattttgccaaagtaaccgaaataagagagtagtagttgagccactttcgctgtgtctccaaatgaatgcaggtacgatcatatcagcactaatgcacc

SEQ ID NO: 3362 - DNA, 1155 bp, Cannabis sativa
atagtgccacataaccttatcttccatatgaacgctagcctccggaagttgtaaaataagattcgcatcatccgggttaaaattagcacgaatgaaatcctcatcccatgcaccatttaacaacttcaaatcgatcacccgtagttgcgaaggcagattaggccggtcatataccttgaaactccgaggccgaggcaaccatggatcttcagcaatacgaaccaaactcccattcccaatcctccacctatatccattaagaataatctcctttccccacaccaaacttcgccatacaaaagaagcatgcgccccactcttagcctctaaaacatccttaccaggaaaataactcgctttcaacacccgactacacaaagatgtaggctgccgtatacatcgccaaatttgcttcgcaagtaaggcttgattaaacatctccaagtctctaaaccccaaccctccttcctccttcggtttgcacaaatatttccacttacaccaatgtgtcttcttatctttttcagttgatccccaccaaaatctagccgccattctatggatgctattaatggtgctcttggttagtcgaaaacaactcatagtgtatgtcggaattgcttgaattaccgccttaatcaacacctctttccccgccatggaaaacatagaagccttccaaccccttagcttattccacactctgtttttaattacatcaaacagttgttttttattacgccccaccatagaaggcagccctaggtatttcccatggttagccacaaccttcattcccatgtatgtacccatggccaccttctcatctgcacccactcgtcgtccaaaacaaagctcagatttatgaaagttcacctcctgccctgaagcttttgaatatttccctaacaacaccttgaatcgatgacaatcattcatagtcgcatcaaaaaacaccatgctatcatccgcaaaaaacaaatgtgaaaccgaaagaccttgcctaccaaatcgtataccatttaatctccctgctgcctcctcatgatgaatcaagcttgagaaagcctcagcacaaatgagaaataaaaatggcgacagtgggtcaccctggcgaagaccccgctgaggaacaatattccctttcacctctcc

SEQ ID NO: 3363 - DNA, 947 bp, Cannabis sativa
gcctcaaaatctattggcttatcaatcaaaaatctgctcataatacaccacctatcgtcatagtcattagccctcgtagcgcttgcatcgtgggacaacaacaccctcttcatccgcaatagttatgtccgccccttttagtttctccattaccgtgcaaagaccagagaaaaacaaaaacagaacagaaacaccatgaagaaacagcaccaagaaaccccaaagaaactacataaccatgtcaaaagacaagacaattctcgattctgcaatagtagaaacaaaatcattagtctgcaatagcacaatcaagaaacccctccctaagttgttgccgtctgtcagcgcctaaacgagcaggggagaaacgttcgtccgtcgtcgacaacgagcacgggagaaatcgtcaacaaacgtccgtccgtcatcgccaacgaacagagacgattgaaaccacagtgactgaaatcacaataaagccttacagagacgattgaaggcgtttcgtattctttgtatcgtcacagacgacatgcgagagagagaaaccttggtaattttatatttgagtttattatattttaaactttgctagcttatttgaattttattctgcataaattaatattcatgttcaatcttgtttatattgggaggtgatttccaaacttcatagctagctaaactcatgtacagacatcccaataaaactagagcattgctattggacatgtgcagtgtctagtattttttagaggtagcacactatgattgattagttatattttttaaaaattattatactaaattatatgaatcaaatatttattaattacatatataacacataagaaaagaatactaataaccaataatatcttcgagcattaatttctcataaaactactattccctcagtcatatcttttatcagggcattcccactg

SEQ ID NO: 3364 - DNA, 1061 bp, Cannabis sativa
atgaaaaaaagtcaagttttcatcactaaattaaaaccaaaaaatcttgcttgtttgctaaacaaaacttgcatactgttgattgacagttaaatgatccagatgagcttgtttctcctctatctaactcaacaaattagctagattgttagctaaattattctgagccaaaatattttttttctttaactacataaaaatctgttgaaatatctcccaactctttcttgctaaacttcttcaagatatgcttcaaccgattaaatttgctaataatgctattaatacccccatcagacataggcttagatcaactctacataattgtctctttgaaaaggttgtgctctttccagtaattgaaaaattaaaaaagtttgatgcctacatttcccactgcaaactttttagcaaggcaatagttatgatctgaacaaacttcccattgaaaaatttcctcagttcgagggaagcaatccaaccacttctcatttttgaaaatcccgtccaacttagaataaatgtgagctccctattcatgcttattagactaagtgtattttgaactcgaggacttcaactcatcaacttaaccaaaaggcaaccattgttgtgcatttgagatgtcattggaagtcacttgacgccccctaaaccaatcatcatagtcaaacataacattaaaatcatcaagtgtcaaccaaggatgatttaaatcgcatagactaaagatcccttctgtcactaatgaaattctttccatacacaaccgtaataacaaatttagaattaagatcagaaactttcaactcacaatactccattttaatgtcctcattgagcattgttaccttcccaaacttcctctaccatataagaagaattcgaccatccagaataaaactggaataataatcccaattagggaaattattttgcatcattttcaaaacattctcacccttaatcttagtttcaagaagagcaccgaaaccaatattattcataagacaaaggtcgaggatcgacctttatttatttcctttgttcatccccttaat

SEQ ID NO: 3365 - DNA, 631 bp, Cannabis sativa
cgactaatggcgttgtcagaaccaaggacagccggtcctgggtcgatgggcaagagcagtggggatcgtggcccgagacggggatcgaaggtgatggatcgaactggttcagggaagggacagatcgcttaggctcaatgggttcccaagatgatggctgagggagggactcgagataatgctggaaatggtaatagatctcttgatattttgaaagttggtgaaaagtctactgtgcaatttcctatttcaaaggagttgaccgtggaaggaaaaggaaatagtcctttggttttaaataatgtgacagatgtggaaaaaccattgggtattgacaaggttgtaaatgtaacggctaatttgccttttgagagtgttgatgcaatgggcccactaaatccaaatgggccgactgggccgaataatacaatggacattttgtcctctgggaagtgtgtggcaatcaatggccacgttggaaacttgattgggccgttgggcttgggccgtgagggtcctttgaagctaatggacaattctatgaggcctaagtcttttcctttggttgggtccagtacaattattactaatctaaaaggaaaaaggcctagggagatggagaaggggccct

SEQ ID NO: 3366 - DNA, 1439 bp, Cannabis sativa
ccagctaaattaaattattgattactttgtaatttggaaaattaaatcattatgagaaacaaattaatgggaaagttaagactttttaattttaaacactagtcgaaggattattattctataaccattcattaacagtctcattgaatatattcgatggacaatgatgatattagatatgaaattttaataagtgagaaacttaaccttactaaaataagaattgattatgataatgaataaatgtatataagtttaatattccaaaaatttagattatgttaaattggacatattttattaaatattaattatatgaatattagggtaggattataattaagctaattatgagttaattagtgatttttgagtaaataaataattaaagcataatttattaattacataaattttattaaaatatgtgggtattttatatactatttcttaactaaaatatttttgggtccagtgactgaaaactcgatgtatttgtcaaagatgtcacgacggtaatagaatgggatatattggatttatatcgaattagtttagcatgatgagttgtcagtttattttagaatagttagtttgagtaaagtacccttaggttatattttagtttaagtgtgatgggaggggtaaaataatcattatgttggagttaaattgttttgtcttatttaacaacctagtataatcttagctgaaattagattaatttattaatttgatagttgtaagagttatcactcaaactttcatctttttctctctcaccatcaaaaccctaagaacctagctgcaaccagagttttttcatcatcatttagtcaattcttagttgaattaagcaattttaggggctaagcaacttggaggtaagttcttcattgtttttgtttgatttctaagcttcaaaattaagttttgttgggtttcatgtatggttttgagtctgtgggttatgttgtgttcaaagcaggtttctaggtttaattaaaggttgtttaagttttaattggatgaatccatggttgctaggtcttgaattgagtgaattgagttaaagaactcaaattttactcaactattgtgattttgtcattttgatgagtttctgagttttgaatgtttggatatgttaattttatggtatttaattgttctacaaagtttgaatagttttgaagaatatttggtcggatttttgaagtaaaaacaaggttttccatttttgccagtagaaaccgattgatcgattctacaggttactgagaaacagcagactggttgctcagcaggggaaaccctagtttttttttcaaaactagttttttgtttgggatatttttcaaaacctagtttagagtgctttagtgatgtttaggctgcttctgaacccgtaatgattacggtttgtccagttgtgaatt

SEQ ID NO: 3367 - DNA, 770 bp, Cannabis sativa
ttagaggtcatgatgaatctaagacattaattatttgttgaaaccatttccatcgccaacaacatcaaaacaaattttgcatgtcttgggaaataaagggagtaatgcgatttgtgatgaaatttgtggtgtaaaattttctataatagttgatgaaggacgagatgaacctaaaaaggaaaaaatatcaattgttttgcgattttttgacaaacatggttgtgtgcaagagcatttttttgggcttattcatgccaaagacactgatgctttaacattaaagcaaggtattttttgtatcctttcaaatcataatcatgttgttcagtctatttatacacaaggtcaagatggtgtaagtaacatgcatggtcaatagaatggtttctaagttttaatttcaaatgaatgtccatatgcttattatatgcattgttttgcaccttgtttcaattagcattagttgttgcatctagatgagttattattgtccatcatttttttacaaagtttatactttattgttaatatttttggtgcatcatttaaacgtaatgaccaactgagttgctcaacctgcaaatattgttcatttacttaagatggaagaactagaaagtgagaaatgacttaatcaaattggtcccttgcaaagagcaggtgatattcattgaacttctcacttgagatctatttctagtttgataaagatgtttagctctacatgtgaagttttattgaattttattgaagatgccactacttttgct

SEQ ID NO: 3368 - DNA, 636 bp, Cannabis sativa
tggcccaacactagcaccagtttccttttccatttccacattaatctccacatcagctgccacatctacacttccacctattcctcccatatccatacgtctctttttattttccaaaacaagaatcaactcttgattgttggggttgactatgtctccatgaatatttttagtaatattccccattaaagtaccagctacccgatcagctcctttattcccttgatttccttctacattaactatacccctcccattactccctgataacatgggatcaacatccatgattttagtgatatcggttgactgttcttcagcctcattccgacgaacatcgccaccacttgccggcacaggctcatcattacctgtccttaaccattgtgctccaatctggtaattcctcctccgcatttgagctttcatactgataccataaggtttcacattcggatcaaagtcttggtaaaaacgcttcggacatagtctttccgagtgaccaataatcccacaaatgaagcagaacaacggaagatgctcatacttgaaattcgcccaaatccagtcaccattctccttacacagtttcatacgtctcttcagaggcttctcaatatcaatagtggctccacc

SEQ ID NO: 3369 - DNA, 739 bp, Cannabis sativa
aaccgctcttccgatctaataagttcaataaaccagagagaagtaactgggaatcacagatttggtggatactataattactaacaatctaaggctggaacgcttttatatgtctctttaatcttcgcaatctgtttctaataccagctaccatctatagctgattgatagtcccaccaattagcatttttatatatacgctatgaacaaattaaatcgcacccacaaattgtctagcttgttggatgcaatggcccaagcatagttctcaagagccgcttcattccatatcaaggtattcctaaaatcaagtcctcccactatttttgatttgcaaagtttagacctagaaacatatcatgggttgcttgcttcagtagagcctttccataaaaaagacctacaaataacatttatcttctttagaacaaccttaggaagaattataatttgcgcccaatatatatgaatagctatgcgaactaaattaatcaataatggtgtgcgcccagcaaaagaaatattctgagttccccaaattctaatctgctgcaccatcttttccacaattatttcacattctagtgtcaatactcttcttgcacaaatcagaattttcaattaagtatctaaagggaagatcacttcgtacaaacccagaagcatccacaattctttgcagctcccgttctttcataccacaacagtataaagctgatttcaaatcatttggaaataa

SEQ ID NO: 3370 - DNA, 1158 bp, Cannabis sativa
tctttctgctcttccattttgagctgaggtgtggggacatgagtgttggaattcaatgccacactcattgattaagtctgaaaaggcttggtattcaccacctgaatcagatcttaacaacttgatttttctttcaaacttgttttcaacaagtgccttgaattgtttaaaggcagggagagcatcattcttctgttttaaagggaagagccaagtatacctagtgtaatcgtcaacaaaatgtatataatatttataatttgagtgtgaagtcactggtgcagggccccagagatccgtgtggataacatctaaaatagccttggctctactacttgaatttgcaaagggtaatgtgtgggacttcccaaactgacaggcatcacaaaagcatggtttttcattaattgaagcttttacattagacatcttaagaacttgatttaaaatagacaaagatggatgtcctagccttctatgccaggtatcctttagggaaatagagttgacatttttggatgattgaacacgggcagtgaaggaacttggagaagattgagagtgaatgtcatggctggtagtatcaggtctggtttcgatcttgtagagtccatccctaagcacccctctcagaatcaccttccctgctagatccttcacacaacaagagccagcaaaaaattccattgagacatcattatcatgagtcaatttagacacacttatcaaatttttggcaatattgggaacatgtaaaacattcttgagaagtaaagtagaatcagtaagagtgttaagtgtgctatttccaatttgagagatggaaagttgactaccatcaccaattgtgaccttctccttaccaccataactgcttttgttgctcatttttccagcctctgaggtgatatgattactcgcaccgctatccacataccacccctcgtcattaagtgtctctggtgtggcaacaagagcatattgttgttgtttgtcaccttgagattcagtgtttggaggctgaccattatagttctcgtcatatcgattatagcaaatggctgcagaatggccatattttccgcatacttggcatgtaggtttagagttattgtacctgcctcctcttcctctgccacgggttcctcctcttcctct

SEQ ID NO: 3371 - DNA, 1132 bp, Cannabis sativa
ctctcccttttggttaaacaacatgaacctcagattctttttgttatagagaccaagctcagtgcaggttctatagctcggttcaagactaaactctcttttgattatggttttgaagttcctaggagaggtctaggagggggtctttttcttttttagaatgatattgttaatattaatattttatcctactctagtagtcatatagactgttttgtagaaataattgataatataaattttcatctttcttgttattatggatccccttatagttatggtaaattggattgttatactttgctcaatcgtttatatgatgtagcaccctcttctccttggataatcattggtgatttcaatgattatcttggtctcattgataaatcaactagttctaggccaccatccactgctatggttcatttccagtcttttatcaataaatattctctcattcctatgcctttcaaagggaaccgattcacctttaagcacggcaagactctcgaaaggcttgattgggctgtggttagcacgaattggtttgatctttttcccaaagcttctctaactcacctcccttactttggctcggatcataggtgtctcaaagttttatttactgatcctagtcaatctctaaaccattactcgggctttcgctttgaaaattcttggctctcagaacctgatttcttcaatgttatccattcgaattggcactcggttcctcataacaacagccataattctctttcctctttccttgctactcagtccaactgtgtcaacaagcttaaagagtggggtaaaaacaagcgttatttcaaacataccattcactatttacaaacctctttggaaaacatttattcctcccctactctcactgatgttgatcttcagcgagccaaagccattcaaaatgaccttgactgtgctctctataaagaggaaattttttggaaacaacgtgctcgtgcttcttgggtcaaggctggagacaaaaacaccaaatttttccaccatcgtgcttcttcttgtcgtagacataataccatttcccacattactttggctgatggtactactacccatgatttcaatatcatttgccatcaattcaaag

SEQ ID NO: 3372 - DNA, 726 bp, Cannabis sativa
aattaatagaggcgatattgtctctcctaataaaattgaagtatatttgccttattttgacaagatatttactgctaatagcattagggaaaacttttgttgcctctaaaagtcttctctgacatagtttatttattagaggcaatttttaggggtgaaaagtgtcgcctctaaaagtctgcttctagtaaaaaccctaacatctttcctgaacccacactctctctttcttaacttttctttcacagtgttttcctttcaccttgaataacaaaaagctaaaaaatgccaatttgactggtcgtccccatcacaaccaacctcctctatctttgctcacggtctcccctgtacactcacccttccttttctctttcttttttaccctgatcgacgaacctatcaccgccccaaccacgcctctttctcgttggctcaccttattcccgttgattttcacgaagatatataaacaataactttttatttattttattatatctgtttatatatatatatatatttcattgttagttctaagtttgattaagagaatgtaagaataaaatggtggaggtcacgagtgtacaactattttagtgcttccaagactttctcaaaaaatgacaaataagacaacacgagggtgacacatctattgtggagaagaagacattgttgcacctaaaaaagcttgagctgaatatattttcttttttttaaaaa

SEQ ID NO: 3373 - DNA, 820 bp, Cannabis sativa
tttagagtcattgttacacgtggcggcctctacttgtcccccaagtaactccaatccacccaatgccacctcacaggtattcgtactattgccatgcaccaacgttgtgccactaccctctgtaccttgtactactgtgctatccgccaggctgccatccacgatctccctcgactcctcaggtaccggagtgattggggtcccatctccggccattcgattttccgatggaccagcgtcagcattcatctcggccagagcttcacgatgaatttccgtaccaaccaaagcgggttcgaaaccattattagctcgcaatagttggtttctaaactcctcctgggctcgaacctcctccatctcttgattcattctgttcagttcatacggagcataccccgaaaagcaatccttgaacctagccccgaggcgcatccaaggaccgtacatcggaacttttttaccgaagtcatccgcgatcatccttctttctctttggcatctcatagcatcatgtccgatcactccgcagttatagcaaactagagggaggttttcatatttgaaatagcaccacagacacacaccttcctccatgggcaagaaaagacccaccagcataggcctcttcaactggacagtaactcgaaaacggatgtactccctagacggaaaaccattcctccacatcctgtcaataagagcgtcctcaccaatacggtctgcgatcgccttagcatttttcatggtccaaaacctaggaggaatctcatagacccgcacccataacggtgaagtcgaaaagtccaccgctctccag

SEQ ID NO: 3374 - DNA, 966 bp, Cannabis sativa
caaaataaatttttcattcccttaactaaattatctaattattgaaaataatctttttaattatttagtaaaatcattttctactaactctattttttcatatgaaattctcatttctttagccaaattctcaattttcttgatattatctttttattcaagttgtaaaatatgtctattttttccaattttttttttcattcatatagccaaattctattttctcaaaataatcacgcattcctataaccaataactttattttttcaaaataatattcttattccttttgtaaaattattttctcctatctttattttttccctttagccaaattatttgttttctcaaaataatctttctattcctttaggtaattcattttctcctaactcttttcttttgaaaacaaattttaagtccttttgccaatgaggttagtttttcaaaaataatcttataactctttagttaaatcattttattttataaaaaggtaatcaaactttattaattagttaaatcattttaatttttgccaaagtatctttttccaaataagattattgtttctttagccaaattatctattttctcaaaatgctctttttattcattcctctagtaaaaatcattttctcctatcaatcacttatctttctcctcgaatatgctctcttctctctccttcttttaagagcgaaaaccatgcacgataggggctttcatagtctgaatggacatggaaagttctttaagaattgacaggttggcgttatctgccaagggcaaaaatctatccttaaccccactagttttggttttggatataaaaatcatctggtgttgatagttgtagaacatagtataaggtgttcatgctcgccttaacaaagcatggaggattgattagaatatgtgaacagacagacttgattgattggctacaagatcaccataaccatt

SEQ ID NO: 3375 - DNA, 938 bp, Cannabis sativa
  modified_base (272)..(281): a, c, t, g, unknown or other
aaaaaaaacaaatgaaagtaataaaataacaacatcaaaacaataaaaaaaattatatacaaataacaaaaaaaacaacaataacataacaatactacaacataaaaatataccaaaaaatcgtattttatgtaaataaaatctaaaaaattgtaaaatttttgaaaattaccgtatttttgtaaatttttttattgttattttttgtattttttttttaaatgatcccattatttatttttttttttggtaagttgaaaaataccactttnnnnnnnnnnttaatcaaatttacctctagttttatatttaattgaaacatacctctttttatatgtaatgtaaccaaaataccctgatataagagactcatatggagagtatcttgaagtgacaggggcaaaattagtacaatatttgaaaaaaaggtaaaagtgatagactttaaaaaacggggtaaaaataaaaaaaaagacaatataaaaagagtatagagtgtaatttttttttttatttgtgaatggtgggtgttaagattttgtgtgtgtgtgatggataattaattataacagttctaagcaattattggtgacgtagtttgaacaatatgtgtatgcataatttatcaaaaacagaaaacatgtacatgcataaatttggatttgtattacatttacatgcaacgtgatttgacatcatatatattattttacgaataatcttacttttaatgtcatttttctcttcttttgttcttttcctacacaattatacgcttctctttctatgatatcctatcacaacacacacacaatgaactaaaattatttttatatttcaaataaattgtcatttcattagctgtaatgctttgtcaacgcaagttttgagctaattaacataaagaacaaaagtgcaaaacattatttttagctttg

SEQ ID NO: 3376 - DNA, 1213 bp, Cannabis sativa
tgtgtacaactcacctaagtcattcaaagatgtttattattatctacaaaagtagaatgtgaaagcaaacaaaagcttattaataataagaaaccaaatttgctttttgggtttttttggtctaaagatttactaacttcaaaatatttttagagacagagattattatgaggttcaacttagggatctgcgcaatgataagctttagcatttttttcatgggctgattgtcttctttattccttttcctttctcaaaagaataattctgctagagtggactgagcttgatttttctaatctcttttgatatgattagcacaatcatggatgaaaattatataaatatattaatcaaaacagatggtacttgggcccctgaatttacaggcaatttaaagagtgtgaattagatgctccatcttttaactttatgcttctgcaagtgatccttgttaagtcatttatacctctttggctttttttaactaagtctttttttgcataatggaaacttgttcactaataatatacatgagttagattcatcgataatattgctactttagtcctaagtaaactataaaaaaggtgaaatattagttcttattcagaatttaaaaagggctaaaatggtatattaccctaatgagagagttgtggttacatcataaaaggattacattcgcctttagtagcaaaatccaacctctaccaaaccaaatatcaaactgaattttgaaatccaacgttgaaaacgaaaacccacacaaggaatacatgcatgcaaataataaacttctatattttataccaaaaatgatcaaagcatgcaaatagctagctagctttaaaccaaccataactaaaacttgactcaaaacttatctaacatagccatgttaggactcaaatcccatacaaaaatgatggccacttccctctttccaaacacgatcttggaattaaagaacaacatgccaaaaagtcaagtattattcccccaactctcactactattccttattgagcttgctttgcttatctcatacgcaggtgacactatttatttattagtttcttttgtacaaatagatcaaaaaagaaaatttatcaaactcaacaacataaaatgaaaatattaattaacaaaataattatctattattgttatttttaagcttgttttgtagttattttgctagtatattata

SEQ ID NO: 3377 - DNA, 1898 bp, Cannabis sativa
agtttcagctttaattatttatgtgccaaatctgcgatctggtcttctatttactctatccctttagtttttcagaatagtaaataaaagagtgcatgaaatatggcttaggagtaagaagctgaattaatggttaataaaatgatccaatatataaatctatttaaatatataataatataatgccatacatacagatatataaatatcatatgtatactaataaaatataaatcttgtaacatgttacaaattacatatattatatacatgccttaggtgtgccttcaattggggtttaaaattatgtaagtaaagtaatacatacagacttaacttaaggtggcgaaaaagaaaaagaaaaaagagaattagaaatcaagaaatattataaattatatatttgatcaactagctttataaggaaaattaatattaatatatatagtataattagaatatcttatatatatatataagatgtattagtatgtatgaaaacgaattttagtactttgttgacatgaattatggttgcatgtggtcaaagccaataagagggtcgtgcatgaaaatgcacgaaattgtcaatggctcggaagccgagttgactcggtcggccattgccttgattccatccgagtttccgacttttttagcgagttcagttacactttttttatatatatataaaatatatatatttatattatatatatataggtaatatatagccttttcattgatgtggcggcgtgactaataaaactttcggtttctcatttcccacatagccaaaaacaaacaaatacaaattaattatacaattactaacatacaagtttttttagaaaatgtacaacataaaagtttaacatatactgatacagtatacatatatatgtagtagatatatacgtcataaatatttgttattaatatttttaaatttaaacattatattaataatatttgactgagagaaaatcgtaagccaaaaatgtaaagtttctttcaaacaacacacgtttattatttatattttaagggtaattatctcctctctttcttttcggtaattattaaagatttggccatcgatagtgctttcacattcttaactaaccaattaatatgtaattaatgctatacatatatattaacactagtgtatagtcaacttgttaattaattatttattattttatacatactcatatggttgggtactttgtaagtaattatcttatgtatgccaaaaaacatcattaattaatttattaattcattaaacaaacgagtgctcttatgattaattagtgtattttaattgataaattatttgtcacagagaccattaatttagttgtgggaagaagatggtttaacgatataataatacatgaatatcctacataatgggctagctttaaaaatatgaaaatcattcatatttttgttaatataataataaacataaatgatcgttaataagtacctgatattctagtcagaagtcgttctaatcaatatattatttgctaatgctattgagacatctgtccactcgaagttaattagaattaataaataacaaaatctgcctgataatatttatcataatatgcttcatttttttttctgtttgtacgtactttgaatattttattatatactaattaataactctcttaacttctcacacaccaatccatatatgtcaacgtggatcatcttcttttttcaactttgtttttttgaacaattcccatctgaacatgcaggtacaagtaaatgtagtgtgtacattcattattaaacaactatatagcaacatcaattatatagtaaataatcaaaaaattatgtgtgaaatctatacataaaatatataaata

SEQ ID NO: 3378 - DNA, 1922 bp, Cannabis sativa
tttatggacaataggaaatgggtcattatgattagtaagtactgtgtttttttcttttatttggtagctgacaaattgcaggtgcagtaataattcattgacaaccatattgtgtctactttttcactattcacaaagtttggtttttgataagagtttttaattaagcttgaaaagaaaataaaagggtctctttctttttttactttttttgttttttaattaattaaagttctcattttgagtatacatataaatagtgagaagatttgtgtaattgggttttgtttgttttaaaagaaaaattaaataaaaaaggccatgtggggagcaagatgtggtgcacatggatttagccaattccaaagcctttgaggttttgaaagaaaacaattgatattaatgggaaacaagacctttgcttttctcaagagaatcatcacttgcagataagaacaaggtgtttggaagctgagaaaacacaagaaaaaaaaaaggacccttttcaaaagtctcatttcaatcaatgtaagttcatcttctaaatccacaagtttttatctttttttttctaatttaattttatgattttcattttgtatgaaatctttttgcagagacttcttcattggtaatcttggatcaacaaaactcacaaaaataaaaaggtaaaggttagaccttttttgtgctacaaaaaaagtctctttttggctcacacttaaagatcaaacctttacaccttcttctatactaaaaatccaatctttatttctttcttatggagaaaacaccaaaaaatcacttctttaattctatactatctctaatactagtcctttttccttcactatgtttagcttggtttctagggtttggattaataataactccaatcctcataacctttccaattttgattctctcaactattttcttcatgaccaaaaaaatcatgatcactttagatgaaaacccaagtgggatttcactagaaaaagaggtaataacaaaaacccaagtagtggaagagtttgagaagctaaaaaggtatgatttttatgagccaagtttagagtcaatatcagaaaatggtcaaatccattatgaagaagaaagtgaaggaagtagtgttgactcagaaaaaagtcaaagttttgagctcaattggatttgtacttcttcttcttcaactaatgtagaacaagatttttcaatctcagattcttctttctcagatgaagatgattatggtgaagaagaagattatgataatcttattgagattaacttgccagaaagagattcaagtgacctaaaagaagtagaagaaaatgagtcaaaacaaaaattggagtcaaaacaaggtcttatggagcttttaggagatattaatgagatgaatgaagaggaaaatcttattgagattgacatttctatggggtctataaagtgtacaaggtttgagattaaggcataatgttcttgaatcaattaatatatttttcttctttcattttggctaatttgtatgtttattaaagcctagttaaggtttttctcttttttttagggttttggatttttttttttcttttctttcactttttgtgatgataaaaaatcataaaattgatgagctaatttcctttttttaatttagaaacatgggcatttctcataagtttgaagaaaaataagtaaataaaatgtaagagagtatgttcattgatcttatttcattttattaattaaagttttttatttaatttgtttatagggtcaaatctagatgttaccaactaccatatataataatagaatgagccaatgaaagtgtctttgtcatggcatgggaatctcaattttgacaatgatgataagattttgtttgtttttttgttttctttattaaatttata

SEQ ID NO: 3379 - DNA, 1515 bp, Cannabis sativa
aagaagtagttagcacttagttgggggcagtctatgaacaagtaaggaaaagcgagtcactgcaaacccataaatctcttatgtaaacaactgagttccattctcacattctcactcagatcacaccttcgccatgaaacctcttccaattgctcttcctacattcgattctcttcaactcatgttcctttcactggtaatgattcagtatccccattccactaatcgatttgatttgaatgtttcattatctatttctgtggattattcttcttaaacttccaatttaattaacgattctgcttcggattagacacgcgattcgttaagatcatttattttgtttgttttgtttttcaagatcggtacggatttattagtttaaaatatataacttctgtgatctagaacagtgaattttttatgattggatcagctactgtgtttgctaatttccaattttgtacctaattgattgattggattttgcttaatttaatcaggttattttgcctcttgtcgcttctggagtttcagataattcggcaatgtaaggtcattcaaccctcttctattctttttgcattttttaatttgaactcatgcggattactaacgatttatgatgggtttttctcataattttttgtttttctcagtccgagagatatcagtagatatcgaccattgtatgaatgtgagcaatgtcaaggaagaaaggtttttaatcttatacttttactcgtaattttcattagtatatgtgccccctttggaatgtagtatatatgttcagacttgtgtacattatgtgctatgctgcgttgatttactttgtgattattgctcttttctcaggaagatggttcttcagttactggacttggtactcttttagatcaacaggtatttagtatttagatgaaccattatgttatagaaattattgtcaatgcttattttgttttaaatttggtacaggattttgacataacagtgatgtatactgacccttctggtgctgtgcggcttagaaaggtgaaaggcagggacttatctgcttcttgggtcttggaacacccgaataacgcaaacagtgatcagccacagaggttggaggtaatttcattattagaaggggaaaactctaatgtgcttaagggtatcatcactaattcatgtaaacaaactacaatagaagtagagaaggcacaacatattcgatagtaatatagatgtgaagaataggacaagaagttatcatctgcttttatactgctgtttgttctctcacaagtttgacatcataatgcaagctattatttctaatgtagatgtattggggaacaatgtccttgattgttttcttatttccagattctaaaggactcatttcaatctgtggaattgagagagacagatgagcatctatcaggagaagatgatgtcctacatcctaatcagttgtctatgagtccagtgaagctcatgcggcaggtaaacagtcaaatgctt

SEQ ID NO: 3380 - DNA, 846 bp, Cannabis sativa
aaacttttaactcaaaatcaacattcaatgatgtgttagtacattgtgtggaatataccttcttatatgggtacatttccatcagattttcatgctcaacaaaagtcaactttacatgaatttactcaaaatctacattatgtgatagttcaattaaaaagaaaacaaaaaaccagaacatttctatcagattttcaagctcaaaaaagtcagctttacatgaaaaagacacaccatttcccccaaaaaataaaaattgaacctttttcaaagtaacccatatctcaaaacaagagaaaaagttcataactcagattcagaaatgaaaaataaagaaaagggcattgaaaacattacttgaggagctaaaaagttcatatctttagaacttccaaagccatgaacaataatgatcttgtaatttgatctggttttggggacacccttttctttataagccaaaaatcttccatctttcaatctaattctttgggaaattatgggatgagaagaatcatcatcatcaccatcaatatgtggagatggagattgatgagtagccatgaaaataatacccaaaacaccaatcaccactctcagagctgttcttgaaacaagacctgaattttaaccaataataataactacaagaccaaaataatttatgggcaatcaatattttcccggaaagtgaaagaaaatggccaagaatttttgctcacctgacattattagtacagcagaaatttctccctttaatttgacttcgaacagagttttttttttttgcttgtctggctttttactattaaaaaatacaatcatttatttatttttttcaaatca

SEQ ID NO: 3381 - DNA, 1449 bp, Cannabis sativa
tatgggattatgcttgatctatagattttaaaattaaaatatgctttcatttattataaaaaggatattcatacacaagtgtttaacatttacaataggtatgctctattgacaaaatgatgaggaataggactaatttttcctgatgaactttatttccgtttctccagttttgttctggtgaacatactggaaaggggttagtttcgtttattattctatcaagaacacttatgcattttgtactatcttggtgttggtattttcataatatagatgtagatgctttaatttgaacccaacttaatacattctcatatggaaaatactcactttgttgctactaattcggcattgctaagggaggttttgatgaaataagaatattgggcattagaactggaaattatttcatgtgtcttcgtcttgaatttatttactatttgttaccgaaggagaccactcttaggtacctcccagtcccctccttgctagagtaattaccatttttcatgttttgttgcactttattcgttttcaattttactttttttttttagtgtttttggtcagtttgtttgattgtttctttctatttgtaggatgcatgcttttgcagagatttttaacccttgggtagctggagtggataatttggagtatcaaaaatttgactcctatacttgggtgttcaggtgttgtctttacttggagagaggcggctctataatccccttgcttgtagcctggccaagtacacttaattttgtagcctggccaagtacacttaattgtggagttagtacctcttggaatggggatctcctagctcttgtagcaaagcttacccattctggtacaattttactttaatgaagatttttctttaaaaatatataaaattgtaaataattttccaaaaaagaatacttattttaatgatctaggattattattcaaagatttagcaggtttgtttttaaaatttcaaaaagcatccctaattcatgtcgaccaatgattaacttgtttggatagagattctccttatttcctttgagatgattagtccttgtagcctttatagcctgtgtgacattattttttcaatgaatttatttcattgctttcaaaaaaaaaaaaaaaacaattgtgttcgctttcattgttcagaaaaaaacatttatgttcccttggaaaaaaaacgttaaagtagaaaagaaaaaaaaaagaaaagaggaaaaaaaacacaatcactccccaactacaacatcctactgaaagagacggttgaaccatagatgatgcgcgaccaggaagaaatttgaaccaattttcctctctgcctagtccacatacacatacattccatgtaaaagcctctctttctctctcaaaagcagcagatacaatatgcgtaaattcaatattgaccccattcctcaatac

SEQ ID NO: 3382 - DNA, 1636 bp, Cannabis sativa
tgtttgttttgctgtaaggttttgtgcgcggcttggaaggatgacgggacaactgtcttttctggtggctgtgacaagcaagtgaagatgtggcctttattggctggtggtcaagctgttactgtggctatgcatgatgcacccgttaaagaggttgcttggattccagagatgaaccttttggtttcaggaagctgggataagaccctgaagtaagaactaattttctttcagtcttataatttaattaacctcaactttatatacatgtagttgatattcttttgttttagataaaacttaagtctgaacggttaatctgttactgttgtctcttgatttcaaccatgatgcactttaaggttgttgaatctaaattttggtcagaagagtggcacctttactttgaacggccaattagtaacatgtgaaggaaattgtttctaaaatatatgatcatatggtggtaatgaaaatagaaaatgagtctagcccaaatgtttgtgtagtaatcttcatgcaaggtgctgatctttataggaaactataatgagagctttgtaatagtggggaaagggatctttttctgtttccttgtacatttatgctgctaatttgttacttctatcctaaaatggcttgttcctttctgcatctgtacaattttgtgcctgctctgatcatgtttctgtataacattgtaatcttataattacaacttttagttcattcagttgtgctttggttgtataattatgttgcgttcataggtattgggatactagacaaccaaatccagtccatacacagcaactcccagatcgctgttatgcactaacagtaaggcatccgctgatggttgttggcactgcagacaggaatctaatagttttcaacttgcaaaacccacaggtaatatgctcttctcatgtgatgggtaaaattaaacctgcttttcgaaatgatctatgtcttttgcagcagtcaaatactagagtatgaaatattataatgtttcagagttcacgggtattagtattttttgaaattaaattatgaagcattgattcaaatgttggactcagctccttattttgtttaactaagaagttaaaatatcaaaaataatagaaaaaagttcaaaagcaaagagaagatttcctgtttgattgattccataagctggtaggactattatcattaaatgcgtgcctgcacttgaatattattttttgtgattttttgttgctttaaacttcttgaggaccttaatgtgtgattaatatgttttgaattagcattctcattaagagatcaaatatcactacttcacttttaaacttaatatgttttccttttccttgttcttttaaatagaaactgcacaatttctttatattgttacaagcatcaaggttgttttgcataataactggatgagactcaattaaataaggaattcaaggacttctaacattgcagcagagtttacatcttattaccacattatctttgaatccactttttctaatccttggttatatacttacaggctgagttcaagagaatcacttcaccattgaaatatcagacaagatgtgttgctgcctttcctgatcagcagggtttcttggta

SEQ ID NO: 3383 - DNA, 2828 bp, Cannabis sativa
tgctttgactttgacaggtataaaagagcaatccaacacttccataaaaaattaaaaataaaaattgtttcttttctgcttgagaagtacatatttgtctcatttgtgtaatactcttagattgatttttttaaattattgattattgtgattttaatcttttaggatattgaaagattaattatgcatttggagtcattcagagaggttttaacacattttagtgaaaaatagtaaaaattagagagctcgatttgacaaaactgaatgtaattacatattttgacaactttaaaagtagaaatggacttgaagctcattatgaaagttgtagatctcattctcagcttttcgaaacattttttatcgtctaattccgagttatattaaaggagttataaccaaaataccaatctgagcacctcgcacaaattgctcgggattttcaacagtaggctctcgccgcagcgagcctaaagcttcgtcgcgacaagggagttttggctacaataggagttttctttgctgcagcaagcgtaaaccttcgccgcagtgagagcgtgatttttgatttctgatattttaaattttatttttaatttagatcaaaggaacttttatggggatataaataagactttttaggttcatttttagcacttttagaccgtatttttttagagagaaacctagaaagagagtagaaaagaggatgattgcttcattaattgttcatcattctagttcttctcttctccttaatcactcttaattaattatgattttgatttgagtaatttgcggcataaatatttgaagtttcagctttattttcttgtattttttttattttacagatcactgtttttcgaaatttgatcaatttatacatttcaagagtcgaaacctgaaactaaaaaaacaagtgtaattctattctaaaaaaatgactatgaagaaaaaaattatctctaaaaatgacacgaataatagactaaaaatagcctaatagtcatagcgccatccgtacacgtgttgaattcttatctttttctttcttctcgccagaaccccccttccctaacccttattcttcttcttctttagtatattactaacttattttattcacatggtatgattttaattctgttgtactcttacaaaaccatactcttatataaatacaaaattttctaatatttattaattatttctaataattaacatgttatttattatatatatgtattttatatatttaaaaatatattatccttaaatcatttacttttagatataaaccttaacaatgacatgcatattttattttattttattattataatattcattacagagctaaacgaaataggcaaatatcatgacactattcccattaagattcttattacattgcatttgcatcaaagcaacaaccacctaaagcttgttttagatccgaaaacaaacatttattattacaaggataatcataagtagacacgtacacatgtatatagagaatataatcaacgtactaaatacagtcatagacttaagattggtgaatgcctttctcgttgtaatttgtaacgtgcagggtaggttcgaaatcttctgcaaatgatttatgagtatttgcatggtaagatgtgatatgttgccgcctatttggtttgaatatcgataggataggcagtggcatgaggctcaggttcaaaatctttagtaaacattgaatattttcctgatgatgatttaatttcattgtcaggataaactgaggcatgaggctcaggttcaaaatctttattaaacagtgaatattttcctgatgatgatttaacttcattgttaggataagcagtagcatgaggctcaggtttaaaatcttttgtaaataatgtttttactgatgatttaacatcattgtcaggataagcagtagcatgaggctcaggctcaaaatctttggtaaacaatatttttacagatgatttaacatcattgtcaggataagcagtagcatgaggttcaagttcaaaatctttggtaaacaatgtttttactgatgatttaacattatcgtcgtcgggatatgaggtaacatgaggttctggttcaaagtcttgagtgaaagtattaggacttttatcatggttagaacacttgggttttgggtggttgggaatttttggtgtggagtgatcataattatgaccaggaataataaggctttgaattgcctttggcattggctgttctttcatcacaatgctccagtattctcctgctggatcttttcttgattcagtactctcacaggaaaacagctgcacaaccaccaatatataagtaatattatttattaattaacatatgcatactctaattgtaaaataaaatagacttatatatatttaatgaaattgaagattagataatattaaataaaatagatttgagatgagaatgcatatactagaattagtgagaggagagcaagaacgacacaagtagatttcatgatgatcttcacttcaccacacttaggatactttcacaaatatatgattcgaccttttattttgaaaatggccaaaggtttgcttctatttatagcaaaatgttgtggctatgctgcacacattacacatttcttcaaataattgaattaataataggtataataatttttacttaatttcaagtgggaccaaaatgggataagaattcataacactctttgtcttttagtagttatttaagattatttgtacgagtgaggcgagtaatgcgtttcgaaagtttaagttttgaaattg

SEQ ID NO: 3384 - DNA, 849 bp, Cannabis sativa
tgcaattcaataaacggtgcaaaagtgacaaagcatagggtatacgtataatgcatgtagaaagtcatataacaaagacacgttgccatttattactacgtgtcatcacaataagacctaagtagaaacggcctcgatcgaagaaatgctatattggccttttttttttttttcaatcaatacacgtagtagataattttataaatactataactctaaattgatgattaagatgataaggcaaaggatcatgatcaacactacactactaagaaacataacttcaacaccaccagtacctatatttggtcaaaaatcctctgcgatcggattcacacaagcaactcactctgtttctacttctacccaaccaaacaataaagatatggacaaaggaaaggaagagatcaacactagtaatcaagaaactgggtcagtctgtgtactactttttatttaaattaattagtgatctatgtcgttttgatgtttatatatataatctcagagacgtgatgtcttcttttggagaagggtattctacgaggtgtgatgaagaaggatttggtggaatctatgggggaaagcagtctctcaagccccaaaatgatccagttattgatcccaaccattctggtatatgtatttagtttttggggttaatcatgaattttttagatttaatttaattaattcaaattctaagattggcatttgattattgtgctctttttattattgaagagtatgacaaaacgcaggggagtgaagtgaaggagaaagagaaatcacgacaccagactggccccaatcgtcaatagtggattactccttaattacactttaatt

SEQ ID NO: 3385 - DNA, 1725 bp, Cannabis sativa
ggggtattttggtacttttcattgttgatcttataaatttgggaaagttttatttgtaatcccaaaatttataaatacattatattttcataattttaattttacataaaatatgtaaaaataatttttaaaaattataaaatgtggtatgtacggagttttcaacagttttacagtttatttacataaaatatattttttggtatatttttatgttgattttttgttatttgtatattattttttatattgaatggaaaaatatataaaatttataaaaattgagggtttatgtaattactcttaaaatattcttccaaatcatatttttacaaaatataccaattaaacaaaaaataaaaaaataaaaataaattatatttcaaatattaaaataatacttaatattgtgcttttattacatagaatcttagtgtttgagaaattagagaatctcaagaaaaatgttggagaatactaatggtgtccaatattaatatgagaagttataatgctatattataattaaatattgagtattactcattttaatttcacattattattaatgattatgattacaagtagtacatatatggtaatataaattttgcttcgtagcaaatattttgcaaaatttgacaaaatattcgtatgtgttaaatttgtatcatattttttgttgcaccactaaaacgtattttttttaagtggttatattttaattttgaatatctattagagatgctcttacttagaggagttaaattactattaatgcaattgagaccatcttcatgcgatatctaaaatttagcacaaaaaatgagtttgcgctatatttagcctattatttataattgtaagataaaaaagttaaaaataattaattatattgaatcattagtattttattgagaatatacaaaaaaaaaaaaatatcattatttaaataatggtaatatggtaaataaagtgttaaatttagtaaaaatcaataaatcataataattagtgagcactaatttttcttaagtgtgctaaaatataacaatacaccatattttcagtactccattgttatcgagtcttaattcaattcaataattattctaaaaatttgttaactatctcttaatgatattggataccactatacttcatagcaatgcttagaacataatgaaacacttaaataatattaataactgttagagaaatactaaagggcacttatggtgcttagcattcttgtgagttgtaatatcgttattggttcaactcaatatcgagtcacacttattttactttaataaatattataaaaaattgctaatcaattatagagcaatacttcatcgtgatgttaggcattatgagtgccacatagtcagggtaggtgaaacatatagcaaatttgggtcattgcacaagtacccctaaattaaaaggtctcctttttatcatccatttatatatataatataacataataaatattttttatataatgtatagtgtacataataaatatttgtaagagcaaatataaacttagcagttagcacttataaaaaaataataaaattttatggtcccaatacacataataatttttttttttttaataaaatgcataattttaatttttcgtccaaagccccaaactatttagatcttcatgcacgtaacaatgctttaagtcgaaataaactgagttatatt

SEQ ID NO: 3386 - DNA, 1058 bp, Cannabis sativa
ttagcaatcattggactacgtctacttacaacttttattatgtatttgaacttaaaatccctaaagccagaatctagcgagttttcgaagagaaaattaaaaagtgtttacaatgcattaacttggagcgttcaatctgaattcaataagagttacaaaattcaaagcagtaagttctttgaaaaaaataaaatatgaaaataatgaatttctaacccacctatttattagaaagataggttagctatttacatatacaataatcatttatcaatgtataaatgggaatattcacggaatatgcttggattctctatcttgatcgctgaattgaaacgatagagtgtgaacgtgaccgtagatcttctaggcttaatgatgtctatcaaccttatttattgatgaacggatgagatctgttgatcttgggattaaacgatggccactgatcttgagatttaatgagaactgttaatttggtactagagtcttattttgcacatagcgaaaattcgactatgtcttgagatagctaggtgaagacattgacctacttgctaagattgcttctttgggtgacaagttcttcatagagtgcacttgagtgcatagtccacctaggtgccatgtattgtaaactcaacttcttgtattttgttttgcattgcacgcttgcaaagaaaatgagcacatgcaccctggtgttcacttgagcaagacttcataggcacagggtgacttgggcacctccctgttgctaagtgatttggatacctagtctcttagttgattactccttctatcattcaattgaaggtactaattatttgggaaccacaaaacccttgaaagtgttcacctaggagcccccttgagcaaatgatgctcacctgggtgcccaactcatgcacaagcccatcctaggtgaagggtgcaatcaagttggtgatagagttttcacttgtgattctatgaagaagggttgaaaatcgatgctagtgattagttctaaggtagaaatattagagaaatgaacctcgagcatcaggtggtgacct

SEQ ID NO: 3387 - DNA, 803 bp, Cannabis sativa
ttttttttttttttgaaaaggttctctctcctaaatcctaatctttcaaacaccatcaattacatataaaatacaatctaaaaatgtcgacatataacaatactcgacattgtgatatctgatgccataaaaagtactgtactctatgtatatagaaaaatatgtttagttgttcagtaaattgaatattccaattattttcaattagttttatctagctacctcaaaatcaaaaactgctacaaagtgcagttgctattataacttatttatttttactactaattattaattattaatatttttcaaataagtaatcataattatatatataatataaaagaaaaattcaaattcctcatcaataaaaaattatttcatatatattcataaatatatacatatcaattaattaaggattcctacaataaaaaatttctaatacaacaacatgaagaagataataataataataataataataataattacatctttgtctatactctcatccatggagattaaagttgatcaaacttccaagtactagagctctttgtctagattaatccccaaagctctgatggtgattcatttaaatcactcaaaaacatttcaaaactataaagagtttctcaatgttttccaggtgttcgatcaattgcctctgagaaccaagtctcaaaatttttgtgaagaatcatgaaaattcttgtgtacccaccatttttcatccacttaaacgagaagtgagattgacaaaagtgtcttctgggcatggaatggtgagtcctcccatggga

SEQ ID NO: 3388 - DNA, 621 bp, Cannabis sativa
attagtgagaaagttatgaacaatttgaggtatatgtaaatataatgtacgtggtagtaggcctgccttctaaatctaataagatgccgtccaacgacttttttggcacaatcttatgaaatgtgaacgtacattcttaggcattgatttcatatctcattagagtataattataaattacaataggatttttgttcattaaattttgacacttatatgattttacccgtaaaattagttttttttgaaaaacttgtctctctaattatgaaaatgattgtaaataagctcttttggttggttgcattttgcttattttttaagacaatttattaatatgtggctacaaatcacattcaaacatttaacattaattctgaaattacagatatacaatcttagatattatcattatagtatatttatacaattattttttacacgaattaatcatgaatcagccatacattagaaaattgtttgtaaaaatgaataaaatgtaactaaaggagaaaatttataattgttaaaatttagaaggcaaaaattatatttaaaagaatccaagactataaaaagaatagattatgttttatgatttcatatataattaattagatt

SEQ ID NO: 3389 - DNA, 2064 bp, Cannabis sativa
ctttgctgttatcacttggagtttggaattctctgctctgttgaagctacaataattttaaagcaatgtattcagatttcgatttgaatccctttccagacatttaaaagccataaacaatgaaaacttcaccagtttattacctgcttctttactcgtggggtggaactggtagtggctttcttgttacgattaggcatagctctaatgtcacttttctttacccgaaccttaattttaccatattgaactaggattgtttcatcatcaactggagcttcaactacagtgcctatgttatctctgagtcctgtcaaataaacttgctctccaacttctggtgtatacaaatcggtattctctttatctttggaagaaccatagctaggacagtgaacttgaagaatagatgaaatggaagattctgatttcttgatcagattattgaattggtcaggactggctgttctgagttgattttcgaattcttgcagcacagtttccatttgtgattttgcagtttcaacatctttttgaacctgtaaggtctccttgaccatcaaagctttttccctcctatcaagatcttcagcctcatcttggatcttcagataaatatggggaaaaaagtgcataaataaacaagaaaaacaaccaaataaaatccttgcaacggctttatgcaagaaattggcccatgagaatcgatttaattggaattgggaataatcaatggaagtaattaattggtttaaaatataattatttactaaattgttcgaaaggaattcataatcattttattttgtttgtataactagtaaagataatcataatgctttaatttgactaaattgttattgttagactatgtacttatttttcatttatagatttttatagggtatatttgtttttttttttatttttagttaataaaaataaaacaaaataatgtaagttaagaaagagaaagatattccttataaagatgaaggaagaacactttcctttatttttttcttaatttttgtgggccaccagtttctccatttccgaaatttagtaaacaattatacagaatcaatactatacaattgattctcattacctttaagtaaacatgccttaaaataattaattacataactaatcagctctacaatctaatgagaatcacagtgtaagagactttgataatgaactctattgagaaaacaatgcagaagcagaaaattcatgaaccagaaatagtacctcgctataaatttgaatgaccttcgaatgtagagaggcagctcttttagcctgtgcttcgagtcggcccctttctccaatcaatgattgatacagcaatcctttccgcttctgctgctgctccggaactaacttctccatccatttacgggcattttcaatgacacgttgattgaaaccgatagttttagcaatatttaatgcatttgaatcgccactacttccccaaaggatctgataagttggtcgtaatgtttccagggaaaattccatggctgcattctcaaaccggtcatccttttctttgagacggcttaaatccgcaaaatgagtagtcacaacagctagtttaactcgatctttgagatactgcaaaatgctggctgaaagagccaaaccttctgaaggatcagttccacctccgatttcatccaagaggacaagtgattcttctgaggtcacttctaagatgttacgaattcgcgatatgtgtccactaaaagttgagagattttgttctagagacttcaagtggaaaattaatgtcagactataatggaaaacttaaaaagtacctataacttatctgccataattgaggtaaactcctacctggtgatctccaatatctgctaaaacaagattaaaccatggaagcttcggatggtttttagctggaagaaacattccagcttttgacataagagaagccaaacccaaagtcttcattgaagcagttttccctccagtatttggtcccgaaatcacaaccactctggtgccatatccgactttgacatctatcgg

SEQ ID NO: 3390 - DNA, 1638 bp, Cannabis sativa
tttttttttttttttttatgtacagagcaaattaatttttaagaatagtgacgaccacaaatgtcatatgatgatgacatagattttgatatagtagcgactacaagtgagattcggtgatgacatcaattttaaatgataacaactttgaaatcatatgatgagttttctatacatttaacaattttttttatttttttagatttctatttgtgtaagaattcttcaatctcgattattttttactataacgtttaaagataactctttgttaatttgttctttttttagataagaaattgtataatgaatttttctaacgtattaatttatttttttctatataagaaatttagtaaaaatattatatcaaaattttaaaatttcaaattttatatatttttataacttaattattagtaaataaaataaaaacacaaaattgtttcttagttctttaaaggttaattaagatttttcccctttaattttgacatgtagtaaatcatgttcctgaacttaaagtcgttaaaaatgatccttgaactattgagatcgttgaatttaagaatttttgtcaaattttagtaatttttttttaacatatatgaaagttcgggagcatgatttagtatatgtcaaagttcgagggatatgatttggtagatattaaagtctgggagcatgatttaatacataaataataaagttcagaagacataatgtggtacatgtgttgtgggaaaaaaatgctaattagttttttttttttaatattagagataactttatggtccaaatacaatttcacaactattttttccccagatttcttattcatgtttagtaaaagcagccttcttaaaccctagacccacacacatcgatctccagttctccacttcacttgcttcgtcttcctcacccaaaatccctcgcgcaacgcattgcacatcacaggtttcatccgattgtgtaagtattttctgaaataaatgcacggagacgttaaaattttgtattcgtacctccttttcttaggttttcccccaacacttgtctagtcgtccactgggaaattgaaagttctaatatgcttatactaagtcttttcaagttgattttgaattcagagtagttgtttatgtagtaatatatgtgatttatttatttttaatttttgtgtttggtgcagtttattagaagctttgtttatgagctgagatggagaatagttcacagtcttctggtccacaggtaaagaagtttaatcttactatccagtaatagaagataacaagttgatcaacgatgttacttggtcaagaaatcttttctcaatagtttgtttttcacctgtccatataactttgacctctatgttgatgggtgtgcttgtgcaagtttgactcgaatggttttaattttgggttttcgttttggtctctgctccgtcaatgttaaaatgtttgaagttcaatgctgtactgctgcttttaattggttaattatttgctcatccttatcttttgtatttctactcaccaacaaaaactgaaaggagtggttttaattttgggacgcacaactttcagattaccattgtcctctcctccccattttctctctctctctctc

SEQ ID NO: 3391 - DNA, 1219 bp, Cannabis sativa
atttcattacctcaaaccatacgcaacctaaaataacttctcctctccctctcacaaattttcttgcctgacacaagtatttgacctctcccattattcctctcctctgctcctaccaaacatggccataaaatagataactcctataattctgttcaaattttcttttctgtgccagaccagtcgtcaaatggcattgaaaaccaggtcaccctgccattgtttcttaaatagaccttgtcatacattttgctacaacacaatttggctaagaacaagataatgattagtgtgagttaaaaagcaaaaagactctcctctcagataaaggattgggcacgagtaaaattgatcaaatttgaagttttgtaatgaagtctaaaaggaaaagctatttgaaatgccaatcgttctcgacaccaaatttaagactacattagttacatgaaaactatccattatgatgatccaagaatttaagttattcaaccagtgatgacagtagtttaaagacattgcatataagttaaaacatataaccccatgataaaagaataggttcgaatagaaatatatgaaacaaatgtctcttatgctttcatgggtatctaagcttttttgctcaaatgttttgaccctgtttcttcaagaaatttttcaagcctcaaaatgttcattgtggtggtccactaaatagagctttactaatgatacctgtggcctcaacataccgatccatacatctagaaatgcaactgctctcacctccactcatgcttgatcctggttttgtaacacacttatcaaagcactttgccctcagagtctgtttaattccaaattaaagaaaagtattaatgaaaataaaagtcccaccaaatgtattaacacaaaaaataactagccaagtttccatatgaaatccaagttcataataatcaatgtttactggtgagtagttgattaagaaaagaaaatatccatgtatgtcacggaagatccaataaatggatccaaacatttctctttatccctactgatatttcttttgggataataaagttggtgaaacagcatgagacacaactggaaaacaacttggtccatcaagaatgaaacaatggacaagagtgggattttcttttttacctcaaatatcataaaaaattaatggcaattgaaactatatttaaataaaagccattgatatatatatata

SEQ ID NO: 3392 - DNA, 954 bp, Cannabis sativa
tgataattttttggtttctcgtttttcttccactgaatatatctgaaaggctgtgttattcaggttcttgcttggcttctaacttataaattgtttgtgttgaaaaggagttgattctaactattataaaagaatatcaaagtgtagggatttggctgggtaaaatatgcaatttttgcttaggttttagttttgcactaagcctgcttaggcagttttttggcgtaacccaattatagaaaaagaaaaagatcttactaaatggtagtggataactaattactttatggtttttatctctagctatcctctgaatgatgctgctgaaacggtgaatgaaattggatcatcgattggaagagttatgggcggaacaagcgggatcatgtgcttacttctccaaattttgatcttgatttatctttcctttcttaatatgattatgttcagttaaagaaaaactaagacttgtgtttttattttgaccagatataatatattttgtaaggcggcctacgctcaattaaaaacaagcacccagtcagatgccacagcaaagaaatgtgagatgattgcatactgcaatagtaactaaccttagctcgagttaatttaacctattttcttattccaggggctgaagcactcgaagctgctattgctgcagttagtaaatatgggggagctagtgctggctatcgcacattgttagatgcctttattccagcttcaacagttctccaggaggtcattattattgttatttaattctggactcattctatggctttggtacttataaccctttccacatacagaagttaaatgctggggaagactctgttactgcttttctcctttcatcagaagcagctttggctggggctgagtcaaccatgcacatgcaggcacaggtgaaactatttctgatccttttgctctttaccatttatg

SEQ ID NO: 3393 - DNA, 1546 bp, Cannabis sativa
gcttaattggagttacattatatatagagcatcgtagttgacacagtatgttcggcacttttacaagtgacattttattttataattggttagtaatatttattaaaaattatttttttaaaattatattaaatatgttacttaattacactaatagcgatatgactctaaaaaaaatattaatagtagattttaacaattcactatatacatgtataagaaaataaattaaatgtatatagtgcataaacaattatacatattcttatttgcttttgatattggaagataagttctatgttttatttacctttattcgaagagaactttttgacttttcccttaatgattcccttttgacttgtgataaagaaaacaaaattattccaacatcttgattgcttgaataatgatttttttttcttttttattttttggtcaataattaatattaataatgaatataaattggaaatgaatctaaagtgttaaggcatcatcctcacggaagtggcagacaaattagaatgaaagtcgaatatctacataaattaattaaaaaaatgtagaagaagaagaagatcattataataatatttatttataaaataatagcaattttattaatgttgattgaacaatctctattttattacttccttcaataggtccattgtatcttcatgactcaaccaagaattgttatttttttcttaaaaaagataaagaaaaaaaaaattaactgtttggtgctattaataaatttcattgatttgtgaggagatagcaaaaagattttgtatgtccccttatgtgaatttactaaatagaaagtcaaaactagggctaaagttggctaaaattgcttcaatttcacatacaaacacacataacaaaaatacatttaagcgtggaacttcaaactatttgactaggtgggtcgtacatgaaattacgagattttcactagatccaacaattagtaatctatcacaaacaaaataataattagataaaaatatttggtgcaatgcaactcattgtataaagagagtacttacatgtacttttgagtatagaacacattcttaaaaaatctagcaatctaccatataatttagttctattgaatggattactttagtgatgagtttacctataaaattagagaatgagaatgaaagaatggatttttattttttatttttttagttttagttttgttcttttttattgtttgaggacaagtaataatttaagtttgaggatgtgatgagtgcatatttgtatactcattccttgtcaattattagatgaattattatttatttcttaagttttatataaatttgatgtggtttttgtagtgtgcagtatatattgagcataaagtgataaaattatgacaaattagaagtgaattatacatatttgaacaaagtgccgaaattaggaagcaaacgagtcgagaaactagtaaaattgttggcgctatagtgccgtgagtatggcactatagtgcagctctgaaaaaaaaaaaaaaaaa

SEQ ID NO: 3394 - DNA, 1380 bp, Cannabis sativa
gcacatgcacatgcatgaataatgatatgtatatttgtatgcatgactatattatttgtgcttaaattaatagttataccctttatgtttggaatttttattagatattaaatacactctaacagtggtgttattattattagggaggcgatggttccttgcattctgttggcattaggtggaaaccttgtagatggtaaagttgactttttgtattattttattgtgttaagaagctttctgggttcccaatggtcatacgagttcattaataaacatacagcattctgccatatatggtttttcttaatagacactgagtccactgctcctccacagtaaagcttggagggaagaaaactgatgttctgttaatgatatttatttcaattagtatgttacctgttgatgaaactctatatcttgcttgtaggaccgggaagttcaaaacttggtctacgaacaactgctgcaattatctttgcacgtttagttttggtgcctcctgtaggacttggcattgtaatgttggctgataagcttggtttccttcctgctggagataagatgtttcgatttgttttactcctccaacattcaatgccttcatctatccttgctggtgagacccttgttcaatttgcataaaatagtatatttctaacatgacacatttctaaataaaggaaagttttcaagtgtatgtggtaaagcaggcgacaaggtgtatgtaattcgaatgaattacgtgatgctttattttttagagccataaactttccaatttatagttaaacatctaatgaaatagcagcggttttacttgtatgatttattttttttctgttaggtgctgttgcaaatttaagaggttgtggaagggaggcagcggcagtcttgttctggattcatatttttgctgtattttcaatggctgcatggattgttttgtttctcaaaattctattttaaaacatcagcaaagaagtctgccagtttcccatgtaaattgaaatatgagtggaaaatttggaaacttgaaaatccatttttccaatggaaagccatattttgattgtatacccttgccagtgagtctcggagaaggtatagggtagccaactggccatgcttacaggatgggcatcaaagcatgaagatcttttggtcttattattggaattactatggttatcatattttttatttattgaggtcatgtttatatgttacgcttccaattttcaaatttattcgatcaataattatgtagtaaaaatattgtaagaaaagcttgtcgcaatctatattgcgagtgtacaaacattcaaaatcttattttagttcaatttgtacgttgcaaggtagattctgaaaagt

SEQ ID NO: 3395 - DNA, 1127 bp, Cannabis sativa
ttaacagattaaagttccagacacgtctattctgattcaacatatgttgggatgaaatttgtctagtacgtggattaaacatggaaacacagaatcatgtattttttgattgtcacttgagtgcaaaggttttaacaggaattcaatcttggctcggctagtattctaatacaatccatgggctttttaaatggatttcgaaattcaaaatgagcaagtttcagaaacaggttttcggctgttttagctactcctatataccatgtttggaggtataaagaatagaattaaaaaggtaatgcctaagaagataagtcaaaaaaatagagattggttttaaatattgtattagagttgcaggtctatcataatggtgctgctagtttgtaaatgaagttttatggaatataattgtaataccctaaggtttatggaattggattagcaacccatactagattaattatgtattaataagaaattattttattatataattatatatgtgaaactatattgataaattacattttaagaccccgttagtgtatcaggggaattttcgtaattatgactcgagaagggtaaaattgtaattttataatacattatgcttatggactatattattatatagtttatttattctgtctatctgcaggtactttctaacaagtcgacgcgatatagtcacaactacgtattttgggccgaatctggtttggggctcaaaatatattttcggaatttattcatggcattgatatgataaattaaaaaatttgatttattttgttatgtatgtgtgattgaaatgacaataattccctttttaattgtgtatggatatatatatatacttcggaggtattttggtcttttggacaaatgagttattaatcaacaaaatcaattttttgtaaaatgaaatgttattattctgggttgagaaccttctagccgacccctctctcgctcaccctctcttttgtgatttcaaaatcaaagttctgaagaaagacttgaatttgtgtggatttgtttgcacttggagcttaaagaccttggataatcactataatccattctcttgattttattttctgatattcaaagccttgagttgt

SEQ ID NO: 3396 - DNA, 1444 bp, Cannabis sativa
atagatataaaacaacaaaatactaatatacatacatatggcattatttaaagtaatatgcaatgattgtagtttttgttggcctaagatgtgacaacttagccgaatttgaagggaaaataaaccttccccataggcccataccaccatcacatgctctccactttgaactttgtcccccttttttcttattctcattacttttttccctttttgtgtgtatatataaagagagtgtttgagccataagatagaaaaaccaagaaaaacccttctctcaaaattgctaaaactaaaccaaatatggctatcaacaagcttagtgttagatccataagcctcccaacaaggcctcatccaagcacaacaagaatagaacaacaactacacaaaatccaagctttggaatttgaggttgccacctcatcatcatcatcatttttcaaaggcttattatttgagctagaagagttatatgaatgtgttgatgatcttctccaaatggggtcaacccaacaagtcctttctcaaaatcaacatgaaaaaagcttagaagatttgttggaagcctcactaaggctcttggacttatgtggtattacaagagatgttttgcttcaaactaaacaacatgttggagctcttcaatccactcttaggagaagaaaaggggaccccattatggagattaacatcacaacctacaattgttttagaaagaagatgaaaaaagaggtcaaaaagttgacttttgcaatgaagcaagtgagtaagaaatttgagtcatcacaaacacaaatattgagtgaagaaaatgatcacttgtgtgctgtgatgagagcacttagacaagtgtgtgctatgaatagctctattttccaatctcttttcatgtacttaattatgactcctaataaggtctcaaaatggtctttggtgtcaaaattggtcaacaagagtagtgcagttgcttgtgaagaaaagttattagagtgtgggaatgaattggagagtgttgatattgctttgtcatctttgttatgttgtaattatgatgatttgaagctaaaaatagctcaaaagagaagtgaggatttggagatgagcattgatgggcttgaaaatggtttggaaagtttgtttaggaagttgattagaacaagaacctctcttttgaacattatctctcaatagagaaaaagttttaaaagagaagagttctatatatagtttgcaaagcattttaccaaaatttttttaaggatttgctttggaattttctagttttttcatatgagaaatcaatatcaaactatgtaaattattgttggtattgtattgctattgtacaatgtaaagaaaaagactactcttgcatatattttaatacaagtttttggctatccttttctttctcaatggaaatctctctctctctctctct

SEQ ID NO: 3397 - DNA, 1285 bp, Cannabis sativa
cctaaataaataaataaatatattttttatggctggtctttattgtaatgtgtaactagttaagatattttgaaaacactctaatattgaaaataaaatttaaatattgtgttatactattttttttatttataaataatgttgtaaagagagttaaattgtacacaatttttatacaataatatgcatttaaatttataagcttaaatgctctctcccaagaagagctttccctctggttttgctttcgaagccttaattaaccatgaataacttggttgatcgtacctagaatctgaacattctcgaagaaaatggatgggaagtgaatgatggggttggagccgagctaggatgggtctgtctaattgggcatttatgcacaaacaaaattatgtgtaggtctttgttaaagatgattttttgtaggggttgggggttgtcagagatgaattagggagtgaagattgagttaacgacaagtacacatctctttcttgtgttttctttcaagaacacgcaagatttgaatataattctgtctcgatcgttgtggttgttaaataatagactttcgattctggaacacataactatgatgccttcgaattgggagaatattttgttgaggtatctgctggtaggtagagtgcttaatttaccagtgaaatctatcacaacgaaaaatttggaaagcttggtggcattagcaagcgaggtcatcagagtccaaaagattgatgtggccaagattgttttgaacgactttttcttttttaaggtgtggtgtgaggtttagaaacccctatgcctaggttttctattttcttttgaggggaggaagatttggcttcccttttgatattatatttttccatatgtgtatttcacattttcacttgtggaatggtgaggcatgatgctcgttcttgtaccttatcacatgttatggtgaaagatggggacgacaactagactgagcttttgttccttggctaaaggtttttgatcgggttctagatgggtctcgacgtgtacaggatcattggaggcaagaaataatggtcaaggaaaggatcctagaagtggatatagaggtaataaagcaagaacattgatagtgtttaaccaggaaagtttggtctcaaatctagaagtatggtagctaatcctctcagctgtcaaacactgttcttgatagtggttaggattagtgagttagttcaagtagttatgttagttacttttcattgttcaataatgaactctgtatataacaccctgt

SEQ ID NO: 3398 - DNA, 1002 bp, Cannabis sativa
ccaaaacagaattgtataaaccaaatattttaagtaaaagaaaactttttcaatgatccaaatggaagactaataaagtaattaatccattaacaaaacaatcaattcattcttttaatttaactaattttgggtgaaaccaagcccacatattgaccatgaccctacttagtagttacataaatagacttggactataatagtgcattttaaagtatgggatcccaccaaacacaaggacaagaataataatagtctgtacactgactgaactagttcctgtactgtatgtacctagatttttctggtgaaaattataagtacacacaataataatgcatgctattcaaatggggccttgaaaataatgttaaattatgtgcaggaaaattcaacaagaaactagtaaccaaacgaagttcatggtgtgattctgaccagtaaagggtaggagtgatccttttcgtagctgggccaggcgtcgtgatcatcaccgttcataaagcgctgatgacgattccaaatttctgcgtcgtatttctctgttatgctgaactgcaagccattttctttaatttcttctaggaacttgtccaatgaatcacctcttttcgggctgaaaaatatggcttcacaaggtcccacttttttcaacaagtttttgacaacttgtgcaagccctttgtggcattccttaaagaatgtactgccaaatcatatatcaagttataaagaaagacaaataaagaaaagggccagcaagaacctccattaaaagctcttcccttttgaatatgtatttatatatatcaagttataaagcataaaaagaagataaacacagctataaagattaaagctttgacattatacgtcattacattcttgaatgtttgtgtgttcattcatgcatgagcattatgcaaaagatttttcttttgtcaagtgggaatatctaccaatctctagatcactagcattagcaaaacaagcttttttcag

SEQ ID NO: 3399 - DNA, 1691 bp, Cannabis sativa
  modified_base (620)..(640): a, c, t, g, unknown or other
gaagagagagatttgatatatatgagatgttataagtagaggggttttgtttataggaatttaagaattggggtgtgggatgatggcctggctctcactttgatggtgtttgtgacaggattttcagaaaggagagaaagatgaggatgggttaatatgggtgcagagacgtctactgaaagacagccaactttaggtgagagaaagaaaattaaagatccatatcataacactacacatacatacataccatggctccactaaaccctctctctctctcttttaaataatacaaattatattcacactatctctttctattctcactctatttattaagagaaatgttatgcgaaggtgtcaagtactatataaaagataacaacatagcaaattgtgggtgtgttttaatattaagttttatatacattacaataaatcttacttttagttataacaaaacttgtgactaaaagtgaaaaaaaattataactaattataaaatattattcttatgttgtgactaaaagatccgtggctaaaagtactaatcacaaaaattacaatttgttgtgacttaatgtatttttaaattagtgacaacttgtaactaaatactnnnnnnnnnnnnnnnnnnnnnttttgttgtgactaaaagttgtcactaaaagtagcagttttttgtagtgacattttaatttaataaagatgagtgttaattatactttcttttctcaacctctgcattcaaactattatgtcggaattttttttaaaaaaaatttctttacgtttgttatagttataatattattattcctataatttttttttaagatttttaaataatttatagtatcaataacagaatttttcatattttaatatagcatacgtgttcaaaatactttaaacttgtttttgacacggtaaactatttaccttaaaaaaaaattgtactattcataatttttttaaaatttataggaaaaatttgtgtatgtattttctggtgcggagattgagtaaaaagttgtaatatttaacacttacttttaataaataatatgaaaaattactaatcaactgtatgatgtaatattaaattaaatatcttgagaagtgaaataacaatatgatataattatattaatagaaattaattaaatacacatgactatctctttctaactctatttattaataacatgtatatatgaaataaactataactaatatgggatttgcgaatcagctgagctcaggttatatttggttttaaataatataacccaaatttttccagcactgaaaaccatgttcaatttattaattatatatataagttatttcttacttatatatattggtctcttttattaatttaaaacaaattaataatttaaagaatgttaattaagtagcgatcgagtgtgataccttggacatgttataattaatttaattattatgcatataagtatattacatttttcaagaacgtacgtatatatacatgtaataaggtatattaatggtactgaaatgagaggttcagtactgatcatgtatatattgttttttgtgcacaagtaaatgaatttaatttattgtatcacccaaattgagaggatgtttggatccatcaatggatggagtagtcgacccaattaattaaaacatatatatat

SEQ ID NO: 3400 - DNA, 1588 bp, Cannabis sativa
gtccctttgtaagcctaaaacttgtggggggcttggatttcggagagctgcagatgttaacttttgcttaattgccaagttgggatgggccatggcctcggattgtatggccttgtggaaatcggttttaaaggagaaatattgcagccacactaatttcctcaattcggaaattccttcttcggcttccttggtggctaaaggaatttgggctacaaaaaagtttattggtgagaaaagtatctggatggtgggaagggagtccaatgtccatatttgggatggctactggtcgagcttggatggcgtcgaatgtggtagtggggatattaatcctatgattaacattgacgtttcggttggggatctgatgctccaatctggtgtaggctgggattaccacctgttgtccatgtggttcagaccggaggtggttcgtaagcttcaaggtactttctttaatcttttacatcctgaggatactttatactggaaatcctcttcaactggcaggttcagcattaagcaggcttactgggaccttaactatactcgctttgaacctaaagatatcctatgtactcgtctttggaaggccaatatgcatgatagaatcaagctgtttatttggaaattgtatcaaaatgcgcttccgtttgggtgtaagctgagttccatccttgggactcgtcaaggacattgtgtgctatgtggggaagtggatggtgatgcggtaagtcatttttcctcatcctgcttgattactagacaattgtggtaaactagtagatggaatatccgaattcatacttttggcctgagttctggaaaagatactgtggaatggttgtttgatcctccttttgcgcatgatatgtcgaaagctgagttggatgactttgttctttatggagctgttctatatttcaagctgtggaacattagaaacgacatctttcacaacaagtgtccgctggcatttgaggtgatcaaaaagcaggttctgaactgctataaggaacattcctccattccggtacttgctgatgattcctcggtgtctattcccattcagcctcgggttagttggggattttcaagtcaggatagggttaagtgctatgtggattttgcctctaagcaagattctggggatgttgctgcagtggtttatgataaggatggttcgatcattcgtatgggggctaagaaggtagctttctcctctgtttttcatggtgaactggaagccttgctctttggggtggaaactgtctggcctcagatggtggaaggaattgacttttatactgataacttaaccttggtgaaagcgttgtcggatggtcatagccctttttggaatgtttgcttttcttttaataaactctgttctagattaaattttagtttgttctgtgaattggcttcctcgctcttgtaatgaggctgcccatcatcttgctagatggggcctcaatcatagttgtaacgggttacttcgtttttgggaggtgagtccccatgtgctcaccaagttgttgtctttggcttaatgaatttggaattttcagcaaaaaaaaaaaaa

SEQ ID NO: 3401 - DNA, 1203 bp, Cannabis sativa
cccttttctttcaacatctttccaaaaccaactgtggaatgtggaacccacctgaccatagtaaccaccaatttcaccctttctcttctgtacctttcatcgatttgattggagagaaaagttttttcatctaaactaaatgaaattggttttatttcaattcttggtaatttgtttatttctcgcttcctttgtatttggactgacttgaatttattagataaaagattttagagtttaaattcgtccatcataatttactatgctggacaatcaatcaattttcaacaagcttttcttttatatattgtaacaaaaaaggctttggtttgatttgggataagattggtttaatttaaaattgtgttgagttatccattgtgctagttcagttgtcaactcttggaatgtcaagtaacaaaactactagtcaatgcacctaataacaccatcacccaactaatattaaacttgtgaatatttctattctatgtattatataaacatatatttgaaggttagctaggttgaagaatcagtcacctttgtttgctacttgtaacttagaaattcagaactctaatatttatttctatattcatttttttttttcgataaaaacaatagcttagagtgagaaactttacaagtgacttagaattgtgaataacataataataatatggagaaaacaaagggcaatggaattggctgtgcaaaagcagaacaaatggtttcggtttcatctcggcggaggccgccacctccgccgccccttccgatgttcttgtgggctaagaagactaatccagagagtgtgacaaagcaagaaattgctatgttctggaggcagaaacgcatagaggaagaagatcatcttcttgctgctattaagactgctgctcatattagagcccgtaatctctctgtaagatttttcttaaaagaacaaacatatttatttattttaaaacttatcaaaacaattaagttgagtctttactatggtttctacaacaaccttattcaatggtgtgtaggaagaagattacaaatggtttgaagagtctttaatggatgaggagaaagatgagaatagcagagtttcttctactaatgaaattagagttgggataaaggactggttagtttgaagatatatatattaattcacttatgtttttgatgtctttattagattaa

SEQ ID NO: 3402 - DNA, 1160 bp, Cannabis sativa
ccaccaccacctcatccaactcatcaaaatctttcaacccttttcccccaaactctttagaagtcttaaaaatataccaaatagtctaccaagcttgtccctacataaaattcgctcatttcacagccaatcaagcaatcttcgaagctttcgagaccgaatcacgtgtccacgtcatcgatctcgacatactccaaggatatcaatggccagcatttatgcaagccttgtcagcacgatcaggtgggtccccatttctccgaataacaggggttggatcgtccattgactcggttcgagaaacgggtcgttgcttgaccgagttggctcactcactccaagtccctttcgaattccatgccgttggggaacaactcgaacacctcgaaccccacatgttccaccgccgagtcggcgaggcattagcggtcaactcggtcaaccgtctccaccgtgttccgggcaattgtcttgggaatttactagccatgattagagatcaagctccgaatatagtgactttggtagaacaagaagcgagccacaacggaccctattttttaggcagatttctcgaggctttgcattattactcggcgatttttgactcgttggacgcgacttttccagccgagtcacctcagagagctaaggttgagcaatacattttcgcgcctgagattcggaacatcgtggcttacgagggtccggagagaattgagagacacgagaggttggataagtggaggaaattgatggaagggaaagggttcaaaggggttcaactgagtgcgaacgcggtgactcagtcaaagatattgcttggactttactcttgtgaaggttataggttgactgaagataatggttgcttgctcttagggtggatggacaggcctctcatcgcagcttctgcatggcgatgttgatgatataggtcttacgttaaatacacaatttagtatcgggtcacaatagggctctcatcgttgcttctaccgggggatgctgatggatttattgctaaaaagtatctgtggtgtggaacattactcatctttaatattaatgcaatttagtatcggatcaatatgattcgatacttaattgcattagtttgatgattcaatttagcttatttatcacttattagtggattt

SEQ ID NO: 3403 - DNA, 2188 bp, Cannabis sativa
gtttccaggttagagtccctgacagactagctggaattgaacatgtgctgtttatctactaagaaatctcttctcttggcacttatggttcgcatctcactggtctctttccctgtccccgaaccctgttaacttttgttgtgactggttgaagttcctttaatggatgttgatgagcaattttgtatttggaaactttgaataacagtcaatactgctgctctgccttccttctgtgggcagtataagcaagcttcttaatgccaccaccactatggctttgacaccaagccaagtggaatttcgatgttgcgttgggaaagaaataatggtgatctgagaagtggcttgcagttagctgtggatcaaacaaggtgctccgccttctcctttggcgggttgaggatggctgcgctgttttattttgcataccagctcatggtttttcaaaattttaaaagataaaaaaataaggaatttttgtagtttctaacatacaagttttggtaaatgttttttaaaatttgtttttatattttacaataatagtaataataacagtacatcaatgacataaaccttgacccagccaagacccaaaaacccgtgttcgagacctagcagtaacaaatacaaatccagacaaatcgatggacctggatcttgcccctaactgaagaactatcttgaagaatctttttcatttttcagtaatcttcactcggttccatagttcaatataaagcatgtgaggttggaaacttctacaacaacattacacatatactgaatccagtttatgatacaattaactttcaaataggttcaatcttgattaattccatgcttaagggttaaagtccatcgtctccatcgtccttctgaaaggttaattttttttggctcaagatttaagttaaatcaagtcatttttatgaaatgaaatgcgatataaacagttttttagaccttgtaacgcctttcttagtgttgttcatagcagtgacagacctaaaatttttactttatgagggcttatttatcattaaaaaatatttatacttttattataattattcttactagatttatttaattttgtgagagttttttctactattttgatctataattatcaaattaaaaaaaaatacatttaatttttcaaaagattctatttttgttagtgggggctatagccaccacattaataaaagtaggatcacaagagcaaagggcttggctaatagacccacctacctacgtgaaagagagtctcaactagacaaaaaagagagataacatttgattaaacttcaaatttgaacattgacagtagtaaagagtagtagagtctgcaatgacctaatcgatagctgaccatccaacctaagaagtcaggtttgagccaagtgagtatgaagttgctttatggtgttttcaataagaaaacaatatttttttacttgttattcggaggattgggtaggcttgacgcctaagagcttattgagtatatgaacttgttgcctcattttgtttcttgtaccttcacatcctttaatattatagctcataacattcatttggatgtttaaggttcttaacctaagatggaagctagcctaggggtttgataacatttgtgttaggatttagtttatgttatttttgaatatattatttagttttagttcaattttagtttgtgttagctttagtttgtcatattttcaggtttagttaataaaaatgaaggtaaacaagttgaataaaaaataatgatttagttgaagttgtcgctagtgtgtcaaaagaattgtgaaataatttaaaaaatttggtgcgatcgagtccaaaccctcaaagttaaaaattcaatgccatggcactcttgtagaaaaaatggacaaaaagatcaagtttgaaagaaaagaagcaggcctcaacattgggaagtcaatgtcgacgcaaggtgcgaaagccacgacatgcactaagcctcgacattgcattcctaaggtttttaaacccaaattagaaaaaagaattggaggtattgatttttcaacttttagagacgaatttagaagttaagaagattcgccattgtttatctacgaattcttttcttctttttatttcatatttttaattagttttattcaactattcataataagtagct

SEQ ID NO: 3404 - DNA, 1523 bp, Cannabis sativa
ctctaagttgcagccatttccattgtaggataagagagcctcacagaataaatctttttccactaaattcccatttatataaaataattcatccccataagaatttgagtaggcaacaagatcattacaaactttagactctactacgaaaccagaggtaaagatagctgataactgaactagcaacaagaggcttaaaatagcaaaatccattcttaagctccacattcgctcactttgcagattgataaaccaaatgataataactaaagcatcagctcagaactctcccagtcaacgccaagtacaacccagtcagccaagtaggataaagattttgaagcccattaatcttcgtgtttaggactctaaataccaattttgtataatcaccttgaagttttgatcaaaatctacataccccacttacgaaaaacgaaaacttcgacagataatgagacctttactatgtttccttcacaaatttaacaacgaaataacccttttctcagataaataagctgatttttactgctagtagttcaggacatcaaacttcacctgtctcaaaattgaatcgagtccaatgtctcctactcacttcaaagctccaataaagttttcaagatcaactgtataaaaattgaacagtacccaggcggatttctgtagaaaatttcaattgtctccaaaatcctcttacataagcaactacaatttcaagccgtgtgtagaaaatccaagcacaatcttccaaacccaatttaaaaaactagcaaaataataataacccagatggaatagttgctcagtgattcaagtgtcaaaattttccttcaaaaatttcactacaaaatccaaaaagaaaacaaacccacatctcaaaagaagagctaaaagatcataacccaatactcaaaacatgtagatgaaaatctagatataattgaatgagctcaacctcaacccagaaagacaaaaatgcagcaacataaccaaacctgagtagaggcggctgaggttgttgacacgaaaaccagttctgacttttttctttttatctttatctttagcttgtgagaaaagaacacacaacaaaagcaaagcaaagcaaagcaaagatagaaaggaataaatcgaagaccgaccaacccgaggaggaagaagaagaagaagggaaactatgatggtggtggtggcctttgttgtatcatgtgtgatgtaacccatggccgtctcaccgcattatatataatattattattggcctcaaagttggaactttgaccgttggcacttattcatgtcattgctaggatacctcccctacaagggctttttggtaattcaatcatttttcagcacctttttaatcaacttttttggctgttctgtctgccttgtttataattatactactaaatatggtattattgaaactttgtttactacaaataattagcttacatgataattgaactaaaatataatgagtagtaattattaggtaatatataaaatgg

SEQ ID NO: 3405 - DNA, 1694 bp, Cannabis sativa
caaaaaatgacacgtaagaacaaaaccataagttaagttacatgcatttaatattaattgaagggttgtacaatatacatatgtataataaagcaaattttaaaagcaagaacaaaaacagtttagtatctccaatccaatcctgatcaagatcgattaattaattgaacttaaacgcatttaacgattcttaaccggacggacttgagttttaaacagtagaaaactgagcttctccactgagtaatatacaaaccctccactcgagtgagtcacaaacgatccaaagctctttcccacgatgcaatgccaagctggaccataccgtgaatcaaattcctaccataaagaaaaagagacaactttagcttcaaatatatacaaaaagaagtaaaagaaaagaaaataaggcttttctttcacgagaaaagtactagaagctcactttcttgagagccatggccaagtgggtgggactgggctttttctggtcactatttgagtcgagcaacgctctggtacaccgaaatgcacggtcttgcatcacagccggcatgtccgccgatctcagccgtatattcagatcgatggctattgccgccaagttcacttctctgaacggaggaagtaacatgggtcgagggcggctcactattacttccttttgtttttctgctcttctgattcttcttcttctaatttcttcccctggtctctccatgagctctgagagagagagtgagtgagtgattgaccgttttgaaatgtttggtaactttgactgaggactttgaacaataggacagggccttagggtttttattctctgcagtcagtctaggaaaaaggaatgaatcagtaacgtagaatctgttgacttttgatggatacaagtggtgacatggatttggacggctttgattacacaattgatttggtagctccaacgattacaaattttaattttagggaatcatcatcgatcacgtgctcccacagatccaaaatggaaggccatgccccttattgtaccaaggaaattcaaaattttagaagcagttgctgattttgatgattacatgtgttttattttggactcaaacagagtcaggttcatgaatcatcaaacacctctggtaccccataaactcaacactaaaatgatatgtgttgttgttactgcgtagcatatatataattaatttaaatttttgatgaacaaagtaaaattgatttctttatgttgtttttattgggtgtgtagaaggttttgttcagaagggtctttttcttatgtagagttgagctggttggttggttgctggtcttgttttcattttgctaatatatagaaagcctcttttttaaaaaaatgatcaccaaagattgtatcttccaacaatacattaatgattcaaaaatcaaaatcatgaaaaatctcagcagacatttgtaccagaagtttggggtgattgtgtatgtgaatccaaacgttttttttttttatataatcttaggatttctacaggccatttgaaaaccctacattgctagcatttgaaatcatgtataatattctataaagcctgcatttccaaattggtatggccgttgttgttagcagatgtgtttggtgcggaaggttgagtctcatcctcagacttcatctcttgaactgggggaggattgacgat

SEQ ID NO: 3406 - DNA, 2089 bp, Cannabis sativa
aacggataatgaatcattggattttacatggttggacactgtatctgatttaatggtttttgcgcacccacacatgactttactaggccaaataccagtagctactagctatacagtgtccaaccatataatatcagcacccttacagtgtcccaaatgaatttactagaatcaattcatatgtttaagtaactatttggcattaatgctttttaatggtgttttctgcagcttttactttatcatagtattactgattcgaagggtatccttgatgacaaacatgtgatgcgttcaggaaaatgtcaggtatgattttaattttgaaaattgcttaaatggccttacacagtttggatggatattgttttgttatgaactttacgcttaaatttgagatctaagctgttttaataggcactggccgaacttcttccttcacttaaagaagctgggcatagagtcctgatctttagccagtggacatcaatgcttgatatcttggagtggactctggatgtcattgggctttcgtatagacgtcttgatggaaggtaagtgctctctttatttgacttggacaaattattcatcataatttaaaaaatttgctctagcatctggtttgtgttactttcaattgtttgtacctaactgattggctaaatcatttctaaggactttctctctgatatgttttattgagtaaatatgaagatttttgtgcccactgtattattttgcaatttgggtgatgtaaaagttgtctgaatatttgagtccacgtatgaatcgtggttaatctattttgaggactttatatgcgtcctctattgtcagttgtagcacttggtgatgaaataagacgttgtttgtttatttctgaatgtatagtgttcttgggttttatgattagctctttatttttcgcttgcttctttctcaatatgcacagtctgactgctagatcgcattatgtagctttcctattcatcttttcaaaaacatttctcttgtttttcacttgcatcatttatcttctctcttcctttcttccttcctccgtctccctctctcgttcccctcatttatttatttgtttatcgcgttcgataagttgaagttttgtagatttacttaaatgctgaagttggaagcctgattgaacctatggttatgaagttgatttatctctttcccctatttgctgccaccccatttcctagattctactctgttagaatcttttttggctaaagatcaaaagctgaagtagtttacttttcaatgagtatgcctgtaattataggatattatttcttatttctacaaccaagtttttgaatggtataattcaatgttattataagagctcatacttatatctgattaaagtttgagccacattgaatccttgtccatttctcacagaaattttaggattttatatgcatgaaacatctggtttttcacatcagttatttgatctattagtaatctgaagcttcattgaagatactacaataaccatagatcttcttgcaatattgtagccttcctgaattttctgttttgctttttattttttctctgtgcgatgggtggtacaatctttggacacaccttaccctcttgtatttttctactttttaataataataaaagtagtggtgttttgcttcaaataagaaaaaaagaaagatgctattttaggtctgtctattcaaactgatctatctcaataaacaagtacctttgtctgttgttatctcagtagcttatttgaactatagtttgtagctcatctaaatttatcacgcgtacttataaagtctcattttggttactcagtactcaggtatcggatagacagaccatagttgacacattcaataatgacacttctatatttgcatgcttgctgtccacaagagctggagggcagggtttgaacttgactggtgctgatactgttgttattcacgacatggatttcaacccacaaattgatcgacaagcagaagatcgttgccatcgtattggccaaacgaaacccgtcacaatatacaggtatgttttctctgacatc

SEQ ID NO: 3407 - DNA, 1485 bp, Cannabis sativa
tgaaagaaagaaaaatacataaataagaagtcaagaagacattgattagggggacgagatttgtatgtttgggctatacaagagttaactcagattgttctttttctctttttggtttattgttttgtgggggtggctgatgcatccatttagaatttgatactgagatgaacctctaactagctattttctccaagtgttccaattttttctcttcattactatgaaaatgttatacttttttccactaaaaggggttcacaatatgccaaatcaacacaattcgaataacaattgtgagtagctgaagagagtggcaacattgaatgcgaacacatctacactttcttgtacttgttatcagcatcattcacagtataattgctttatttgacgactgggtgaactaacccccactctttttatcagagactcggcaaacggactgaagagctgcagaatggagctgaagattttgcatcaatggcgaatgagcttgtcaagacactggaaaatcgaaaatggtggcagatataagtaattcggccccccctttcacattttgctttcgataatcacacttcagttctctgaggaggatttaaattgcaattagtggcaagtctttaactaagaatggttcaactcatagcaatccagaactgaagtttgcgatactcgaaacagtgtaaagaaaattaggaatcaggaatggaattggtgttgccttaaattgtcaagtatatcattagggcttaaatacccttgtcttatggggtttttttttaaaaaaaaaaataaaatattctgctaaattattatagttgtacatgatgtgatgaatactttcatatgaataatattgctcctcaccattagttttcttcatcaaatgcttttattcctcaccttttttttggtgcgtaccaacaaagatgagcattaatatggtttggactttggaaccaaaaactaacaggaacaaagtagggctggggaaattgcttcattggaaaatccctgcccttcagttgaaaaaaaaaaaaaaaacgactcgcgttgagacccatatagattttcgcggcgaaaattcttaatatatttaatttgttttagtgtgactattcatcttcagtcattatatcgttttttatgatcttgttctgtccattttcgttttttttttttgggtgatcttgccgatttaattttgagcatcattgcctaattgttagaatttttaaatgtgaccatctacaaatgtttttggtcaaagctgaatgaggttgccccttagaagtttctgttgctgagtttgttcttacttagcaagatttctgttttcttaataattgatctacatttgtaattggcttggtttgccttacattgcataatatatctagatttgtgcatatttaattttgctctaacttttgaactttatcagttgaactatagtttgaataaaattcttcctctaga

SEQ ID NO: 3408 - DNA, 1292 bp, Cannabis sativa
aaagaaatatggaaaaagtaaacatagatatgatggacatatactagcatacacatgtactatattgatagatgggccagttctggcaggttagtgagagagtttgtattaaagtttgtaatcccttctctgggtttgtggttttcaattttcatcacatataaactagtggtcatctacgtttcttaagattattggtagaattatgttatgttagaaccttttaaggagtttaaaatcattacttaactacataatatcagtaataaagttatgccccacataattatatagtctcttttgttgaattctagaatgataaatatactgtttgcattcttcttctcttttttttctaatctctattttgatattgtcataatctggtagaataattatctccttaagatccaataaatacgtaacttagatttttttccttccacttatcgaaattttctttcattttcaggtgtggtattttagttactaagttccatacatggtaagatacctttttgtctgtattagttatttgaagaatgcggtggcagtgttccaagaatacatattcgaagagaggagctaaccttgaactggtgtgactgttatgaaaggcaaaattcaatatagatcattatcagtgattttaacaagcttggattaatgtcactgttatggtcattgtggtaaacaaatggcttcctctggaggtaggccacgtgttcaagtttgaacgcctttgtcgtcttgtatacacccagtctttctttgacttcttgttcttctgttagctgatagaattttatggaattttggaataatttaactttgttctaaggaagacgacacaagagtagccgtcattaaaaagatgattcttttgaattatattccaagtagcctacaatattttaagatatatgcacaatcattatcatgggttatattggtgctaaattagttatatttgacccaacttattggaaaaccatatttgttaaaaaggaagttgggttactttaactttgattgtttaacgacaaaacacacctctcttactgacgttatatgtcttcttatcttatcatcactcgaaatttactttggtttgaatttcttatagtgagaactgagtacacctttttctttatccaatatggataagttctgtttgtgaatcattaaatgttcatcatttgttaatgtgattcagaatattgatcatttatttctgtcttgaaaataaaaaacgagtttattagtataatatttgtatgctgcttagattc

SEQ ID NO: 3409 - DNA, 1276 bp, Cannabis sativa
tatatatataaaatgattttttttttctttggaacttgtaacttcatagaacaataagtagaagttacaaagttcaagtaatacaatagtttccattccaaacaacctcttgatttgatcttaatgcccctcctactctcctagtaatgttgtgatcagctaatacattatttctggaaacataagaaagagtaacattagaaaataaagatataaaggtaatgagtttttacaccaaatctgacaatgaagatctttcctaaagattttccgattcgaccaaaactatgggaagctccaccaaagaacatcaatttaaagctttatataaaactttagcctctgcaaaatttggagacaacccacttgaaatagaggagtagcaattagctattacatctcccttgcaatttcttacaattgttccaaaatctattttcatattcttttcatcaacagaggcattaacattcaatttttatttttccgatggaggtaacttatcatcctggctagaaattcctttacaacatccaaaaagattcaagagacacaactaacattgatgttcataccatctaaacagtttcctcctactttaacataaacgtgtagaaaataaaatcaccaaatttttcacatatgcaatgttagattttttattattaaataaagtagtattacaattagggaaatttaattttttgtacttacatatacctaatatatttttcctaaacacataacatttaatatttgtgggatatgacacattttagaatatccctaaaatactcccatttacattacgccctcccctctctcttcttctctctttgttcttcgccgaactccccactaagagggccaaactcggactggccatcgaaccactcggaccaatcggaccatacccaaacaaagaacatcggaccccataaaatcggaccattagaccaatcaaactatacccaaacaaccaacatcggaccccataaaaatcggaccatcggacccataacatcggacccactatccgactatagatcggacacatcgggccatcggacccataagcttttcgaataaaaagaggaccatcggacccatcgggccttcttcttcttcctcaaaatttttcattctttcacagatccaacaaatttcacaatctaataaagtttcacaaacaaaatcacaatctaaatcaatcttttaacacttactcacaaaaaaaagacataccttttgcattgcgtcgactgaagatgcacga

SEQ ID NO: 3410 - DNA, 1494 bp, Cannabis sativa
  modified_base (518)..(519): a, c, t, g, unknown or other
aacctcacaaaaatcttaaaatggcaattttacctaacaaaatttaaaagtgcactaaaattcaaagccataataaattaaatgacattcctaaaggaggtcattcacctcaacaaaaattacaagtgaattcagttttcacaaaaagtttttttttttgggatcatctaccggaatcctgaaaatgatcatctaccggaatccttatatctaaattcctgaaaatgatcatctaccggaatccttatatctaaattctcaagtaccgtcaactgaactgcaaatggcttgatccttcacaaagaaggtatgtaggcagctcagttaattaaattgattgagttcagctacatttctaaattcaccccaaatttttctcaaattacctcaattatttaatatcatcgtaattggaataaaaggctgtttcctttgaaaaaaggattgtaattaaatgattattcttataatcttggatggatcgaactaaaattaataaactcttatactataaattnngcataggtgaaattatgttttgcattaatttttaatactctaaatgtgaaatttttgcttaacagtattatataagttgtattaaaattagtattgtgttaattaatacgactataaattttattacaatacaaatcatattatttaataaaaaattgtccgctttagtttatattataatatttagaaatggaaatggtcggaggtcggggtttagggtctgagtctaggtctggactttgggtccaagtctggatccgtgtctgggtccgaggtccgactagggtctgtgtttgggtcaagggcttggtgtccgggtctaggtttgaggtcaggggtctagggttgactttggaggtctgggttcgtgtccaagtttcggtctgtgttcggttcttggcagggtctgagtttgggattaaaggctgggacaaaggccgaggccgagatcggggtccaggccggggccgagtccggggtctgaggtcgaggtcgactttaggatttggttcgaggccgagtttggggttcgaggcgggggtccaggtttcgaggtcggggttagggccaagattgggtgtatggtaaagctatataactttgcatatcctattaattatactcaataccatttaatataatataactccacacaatacaatagaatataattcaacacaatattctaaacgaaccctaagaggacaatactctgcaaaacatatcactgcactgcaccaccactaagcaatcaactcgagaaccactttaacaccaagagcttcaaccaactccagaagggcataaccaattttatagagagataaactttcaatcaacttacccaaatggtcacagatggtgaactaaccccaaacttcccaatcttgaccaaggccagccctgagattaggtaagccttacgaaaaaaaattatttggtcatttattaagaaaatattgttggaaattattt

SEQ ID NO: 3411 - DNA, 629 bp, Cannabis sativa
tcattactactgtatttttataattttctttgattatttttgtattttttttataaaatcgctcttttataatcttataaattataatgctactaatatgggtattgtcattttttttctaacttgtgatactagcagtgtaattttataatacacgttctaaacaaactacttttgaatatatgaatttttttaatccattttatttttacattattaaaaataaaattttaatgttttgctgcatttttatttttagcactataaaatatttagaatttttaaaaatttacaaattattttataaaaactacaatgtacgcaataaaagactcaaaaattttctcaaatatcaaaacaaatataagttggggctaattggaatgcttgaatcgaaaatgtgatatctgataggtaactaattttctttgagacaaacaaatctcccaaatacactcttcaaaatagcatcaatccccaaattacactaaatttatattacttttagtatctcctccttttagtatgtaaagggtcatgtgataatcagtaatcccgtgatctataagaggctatataagcatgggactacacaattgaaaatagtagcctcctaagaaattttctca

SEQ ID NO: 3412 - DNA, 849 bp, Cannabis sativa
acgaacgacatgaatatgtaaggaaacgacaagagattgaagaactgatacctcctaacattgaaagggccttctcctggagatccttctccacctctaatgcaggtagtgacacacttgatggtgcaggactctgctttcctcgatttcggcttttgaattcttggtttcttgcaatcattgggcaacacacactccccagacagcagctgcggtatgttctctagtgtctcggcctcaggaggagcctcggccccggctgcagctgatgataatgatgatgccaccaaggctgcagctgcaactgcaacaaagctcgacttaatgcttttgagtatgctgctgctattgcatttgctgctgctgctgctgctgatgttgatgatgatgctcttgttgatgcagctcactcttctgaatactagtgaggaagctcttctgaagtagagatttggagcagcagcaatagtagttgtagggccatgaattagcatttctttcttttcccgttgctctttatcttatggatattcaatcctgttttaatcaaagtcaccagcaaagagagaaagaccctttctctaggaacagccattttccccttatctctttaccaagtggtccccaaaaggtactcttttttattttttcttgttcacaagtcaagaggactgcgtctaacaattcatgtacgtgtccttagtcttcaccttacgttacatatacaaatattagaaacattaggacaaaataaggattatttgtataatacagctgagcaaatgtcaaaagagttctctctgttaattagccatatcacaaatgtataggtttaatggaatgaatctc

SEQ ID NO: 3413 - DNA, 726 bp, Cannabis sativa
ttctcatgagtctgcaaattttttcttttacatcactgaacaattgttgtttttctcgtctgtatacgcaggtaacccaaggtatttttcatggcagtctcggatagtcatagacaacattctatggaattgaatttatgcagccaaagtcgtatttggtgagaaagaaagaactaatttgtcaggattcaatacttgtcttgaggcacggtggtaagtatccaaggatcgcttgattgcaaggcatgaattttcattagcataacaaaatattaagctgtcatctacaaaaagtagatgagaaatcggtggagcccgtctggtgagagggtagccttgaagatgtcccaggtgttcttcattctgcagtaaacatgaaagaccttctgaacatattagaaacaagtagggtgacaaagggtaccgttgccgtagtcctctggttggtgtgacagaaccagtagtctctccatttaagaggaaagtgaagtgatttgttgtcaaacaagtcatgatgagagatgtccaaccatctgcaaatcccattcgttccacaacagccttgataaaagtccattcaacccaatcaaacgcgttactcatgtctaatttcataacatccaccccttttcgatcttacattttgagtttaataccatgtactaattcgaaaacaaccaatatattgtcagttataagtctattgggaaggaatgcactttgtgt

SEQ ID NO: 3414 - DNA, 2659 bp, Cannabis sativa
gtatgaaaaagaaaattataaaagtcagtcccctgaggtaccacagtacattattgggagttgtttagtttatttaaaaaaaaaaaaaaaaaagaaaaaagattgtttatctgggaagcaaaattaaataagtttgataaatttttgtttataattgacttttaatttcctattttctaataagctattatcataatacagcgaagaaattctggtttcaaatagacatgtatgtcttgttttcttgtggattgaaccacaaatttatattaagtggttttgttgaataaaatcacattaatttgaatacatcttaagagctctaattcaatacattttttccaagttcagccttcttcaattcaatcattgagaagaaaggcaaacatggataacgacacttataatctttggcaaataaaagcaagcattatacttggttaatttccaaaccccgccttattattaaaagtgttctcacttggctaaaatgtcaaaggaaaaagaaagtcttctgtacaataattcaattaaatatcaaacaaaataagctaagctaggaaaagggaatctatacatggtacaagattttataattaatggggcattaagctgacttgcgtcacactcaaacaagcccatcaaatatacatatacctacactactcaatctcgtcatcaggcaaaattgaaaggattttggcttactgaaattatgcagttggccccatttgtgcatgcttctttcaatgggatccaattgcaataagattaacttcaagacttcagagccccgactttactagatggcattgtttcaatttcaccccttgcattgaggaaagttcaggaaataatcccgtgttcgactcagctgcattattgccagagcaactcaagatcagcttctgattcctgaattcaccgttaaagccaattcaacggcagttttccaaatagcttggactttcaatctgtctcttccttttcacccttggcagtttaggtagttcaaagttgcaactttaatataatctgaatgacagtgctttaaaatatagtatatagatccagatgattgcagactgatgcttagtcgtgcaaacatgcaggcttcaacttgtcttgtttctcatagctagcaagaaccaccaacagcagttgagcacttaaacggagtacaagactcctggcaagggatgaacccattcacatttcataacacggccctatgtctcttgctctctcgaatgagtttcttcttcactgcgctgcagaagctcctcataagctttcaatgagttagctgtgaacttttccatggcctcaaaaatacgttgcaggctagcctgcagactagcattactagtgtcgctttgatatacaatatgtccacttacagatagattgttattctcccctgtgacaagctccattttcttgtcaaatgcttgaatttccttctgcatcctctgatcctctttatccatgttcctaacttttctctctagatccttgtttgccatcattcgttgacgcatttcatgcttatcttgttcccagatctgaagaacactcgaggcaaatacacgcatagaatcaaccacttccttttcagatatgttgtccatagcttgcgaccattgatgacagattacaaaaacaggaggcgcacccatcctcccaggtgagaaaggaactattccatcagctgtttcttcaggctcgtagaaaatacatttgactagccaatcatttatggccctcacataacccttctgggcacttatccaagtagagaatctgaaagtccagttaataagctcacgcccaaactgcaaagttgcttcgagatgagcatcaccaagctttttaccagatccaatagagcctagagctctagcttccctgatggcttcacattgaatgctatggcattcaagcatacatttccacatcctggttaacctgaagacattccaaaacaactacccataagaatcaaatgcataagcatctaatataaaaggacattaatccagatgtgtgagaaaaattagtggtgtgatttcagaaagctaagtgtcagtttaacataaaggcataccaagaggacaaaagatctttcaaaaggacaatgatttacaaaaaagaaagaaaaatgctatttgtctctagctagagcaagaaaatgatcaagtgttcatatataggcatacaagcccttggaaagtcagcgtagaagttttatatatctccaaaagtacataacagtttttttacatcaaggtggacttacagtattggtatcttcatattctaggagtcatgccaataccatacaaaatttatcatacttagtagtgggattcaactctagcacaaagctgttctgagaattccacaaagttccttataatgaacaatcgcaattaatgagcatgcatatcaaactaggataaaagcatttaaaaattcatttcttctcattttaatttgtcatctatgttttttcgtactcttaaaagtcccaaaaggctgcgaaggaattttctactttagctgataggctctccttaagacaaattctgtctgcccaaagtcagatttctccaacagaaccttagatttctaactaagctcacaataaatacatttt

SEQ ID NO: 3415 - DNA, 1287 bp, Cannabis sativa
aaaggaataggtatagccatcattgagttccctgtcttaagaaaatcagagaattttctagaagtatttgaaataatattctccacctttacctcaatatcctggatcaaacttttattcttttgatttcaaattccatgaataagcagccgcagtgcatcaactgtttatccatcatgtctggctcaagaaatttgcgatggttgtgtaagaaatccctcaaagaatcaccttgaatgttagagctaaacattgcaaactcaccaccaaacaagcagcccgagctacaaagaagtctctgaaaacatgcagcctgttttttttttgtatctccaaacaaaaaacgcaagctttatcttggacaaatatgagtttttccgtcaaaggaagggcatcttataacactctccaaagtatcatgctgatgtggggatggataccaggtctccaaatcaccaatttgtcatcaaatctactcctcgtatcattttatataagtctgtttaatagaaaagaccatgagcctttatttttccaaactacatagtcttcctcaagatgattaagccttggtatttgaagaattatgtttctcacttcctcaccaaagaattttctataagagtaggattgcattatgtgccaatagagatctctgctaccgattttcgatatagatgtcgcaccctacatctctccattagatctctgaattccacaaagttcagccatggtagtcatgggaaagttttgtattttcgcaaccatgccagctgagatagataaaacatgacagatagtaaaaaaataagggtaagaaagagtaagattaccatgaaagaaaagtccaattgtgttttgcaccaccacaactaatgttttcacctcaaccaccatagttcccatcacctgaactgccatttctgccatctccacttgacccaccacctgaaactattcaaattcaacattataactttcaacaaatattataatgcactattgtttgtgatgtctaccactttagctataaaataaaagtatcatagagcagtataactaatacatttcagtactataatttccaacaaatatacccacttaccaaatggccgcaaaccaatccaaaaaatcactcaattcccctttgagactgccaccattaatagattcaagagaatttctcacgtaggagtgagacaaggaacaacttttaaattttctttgagtgatatgtggttgtcaaagttcgagtcagtaagaagcatgtgagatgggtaagaagca

SEQ ID NO: 3416 - DNA, 1486 bp, Cannabis sativa
aaaaaaaaaatattatatgattttaggtactctatctaaatttacaatggcagaaactcctcattttacactggtccgaaaatgaagatgaatgataataataattgaataaacttttgcgatgtaaaaataaaattgctatttagatagattgctcgataaatggcaaagaaaaacataaacatatactccatgatgtaacaatggacaaatttacaaactttgagatattttctttacttgactaaatatatattcacttcgaatacaaacctcggataatttggagactaaataaacaggggaattaaaatcatctcactaacaaataaagctaagcatttgaaagtacagatatgtattcatgcaaaatcccaaaatatagccgtctccaccaatatgaacctgatatatcttattctatcccggaaaaagagagctctgttaatgcaaaaagaaaaaaaaagaaagaaaatatataattgggcaaaaaatggatcaatgagaatcacatccagcaaccctatttcccttaggcctggccagtacattctgacattgtcaggttactggggaggagggcttccggctagccaaccccagacaccaccagaaccctgcttctgtttagcatttgaagctgcttcttcagaggcagccttttgtcgctggagaagttcgagttccttttgtaaagtttccattgtttggagtttctgccgtagctcagcaagctcaacctgtagtagtagttcaaaagcaattagcagagtatccatcttcatttactttgttctttcttcttttgtcacatggaaaaataccaaagtttcatctcgggcttaagtggatttaggttagcctgctgattaagcattccctctattgtattatgaatatcagttatacttctgtgatcgaatgtcatgttagaaacctcttgattcatttagtatatcaacccatgaaagtcacggtaaccaccagaaggtaaaatttttaggtgtagtgtcattgcattggccagcacaggcattcaaatggccaagtaatttcattgaatttgttagatcaaacaatatcggatcttacagtgatcatatgaaaaagttgtccaaagtcaagtgaatacctctagtttgaaacatcttgactgctctgctgctagctgaccacgaacagattgaagctcctacaatgtatataaattaacattgaaaaaggatattttctctgaggaaattacaattttgtacatccaagcaagttaatcaaaatcacagcttatcatcatattaccttgtaaaggtcagtgttacgagtttcagcatccgccaagtcctgctttaattgtaatgactgcaatttctccttgttcagtgaagattctatttcttctttttcagctctgagggatgctaaaacatggtcactgctcttctcacctttagatttctgcaaaagaataaaaaagcttaaattcata

SEQ ID NO: 3417 - DNA, 602 bp, Cannabis sativa
aaaaaaaaaaaaaaatctataatcctgcataatcttgaatgttggtcacttataagtttttcatgaatattataatgaataggtttcgttcgttttacatattgctagctagtgatgatgataatcaccaactaaaattttcgtaaaagtctaactaatttaattatttgttaattataatataacataatcaaataagacacgtatatatctatagtaatttgactatatatataatatatatggagacgggtcttttttactaattcaatcaatgaatttatagtattattgacaacgatcgatatccctttattttgagggttttagctcatcatgataataatattgttaccattctattctatctgatcagccaagcacataataacaagatcgacgagtaagctatctcgtattataatgggtacattccaataatggatatgttacacacgtacgtaataacaaaataattgactttacgtgctaaataggtaaattatatatagttgagttgacttataaattttttagatatagtactaattcaacacttggatgatgataattagatccggtatgtaacgtccccgcttcaa

SEQ ID NO: 3418 - DNA, 918 bp, Cannabis sativa
aaatctcatcaagttgttcaactcagttcaaggaaaaagggggaaaatttcataactttataaagtttcgtccaattctttttttgtgcttttaaatcactgatcaatcaaaaacccaacaaaaaaaaacgaaaaaagagaaaagctttaggtttaggtttaggtttttcttcttctgctacaaacttttagatcccaaattgatgattgaaatctcaaaatcaaaaatcaaaatcaaaatctctcgtaataaacaaattgggtattggattttgctgttcctagtatctattacgtgatttttgatactactagggtttgattttgatgatgatgatgatcgaatcgtcaaagaagagaaaccctagatccagatagcgaaaggtcaaaaataacactgccccaaaaatataaagaaattaatttaattaaataaataaaaagagtttctttttcttatatatataaataaaatataagctgtagtgccaaaaccgtaattttggaaaagtttgagggacaaaatggacatttcgttacttcaaccaacgagcatcgagattctacttggtttacgtgacgtggcacgttgtttttcaaaattaaggttttatttaattaatttaaaaaagataatgaaagtgcgagaagtttacacgtgttgggatttgattgggtgaccatatctatggttgtggtttttttactaactctttaataaatattcttgtgtattactttgctttagtgtgacttttactatgtttttcattatttactagaaaaagtaacattttttactttgattatgtaatatttttcaattatttattttttcataattgtaaatattttttaaatttatatatttaaagtagagttttaactatagccttttagttaatttttatatttgaa

SEQ ID NO: 3419 - DNA, 1913 bp, Cannabis sativa
atatattggtgtgtgtaattatagagtgggggagaggcatcaattgtggctgaaatagtagaagtggaagagaattcgactcaaaagatgcaaactttgagaataccaccggttttgacagtcaacaaatctgctgcttatgccatttatgagcttacatacattcgggtaagtcagctttcttgctgatacttgtactaaataccattttggtagttttagtaatggtaatcatgtgtttgattatttggttctgagagtgaaattttaagagcccaacaaaagatgtggaagtattatggaatggaacatctatgagtcttaacattttgaaagttgtttagtttcaacttatgcatacagtttggatgttctgtttgatgttcgaactttatgattgaatcaatgtgtgtgaaattgaaaagcaaacactcatttttccaggacgtgtcatataaaccggaagagtattatgttaagacacgcaaatgtgaaccagaagctagtgcaaaagttgtgaaggtatgtgagaggtaagtgatcaatcaattagtctttctttaaacttaaatgctaaaatcttttcattactgcccctgaattttctccaccggcttaaaaacatccaggtttgcacacctttttggtcaatgagtgtattagaagcagcctaagtatctgtatggtggcttagtagttgttacttttgagttagacatatgccaaagttgtatttctttttccttttccatggatatagatgtcattaacactaagaattttcaagttcactgttgtgttgttttatatgttgttgtaggttacgagatgaaagtggtcacattatggagtatactgcggtgacatttccatcatatctgatttaatttttgttttagaactccaattgtatttcattgtttgaacccttcttctttcttttctctgcagccaatctgttgtccttgtggacctcagcgccggatgccttcttcttgtggaaatgtttgtaagtgcctctttcagatgattcaacattgttgagttcattttcacgagattgacttttctattatgatctttttcctcattagttgacaagtgggtgaagggaaaggctaatacagcgcattgtgttcgcttcccaggtgattggtatggtcattggatcaccttatttttcttcatttagatatggataccattttcttcatgctaattagtactttttaagtgacatttttcaattcatttaggttccatgtttttagtattggtcagcgatcactgggattcagtgttaaaattcaggtgaagacagggtccaaaatttcggtaagtacaagttagctgtgattttgctgttagattctacttagcatcacatgttttgacttgctgacaataactgtttcaacatctattatgctaccaggaagtgtttgtaggtcctgaaaatcgaacagtttcatccaatgacaattttttaagagccaatctgattggagattttgctggatacacaaatataccatcatttgaggacttctaccttgtagttcctagacaggtacgattattcttgattgttatgcttgtaagagaataaaactgcgtatacacttactttatgtatttgaataaagaacagcagttgtattttgttatgattattatgtgatttgatgtctcttatggaagggtggctctgatcaaattcagaatctaggaaagaacttttctatgtggatgcttcttgagagactcagatttaccttagatgggcttgaatgtaacaaaattggtgttggttatgaggcttttagtgagcagccaagcttctgttcttcaccttattggagttgcctgcataatcaattatggaatttttgggaggttagcatgtattaagt

SEQ ID NO: 3420 - DNA, 629 bp, Cannabis sativa
gagagagcgaggagggtgcatagtggatagcatttttcacctctgaaattgatgaaaacactcttagaataattcagagctggaagtaataaacttttacaccatacttcaattcaaactcaaaataaattcaaaatggcagcaaattgtgatgtacttgctccatagtctcaactatacatatatgtcaattgttatctctgataaacttcttaaaatcaacaacaatacaatgtgtatgtatgtaatctacaagcaagaactgtatcaccaaccaaatagtttattgaatattccatttgcgtctttcatttgaatggtcgaattgtgttaacaagtacaactggaaatcgccgcaatcagttcaaactagtatatcacattacgcacttctcttatatattatttggattttttttttctctcaatggaaatgttgaataacttcaagctccaattacaaagattaaaatgcttgttttcacttaaaaagcatcggtgttttgtactgatgcaaataaaagttacaacaatccttaaaaagaaagagaaacaaacatttcagaatctatgggaaaaaaaaaaaaagacgcatacacataagtagaaacaaaaaataaataaataag

SEQ ID NO: 3421 - DNA, 1985 bp, Cannabis sativa
tatattataatgtatttttaataggattctttaaaaattttaaaattcccctattttataaaaaagctgttagtattactctcttttatttatttattttattgatttctcaaacttattaattaacggagaaatcaaaatatattagtctttttcagctgacacaaattcagtagacataaataaataaataaaacaatacttatttattttattacgttcaatggagtagtacatagtgacatcaacaaaccataaatatatttaacagcagtactagtacgtatatatgggtagaaaaacagctttaacattacaagaagatgcattaatattcccaattaagttggtatttattaatatttaaatacgaaagattaatattgaccaagctttattaatgtgagccgtctgatcgatccattactcttgatcatgagccgtacactatatataactctaagcggtttttgcattagattttcggagcctcttttcctccgaaagtatttgtgcaaacctgtaacaaaaccatatcaatcgtttaattcataataaaaatgttgttacttttaattaaaaattatatatgtattagtataacaataacaatatctctatatataattaaacctttttagttcatcttcattggtatgggtggtgtttggaattggttcgtaaagaccggtggccatattaatgcgagaaagtggttttttgagtagtttcttccccacttccactagattatttaagttggattttgttgatatatcaaccgatgataaatcccctgtcaatgtgtcatcctatatatatacaatatatatatatcaatatcatcatcatcattaagcattaaatagagacagctactgtattttaattagcctataatcgaaatctgactaactctaatttcatatatttaattagataaaacaaatgatattattatgattagtaataagacaaaaaaatgtaattaatttaattaaggattaataaacttacatcaattcttagatgattaccatcagaacccaaggcattgaaaaacacagtgttgtgatagttaaccatatcaacacttgcttcagagaaaacatcgataataggagtggatccattgtaataaatccaagacaaaggcccccacgtggcagacagtttagcattgtacttttgttcagtcttgttcgaacctgttcccaatgatatcactagaaaacgtgtgtaatccaatggcttagtatttgggtcaaaactcaaattgttttgcgctatttgtttcgttatttcacttattgcaacgaaagactgaccaagaaaacaaaaaaacacgtgttacaaaacaatctatatattaaattaaggtaaataattagtaggtaggttattaataataattacaatattggcttatttatttattaattaaataattaattaccggattattaacagccacaccaccatcaatgagatgaaattcttcagtctttccctccttatcttggttagtaaaataatgagaaggaaggtatgttggggctgctgacgtggatatcgcaatgtctgctagacgagcatctagagctgaattcgctggagcctatttaaatacattaatttgtaattttttttatatatttgtaatttgttaattggataaatattgtggttggtacgtgtgattaaatttataggaaaaaataatgaaaatctttatccaagtttaccagataagaggaaaatatagtaggttggagcttcttgatatcgaaagcaggaatgactacgttagtcaaagtttcatgcaaccttgttgtccccaacagtttctggaccaagctatgaagatattttccatcatattttggtcctgtagcatcttgcaccgaaccaataattgaaccaaaaatgcccctgaacatatataattaattaaaaatatttcatcaatacataacatatatata

SEQ ID NO: 3422 - DNA, 593 bp, Cannabis sativa
aaaaaaaaaaaagaaaaagaccaaagttgaaagcttggaaaaaggaaagtttctctttaccaaaagactttggttatttccatagaaaaaaaaattaataaaataaaagacttggtttctttcttcactgtgaatatgaatgtattaatggaagtaactagttaggaagagaaacaagtctttaagttgaagttgttgccgcctcaccagtcatcaccaccacaatctatcaatatcttattcttctctcctccctccacctgggtaacggttccattgcgcgtcaaaaccatttttatttttattttatttttttaatttttattttagagagagagagagagattaagacgattgaagaggagagagagagagattgcttcccgcgttttacatgtccatatccatttcactcagtttcctcatgcgtgcaagctattcctaatctaataatctcaaaaacacaacccttcgctcctaacattttcatgggtttttgacggttttacttcactttaagcttcttcgtacctattttctcctcttttctttacccttttgctatatattactttcctctctctctctctctc

SEQ ID NO: 3423 - DNA, 1142 bp, Cannabis sativa
ttttaaagaatattgctaaccaatgtgaggtttacaaaagataaatggcacccattgatacccaataacaatactcttaaattagttaattgtgattctaacttttattaccatttttggttgagtaatttattagtttaaaatgagacttatttttaagacatagagagacacttcccccctctttggtggtcccatttttaaattgcaacaaaataaaaagaccaatcttccaatcattttattcattcaatcaaaactcttctcattccaaaatcaattattgtgtgttgccttactatatatattttcctctcaatttattttgtccaaaccaaaaaaaaaaacacacttggctataaccttcaaactacaagaaagaaaaaaaaaagtctttttgttcattctttgtttctcatagtccattcttggtaagctatcaattttttttttaagtttattatcttttatatactcatgcattttctttttcataatctttttgtaaataataactaaagataagccaattttatcttataaatcttactacaatgatcattgtttcattttaaggtaatttaaacctaaatatgcctatatataactacattacatttcataacataaccatcaattaatttttgttttaaattcatatatattaagaaaaaattaaattagccaaataaaaatccaatctttaataaccctaaaaaataaagattaaatttttattttctttttctttctttttaatgtcaaaagaatgatctttttcgtcactatcatcaccggagtcgacaatgtcgtccgccgccgccactgaaatttccgatcaattcgaaaccccaattctcgacgcagaatcttcagtccttctccacacaatttccgagcacggcggctatgctttcgtccgcatggcttctcaagccgatgccggcgactttcgggccgccgaggcggctcgcgagatggcttgggagcagcttcactcgggtccatggcactctgttcagccggcttggcgcgacgcttactccatggcttgcctccgagtcgccaagcttcatttcgctagcggcgaatttaaggaagcccttagggttttggatatgggcctaattatgggtggaact

SEQ ID NO: 3424 - DNA, 3642 bp, Cannabis sativa
tttatgccgcaaattactcaaaagaaaattatataattttgtcatattgattaaactatcttacacatattttaaaagacaataattcaactcttagtaaaattatctatacttttaatatttagtttactttttacctttctaccgtttctcaactttaattttgggtcccctactacaccatattataaaaatattattatgcaaaataatgacttgtttgtattgtttgatatgtgatgtaggttctagttctagagcatcattagtaccaaacacttcaactccaacattgtttggtacaaatgatactactaatactactcaatcaaattcaactccaacattgtttggtacaaatgatagtaatcctttctcctcaaaatcctttgttgctactaatactactcaatcaaattcaactccaacattatttggaacaaataacactactcctttctcctcaaaatccttattgggtaatactaatactactcaacaaaattcaactccactatttgggtgtggctttaactttcgtagtagtagtactagtccttctcatggtcatggtcaaccatttttcttcaatggtcaacatcccatgcccatacaacattttactcaagattggcccttccctttctcctcctccaaaccctttggtactactactcaacaaaactcaactccactacaatttgggtgtggctttaactttcgtagtagtagtactagtcctaattatcatggtcatggtcaaccacttttcttcaatagtcaacattctcaacatctagatcaccccatgagttccatgcccatacaacatttttgcaataggtgtggacacaaatctttcttggagcttaaagagatagatggaccaaattgttttgaagtaaaagagcttcttaactcaatatcaagcatgcctttttaccaacataagtctcatgaggaatttagatgggaagactacaaccaaaaaaaaggtacctcactcactcactcacttatcaagtcattttattatttttttttaagaagaaataaatcactattattgatttagaaatgtctttatgagttcatttatttattcattttattatgtgtaggaaaatgccatgtaaagaagggtacaactacaagtgaggtcctcataaaagtgaggcatccaagccgtttttacatcttactaaagaaagtcttatcatttgtggccattttagtcattgctcgactacttgtgctttatctcgaggaatgacttctttcttgcattgccacgtgtccaatcaaatgatttatctaccaatttcaagttaccatttttccaattgggttgtttttttttttttttttctttctagattttatttatttttatttaagaaaaacaagttaatgtaataaagttcccgatttcagatctttgtgtatgtcttagtctttgtgattttctatttcggattttgttttggatgaatgtaataatatctcaagaatttttctagccacagaaaataatagtagaaaacaaagaagtctattctagagttggaatatttataaccagaaaaattggttttgcataaaaaatctttgttaccatgggacctggtgacatatgatgagtcatgggtcattttgagcagagtcttcatataattgcataaattaaactcaagaatagttaaagatgaattgttaatgaatgtatgacatgttaattctgcaccagaactttgttgtatgattattgcttgctaacactacactaaaccaaatttattgacaaataaatacattaaaacttagttatgcaatgacctaaccaccgactgaaattaaatatcaacaattcaaaagttgttcttaatgatagttagtaatgtcattcaacaaaaggctgataaaactctaaattagattaacaagctggtcaaaacaggaccaaataaatagacagaaattaaaaaaaaccacattgattagaatcaaatgaataatattaaatagcagatataaacatgagaagtgacccaagttttaaatccttcagattacacattcttgctctacacaactccaaatttttatgacaaagacacatggccggctttaaccctgtgcaagctgtgcaattgcacaggttccaaccttgcacagggcctaactaaataaaagctaaaatatttatcatttttaaatttaaatccttttcagtttatttttttttatttttttaattaatgacccacctttttatatctagaatctattctaatttatggtagtttactatttatttatttattgtcaatcttttatatattccattcaatatatgtttgaataatatatatatataatatcttttagttgtttcaaaaatttgaattaataatttttttcatcatatatatttaaatatttctattcaatttaaaatttttcattaaaaaaaaagaaaagaaaatatcaaaagagaaaaaaaaaaaatacacacacgattatatatataagttaatggcaagactttatttctcttaaaaaaaattatcaaatatgaatgaaatatttttttttaactaaaacttctagaagtaaatttttaaacttggtctacctaaaaaaataaataaataaattgaacttagaatttaattatactattatttttagtaagggccaaatttttaagattagaacaaggcctctaaaatgtttaagaagaccctgcaaagacataagatgttcactataagatcagctaatttatttaaacttaaataactatgatacaacaatttatctaattttggttccataaccaaaacaatgtacaaaaatattataaatttcaataaagaagagcaaaaaattaaagtaaggtttgaattgaaatagccaaaagttgagagatcaaacttatttacaccaaaaaaaaactatgacttgacatgtgaacttttaaaatgtattaagatattatatctaaatctgaatactgaaatgaaatagtctgtttgtgttgctttgttctttgttttgattcgtattaaaaatggatcttcaattaaaagtaaaattcagtgttctcaatgctattgtttgttgggtatgttttttgtgttacaaaactgatttttgagtaggaaaaatagagtacttgtttttcttgatcttattctggagccattccaatggtgataatcgtattctcaacataacttggctatcatcatctttatcttatctgattatagtttgacagattcaagtttagtaattttgtggtttgtttattttctaccatatagaatttcattataattttctttcattgtctatcgttgaataagttttataagctttaataatcttctttcatttcctgttgatcctttagtaatgacagaataaaataaactattgaagatgttttcctcttcatattttaatttactcctactgaacaaatgaaattggaagtattctctttgcttttcatttattctttatcaatgacagaataagttatattagttgtactaatataactatgacagaataatctgaactaattaagatgtttacatctacttttcctttttaactttttagtttgttcct

SEQ ID NO: 3425 - DNA, 2178 bp, Cannabis sativa
aaaattagcagaattacataaaaagaaaagttcaaaaacaagtgtgggggatctagattgtattttgatacaagtagtactcactcccaaaagctagtcttagagagaagggtgcccaagtagttatatactacaaaccaatcccatacttagtcaatgtgagatcctaacaatacactcccttttgtgctggcgtccattgcagcccactttttgatggcctactctgcggtggcctaatccacatgtcgcccttacaaaagcacttgatacaaccacttgagcataactcactcccaaaagctaggccaagtagttatatgctactacccaatcccatacttagtcactatgagatcctaacatattcattgtcttacggctattgagttctcaaagttgtattaagaaagatggacattctaggatctctacaataaccagaaacctgtttctttttctaattctagattataattaatggtaaaacatgtaactctaaatgtcagttgattaaaactcacctcatccaatgcaactgagtaagaaccaccagtttcttggcagagatatttgcatataaaaatttctgcagagagaccaataactgaacaccttattttagatttcttacatgtctgaatggtctccattatatctcctggatcacatgtacttaatgctgaatataagattagaacttctcgatgaccatatgagggaacttgattcagatatccgtgaacaaggtccagcgcattctgtatcgatgaatctcctgagcaatcaagttttcccatcaaagccttcacatgagactcaggactgccaccaagatctgttaagcaattagctaccccatctttaatggtcactagaccaatttgactaagaggattttgatcaaaaaactctctaatgaatgcctcaacatgttttactactacagcccttcgactcggtcgaaaatccatttctgtagctgcctaatgacaatgccagcaatgaaaaaccagttttagaatatatgcacatcaatgacaacaagaaagattaaccaacaaaacaataatgaaaaaaataagcccccacaatgttttaacacatttaattagtttgaactaaaaaatgaatgtctaacaacctaatcaacgataaaactaaacattaattgtccaatcaaacaagttgttcatctctccgaagatcatagctaatccatttgacctaaaaaatgaatgtctaacaacctaataaacgataaaactaaacatttcatacaagttgttcatctcttcgaagatcatagctaatccatttgacctaacaaaatgaatatctaacaacctaataaactataaaactaaacattaattatccaatcaaataagttgtttatctctccgaatatcatagctaatccatgtgcagttacattggccgtccaacaaacgaattatcaatgtaaatctggataaggaacttgctacgatcgttgaaaaatcaataattagttctgataacctatcaatttcaactttacttgtgttccacatttcataacatatcaatttcagtatattccatgaaagattattcattgaatttcttttacatgtttgaacaatttaataatacctaacaacatttctcaaaaaaaaaactctcttacccagataccaaatcaacagaaaccacaaaacccatgaatcaaaaaagcataaaaaacgaagggcttaccttagagagatcaataacaagaaaaaggtaacgaatgagtcccttctggattcgaacagcagaggccgtacgaaggcggcggcggtactgggaatggtaaagggatttattatcgatgggacgaaggagaccagactcatcctcttgaagcgattcccatgacctctcatcgtcgtaggttctctcccaggcgtcacggccaaggccatttccgtcgtcttcatcatcatcgtcgtctgcttctccattcaatcttcttccctctccattgttcatactcttaacaacaataataatcaataagaataatgggacataaataaagttaattaatttatgatcagtgtaacaccaaaaccaaaattgtgggaaagattcttcaaaaatgttatggaaagagtctgtctttgtaagcctcactccactccgacattcatc

SEQ ID NO: 3426 - DNA, 2364 bp, Cannabis sativa
tttcatgcaacttgtgattgttgtctttttcagagtttagatctttcgagaatagatcgggttatccgatgttcatttcggtctcatggttagtacgactctgttattgttcatgtagtgtgagagtatgctttttcaatgaaattgacgtcaaatttgtgattttgttgggaaattaaggccttccggcagctgctattgagccggtaccggagagctgtgtatcaacggtggaggagcggacacttggggacagagagagatggtggaagatgggtttgaaagcaatctcagatggaaaattggctgtgttgcttttgtctggtggccaggtgatttactgtaaatcttgatattgtttgttctaaattaaattattgatttcgactttttttttctctttttattgattagcttagtgtttgtgcttttgtagttttatgttcaactttacactacactcgaaaagttcagtgattaactaaataatgttatataggagatgatgggttgtcacatttggagcatctctctttcataatagtgatacaatttagcatgtcagggaaaaagtatttgtaatgacactttatttaataaatatatatatatatatatataattaaaagaagcctttatttccactaatgatttgaccatgatctgattattgaaatgtttagattaataatgcaaacgtggactttgtggttccatgaattttgtatgatattgcttttggggcgtattattgaaataatctctctctctggttggtatgttcttttcttcctgattccttatttgcttttgattgcatatagtgataaaattgcatgattatcttttgtttctaatgaattcattaattgcgacaaagttgctttatatgattctaaactttattttttctctttctgggtaagcatctactttaaaaatgaaatgttccgccatgtgtacaacaccaattattaagggagttctaatcatctgaatcataattagaggaagttgttaaatttttaagtaattgttaataactgattttgttttggattttcctgaattgattgaattgtacaaatatggtgtcattagaggcacattttctcaaatttcccatctaaagacccaaggatttttctttagttagcattctttgcatcataattacactacattagtggatagcatgagttgatgatttgaagtaatgaccataaattacctctacataaaacatatttggtactgtgtaactgtgtattttcctaattgtcacgtatcaatctcataatacagagagagatgctcagtaattaactttttcatatctattttctacctggtttcttatattttttctttagactccaatatcaaagtttccatatccaatcatggtgaatttaatctcttgtttgaagcttttttgtttgttaatgattaaagttgatggcatacagagatttcgtgcagatggaggtgcattataatttaagtatgtcagcaggcacttggcttagcaacaatgaaaattttcctcccttttttttttgacagtgctaatagttatgctgctaagataggagctacttgtgcactttcaattttcttcccctattttggtaactgtaatcgtgttccttctgtaatatgcattttttctttattaaaatatgatgcagggaactcggcttggtagttcagatccaaaggggtgcttcagtgagtaataatcatgactattttttatttcccagttataagtttattttgctgatataaatggctgctgcactagaaatactggtacagattagaaaataattataattcatggcgtccattttccatttaattttcattaataaatactatagaaatattatgttcctttataataagccccatttcaaacccatgacgtgttttgtatgttttagatattgggcttccatctggaaagtcactatttcaactccaagctgaacgaatcttgtgtgttcagagtttagctgctgaagccataaatgatggtatgtttgtgttatcttcttccttatgcattacatttcttccattatttttggtctaaagtctttctggacaacataaagtgaactttttcattacacggaaacaaaaacttgcttggttcagctcaaatttgagacctgctgcattatattcttttaggttcatgtatttattctaatatgactttgctttttgacaggttcctctggttcaatgcaaatacattggtatattatgacaagtccattcactgatgaggccacacgcaaatttttcgaaagtcacaagttttttggtcttgaacctgatcaagtatgaagt

SEQ ID NO: 3427 - DNA, 1420 bp, Cannabis sativa
cattgtgtttcccatatactttacagtatttaattttatttctaatacattcttcaagtttatagttaaaacgcttgaaagtatggacaaagaagagcttaaatataacatgattgaatgttatatttaaatgatccctacaatgttaatttagaaattttgccagattaaaattgattgaatgccgcaaatttagtaaaataaattattgttgtctttaggtgagagaatctaacacattatatgaagcacgcaaaaaaagttaaaaaggtaaagaaaataaaaatttaacctacctctgatactacattacattttagagagaaatgctatttaagagtagaaatagatttctaacttaattgattagttaacataataattgaagtgccgataattttattatacaacataataataacatattattatcagatattaattatttttacttttaaattttatcaaccaacatgtttaaatataataaatacattcaattatgattaatacataaatatttatgataaagcccttgcaaaaaatatatatttatgacaaaataaatttttaaattaaagtttaaaatcactaataattgtaattgatcataaaaaaagagaaagatgtccattgagatggtgttaagatttatgccatgaaaagcctataaatatatttttgattattattaaagagttgaatattttgatatatgcataaatattaaattattaacatttattattgaataatttatatataaatatcagaaatttctaatttatatatgaggttgtgacttgtagctgtacagagaactaagactatttggttatgaataaaacagtcagtaacatattaaagttatggaatctttaatcaatgattgctagtacgattcactgatgcatgttttttggtgcaagtaatctcatatcggattatggatgtagtatgacaatgacatcaaagtgaaggtgttgtatataatagatattatatatgacaatgattgatatgaatgaagttgtctttatctaacatgtcgtttactataaagaccttattcatatcataacgatgatcaatagtagatcggcataaaccatgagtaatcataaactcttgttcatgttatttgttgaaataattccccatataagctgacctgtcacagttaggagttaaaacaagttagttaaaaccagttcagaacgtaactaacctaactgtgtacaatccaagatcaagaaaacagttagttaatcctaactaacttatccagctatgacaacaattataaatagaagcaaccaagctcataatacttacagcttcaggttacttctctaaaccagaaagagatgatgggagagatccagatccattgagagttcatcttgtgttcaaagaaaag

SEQ ID NO: 3428 - DNA, 1217 bp, Cannabis sativa
ttgcacttccttcctcaaatcccgcaagagctgccacaaaaaacgacgttgaccagcatcaggattaccatagaaaccagtaaaagaccaaggcggaaatccgcaccctgcaacagtagcaagtatatgtccaggagaactagacaaaacttgcacctgaatatcagctttccacattaacaacagtcccctactcaacccaattctatccacagtccacaaattctcatattgaagaacactacacacccgttcagcttgaacccgagttaacttactttcagctaagaaaattatactcggttgaagatcacgcacatgagattgtaatgctcttaatgtccagggattcccaattccctggacattccaacttaaaagtttcattgcgctcggcggccttgattaacaaggctcgccgcttcaaattcagtaaaagaagaaggcaaatccaaacaattagaaataccaacctcagaaatagactcacaacctctgatttcttcattcccaacaagagcatctacttcaggcattccatccgtgcttgtctctaatttctgcttctcggagagactacaatccacatttggaccaccctgcttagctttattccgagccttatttttaataaagactcttttcctaccttctttgccatgattcccgtccccaggtactgccttcccataacccatattaaatcggccagcttccaccatatccaccatcgtctctccttcgaccggagctgccccaccatccatagtaactccatttcgatcacacctcctctttctgccttccctttcctcctgggtatcaaattctaccctgcagtccttcccctcacgatatctcacccccttttcatttccaacagacaatttaggtaattgggtatccaacccagcacaaagtgcttccccacgtgaatggtttaaattacttgtgggtccaagtttttccagcccaaatgagctctgtccagcttcaaacataagtgggctttgaacaaagcccatctctttttgataatggcccacatcagagtccatggacactttcccttttaatttttgattatgagcatcctccataacttccatcccacgatctttcctatcacccacatcattctctaactgctccatcgtggactcgacccccttagccatgtctctctcaatcacccgagccaccgccgaccgacgact

SEQ ID NO: 3429 - DNA, 2173 bp, Cannabis sativa
aaaaaaaaaaaaaaactcaagtactctaagtgaagttattttctcataatttctaatgatactttcaaaccaaactacaattttagtggttgtaggcgaaaaaaaaaaagagatcaagtaaaaagctaaactaatcgacgaaataaaatgatctttatatgttttttttaaaaaaaatggccttatacaaatataactatataataggcacatcattttttagttatataaatataatcaaagtatggtgctttttcgtggttgcaaaagccaattgtaggagactttatatcttaattccaatcatatattacgtacaaaataaggcataatcttctacattaattcgtcagttatttcttttaataatttgttaatttttcacaggctggactgcacccattaaaaaatatacgcatgttttgataaataaattgaaacaaaatgaatgaaataataaattaattagttgtcttgtattggctcataatttcataagcaaaccagctgggcagctcctatattagtcgtaattaaacaaatgaactatagtaatgaaaaggtgttcttttgcttcaagagttgggaactagaggaacctatcttgcataagcaacaactttttttatttacttttctaactttgttaccttgttccaaattcaaataatcacaaaattgtcactttcctatgaaaattaacattgaccttctagtataatttctctacttcatactatattcatgttaagctcaattcacacgaaaagcaccatgtgaggtctctatccttccccatgattaataagtttagctcctttttgttaccttttttccttatagtttcattaacgtccttgcaaaaccattttttctgttcctttttaattcttagcccaaaaaaaaaaaaagagtaataagaacaagaaaaaccctttttaatatacttcatatttgaaagaatggtcaatcaaaaaaaattaataaataaataaaaaatttgaaagaatggaatatgtaagaagtcacaacaatgatttgtttataaatctacttttactagaaactacttattattttaaattaataataatctatctatatctaatatatttatataaaagaaaacacaattaaattaagtttttgtggcatcctatttttttcttttcttgtaaattttgtgaaattttagtattttgcctaaaaagtagtcatttaactttatacttacaaaatctcacattctttaaaagtggagctatttacaaaaaatatggaaaaataaatacaagttatgatatatatggcataaaaatttaagtgtataaaatgtggcatttatttcaaaaaaaaacttaaaatatgggaaaattattacatacaaagagaaatatcataaaaaaaactttaaaattgtatttttttaaaaaaataaaataaaatactggaataaaaaaatgatgtcaactgaacatttttttttatttttatttttttataaaaactgaaataatattaaaagtagtcatttaattttacttttacaaaatctcacattctttaaaagtgttgtatgtatagattataactaaaagttttatttgataattatactttgtctcgaaattagtatttttcatattacgtgatcgataaacttatctttacttgattagttataatttttaaaatttaaatattttttaatttacattataaaataagacatatatataaaaaaaaaacaagtgaatttatgtgacattgtatctttttttctttctatttttaaatttggtgagattttagtattttatctaaaacatgtcatttaagctatttcaacttatcaaattctatttttctactctttaagttgttccaacttatatgataagtgtcttttagctcccggcgacaacgtgtaaaaaattagaatcaattgttagataactttggtggggctcataaatatagtgatcaaaagaagatttcttgggtgaatatgtcagcgtaaggcaatgggtgggctagaatttggagattttcaattttttaatcaagttcttttggctaaacaagtgtggagattatttctgtactcaaatttcttgcctacttaaattttgagacataaatatttgccaaattgttctatcctagaagccac

SEQ ID NO: 3430 - DNA, 2352 bp, Cannabis sativa
acttaatcttctgaaactacagtgacttcaattgcataaagagttctccttccataacttaccctcttaaaattacactgactcaggccctataaattttcttgttatgatttcgtaggacaggcacaagtatagtgagcgtaagttacacctcggtgctctagttttctactagaaggaaaaactaactcataattttaacaagtaaacaataacaagcaattaacagcaaagaaaggagtaacggctttatgtacactatatacaagcactgtgtttacttttcttcttaacaaaatacatcatttttgttagatttttatatctactaagccttctattttttatttttttcttaaggatttactaataaatgatggctttataagaaatgcacactccactataacccaataaagcttcaagttatgttataagtaatataaaagtataattatacaaggagaatttttcttcttggggtattttagagaaagaggtaggaagttgaggattcaattattacttgttactccattcaatttgtttcataattcaaaaccacaccagacataaggtaaaatggagagcaaattgaaattgaatggttgttgaaactttagaactcaaaatcttaatgtttctcaaaagccaatgcgagccaaatgtttctctctagagcaataaacattactattggcattatcttgtctaattaatatttcaagcttccccctggtttctgaagttgaggagacagtcatttggtttctgtactaaagttttacctcaaaagattaccctcaaggttccattgatgccaaagaaaacatacatcaaatagccaaaaaacaagattcctaaaccagctcaagcttctttaaacaggatagtgtcaaaagcaacaaaaaggttgctactatcttcttccaaataaggagattaactgtattcataacccaatcgacacacaataagttacagtacctaaatcctgtgggtttctacaatcgtcagacgaatggttaaatagaaagaaaacaacaaggaatctcaaacctaactaaaagacttgctaatactcgaagtgaaacaaagtaaaaacaatcttatgatacatagaatatacgaagttcaattcaaaaatataatataaatccaaaatccaaatgaaaatttgatcttgaaaacgtgtcttttcaacgaataccgacaaatttggcaagtaggattgaaagaatcgaattagagccaaacatcaatatacagaatcacataatatatggaatttaatacgacatcaatcagcgaaagcaatcaatggcaaaagaggaggaataatttacttacattggcaggattcatggaaggtccagtgtaggaagatccagcaacaaccatagtcacggtagcaacagcgagcaaccacgtcttgaaaacagaatttcgagggcccttgagtattataagaaggacagcaaaagtaattaagaaagtcaaaactccctcagctatggctcctgtatgcaaatcaactttcaatgaaggccctccaagcatatgcttataattctccggcatcacctccttgatggccaaagctccagccacagcaccaaatgcctgtcaaaccaactcaggttatattaaactctctcccatgcaataactatcaacactattcatattagaaattcggaagtgtggaggagaaattaggatagagtgaagtgtatggtaagatgcatgaggttctatctcatcaatattaaatggctcaatcacaagtgatattttttgctcactattcccgaatcacaagtgatatgatgatacttctagttcactatctccgaatcacaaaggctcactatctccgaatcataagtgactcttttggctttattttttggacagacttttggattttgataggataattcagtcaaacattaaaatgaacaagaacatgaacactaacactcccattagcaatcttacatttaggtgcccaaaccataacaatgacatttttatgatattaatacataaaaaatgcattaaatccataattcaatcgtatgcattaaaaacaaaataatttacacaaattaagaattaagtgaaataaaaaatctatttttttatagatacacccataattcagtcgaatgataattatattaaaacaaaagattgagagtaatttttcacaaattaagaagatcaaatcataaattaaaaaaaaatcagattcgactaaaaatcataaaaaggatttagagattaatgacctgagcaggaaaacggagagccatggagaagagagtatcagaaccaacaccaacagcg

SEQ ID NO: 3431 - DNA, 1631 bp, Cannabis sativa
aaatcatttttttcagtgtgtaagtgtacaaagaatatctgtaccaacacatgctatgctctattttcatgtactatgtcacaacaaatgcacataacttcaaaaccataatctgcggttcatttcgatgttgtcatcatcgttctcaccattaccgtctgtattaacagcaggatatatcacattatcatcctcatcatcatcattatcattttcattttcattttcactatcaatatcagaggttacatccaacccatgagccaagttccaatcaggagggaaggttttttgcaggacctctgtaagctcacctccgcctctttcaatcttgcgtaagcacttggaccagtgaactgcagtccccatatcaacagtaagcccagattctatcatttctctacagattgaaagaattccagagtaaatgtaagattcagcaacggcagctcttgacaatagagatgtcatcaagcagtggtaaacagctcggtccggttgcaaccctgcttgcttcatctcatcaaagcatttcaaagctttctctggaagtgaagcacgtgcccaaccatgtatcaaggtagtgtaagttttaatgttcggtttcactccaaaggcttgcatttcttcgattgtttttgtagctctctgcaccacaacagaaaaggaaaaagaaaccataaactgaattgaagcaataacaataataatcaagaaaaggaaactagaagaaacataaagttttatttactttttaatccgaaaaaaagaacttcctaaagagcataccagcatatctccggctttgcaacaagcacttataaaagatgtgtaggtgtggatatcaggtcgaacgccttcctgggtcatttgttgcatcaggtcagcagcctcccaaacatcacctcttcgagcccatctacacagagaacaaacatacataataaggagctaatatttgcatttcaacagaaagaaagaaagataacctagcaaagagagagatatgtagatcatgactttgactgcagtacacataacactaagattattacaatccatacccgtcgattaaaatattgtacacaaaggtgttccttggaatcttctgattactcatttctttggttactgctaaagcactctgcatcctccctgccttgcaacatgcctttaacaatgcctcgtatataaacacatcaagctcaaagccctcatttcgtaatttagtaaagtacccaaaagctttcccagtgtcaccaagggcagcatagccattcattatcgttgtgtaagtatgttcatttggatttatgccagccagtgccatctcatctaatatttcaacagccttctccatctgcaagacatacaagtcacattggtttatctaagaagcataaagggaaagcagaaaaaagtgccatgccaaacataccagaggtcgcacacaagtaatttgacccttttcaaatagggttactgaaaaggtaaaatctaggacgttttgcatctaaagatctaccaagtataaaccgatcaaacttatcctataaacatggctatgtcatttgactagagaaagttgttatattttcgctttcttatgcgggtacaagtgagagggaaaa

SEQ ID NO: 3432 - DNA, 1337 bp, Cannabis sativa
agatggtggcagcgcttttgtaacactaggtggcattgatggttcgagccccttgatttgggatgctggggtagagggaagaggcggcagtgcaacttcaggatgtgaaggtgattctgaattatcataccgagaaattaatcagatgagcccatcttgaattagaatttcagtctaaaaagatcataatagttaccaatgggctgcgattctgaacttggtgcattgtcttttgatgtgccatgaggcacaggacctaatgttcttaccccagaatagattgcaggtgatggggatatagtaattcctgaaagaaaaagaaagctcatcaaaccaaagatatgagaagaagagaaaaaaaaatcacagaaatgcattagtatcattcttctgaaaccaattcaaacaaacaataaactcaatactgatccaaagacagaaatttactcagcttaataataaattcaatcaagataaagccaggtctagaaaatggaatgatagattcatatttaccgttcttgagctaataagtgtgctccgacagtaggcttatgaaataatcttaactatttattggttcggacagtacagtaaagctatatgttttagttgtaaaagctaagtcatgcaaatttgggtaaacccattcattctaagatagcaatatgtacagatcgaaaaagattccaaggtaacagcatcaatggcagatgtaaaaacattccagattagtgctcaatagatagatagtactaaaaacacgaaaatccaaagatacagatcacaatgttgctaaatctcaaaactttctcaaattcatagaaatttgacaaaaaagtgatcaacatttgaaaaaccaaaattaactcaagagtcaaaccaagaaatgaacatatttagattaaggaaagagagagtttacctgtggatccttgtagaagcagagaaaagcaaatgaagctgagaataaccagctggagcatgggtggcattaccattctcatcccatacagcgccaaatctcacaaacagtctctaacttttctcacacaaggcgttcctcgatgaagaagaaattaaaatagaaaggcaataaagaaatgaataaattaatattggaggggaaagcttataacttgaagcaataacaaaagggacgttagattgaacaagggccacaaatagtgagagctaagtaatgagtaggcagtttaacaaaaaacccagaactgggtttggtgagagaacccaaaaccactaaaacaatctgtgtctgatgataactcaagctctgagatatgcagaggagccatgaaatcatcgtccccatgaag

SEQ ID NO: 3433 - DNA, 2720 bp, Cannabis sativa
  modified_base (1644)..(1650): a, c, t, g, unknown or other
tgtaataactgtgacttttattttatgtatgaataaaagttaatgttaattagaataataaattattattatttatagagtttttttaagtcttatattagattttttttttttttggtagtaagaatatcattaatactttgtaaggataagattcataagttcatatagtaaaatgttgatttataaaaataaaaacatgaataaagggaattaagattgaaaacttacaaataaaaatgtattaagatatggaataaacaaataagttttgaaaaagttgtttcttaagacgtacaagatttctgtgttcaaatgtttttatcaatattactaattacataaattacaatgtaatggagtttattattacgggagactattagttgggtcaagaagaacagcaacaagttgagatatatatcaaaagggacaatacgtttttagttcacttcatccatgtataattttagtttacatttaataagacaatcaacaaactgaataacttactatgttgattgatacacatttaatagtttacatttgaacataatatttgctaaattttaataaatttggaattttttattttaaaaaaaaatgctaccatcgttctcttttattatttccctattcgtagtatcttcaccttggttgattactatttcaatcatatattcattattgaacattgtatcattaaaaatattttaaggtaatgattaataacgtaaaatgtaacattttaattaacaattaattttctacacataaaataatatgtcaattataattaaaagagtgcgtaaccttccttacttaagaaaattgctaaataataatagaacacaacttataaaaaatattaaataatatgagtactcaatatcaatattcatatatattataaaaaaaatttacaatatctaaaataattttttaattaaatattttctcgtacattataattatttaatacattctgtaaaattttaaaaaattcaaataaatttattacgttaaaaaaagaattgaaaaaataagttagtgactattttattttatacgtgtataaaataaattatttaatattactttttatatcataaattattttaaaatttttaaagttttataaaatatgttaaataactatacgtaaacaaatataaaaaaaaaaaatagattaatttttttttaaaatgctgaaataaataaaagtggtatactctttttaaagaaattcattgtataatcattctatattatatatttagagggggttaaatttggataatattttagtttacgtgacagatggggtacgtcgagaaaggaagacgtggcatgcatgcaaaaatcataacaccaagtgtgataataagagtatttaagtgggatacgacaaaatatgaagaactgaactacactcttctctacctactttattaattaagtgtatttcttttcttttgataattaaaacagaccattattattgacattggtgtcaagcaacatagaatagaagtcacacggggtaaccaacattaattggtgcccaatagtgcctagcacttttaagacgtgtcgtcttgcaattagctaacgactctctttaaaagctattatattaaattnnnnnnnactcaatacttaattaaaccaataacgatattaacacataagagagtacttgacacttgcgccttttaacatttctctatctttaatatcatcttgggcacacagggtgtcttactaaattctcattcataaattgttatatttaataaaaagaaatcacaaataaaacactaaccaaacaaacaataaaaacctaatccaataaatagtgattcctcccacgactggacaataaatcaaactaccctatacatatatatgtatatactctcatatgcttcatttacaataataattaatggtctagcacgtactgttctgtttgtcttaattttctatctgtcaaatggaaaatccgaatcattttcagtcactttaaatggcttagggtgctgacctgagcaatacagattccacatcttgaaatacgctctctccaaatttctcacctgatcagttttaccaatatataatataatatatatatagtcataataataataacgataagcagaaactaaacaaaacgaaaccataatcatatgatcaatagtatggcaaaactcacccagcgttgtgtgtcgaatagaggacaagtcatgcgagccgctttgagtttattggtaaggtcctgaagttttcgacgatttagagcaagcgatactgctctctcttcgtattctttcaaactttccaatgtaagaacacgaaaaccagtcagaacagagaaattgaagaaacaaaagccgagaactaagtgtgatagagcttattttaactagattataaatttgttttaaagttaaatcacctgttaactatcatatcctctcctacaccagtggctagacagagtgaaccggctactcgggtagccattttctcaagcgggagggttaccattggaagaccagcccatagaacatcagtgcctgttgtgtgtgcattgcataatggcctactcaaaacagaagccacaataaagttacaataatgtaagggtaaaaaggaaacattagacttgtcaatgtagaaacgagtacttgcaagcattcttacgtgtccaaaaa

SEQ ID NO: 3434 - DNA, 1080 bp, Cannabis sativa
aggtttaaagatcccagctttcccacgagtaatcatgggatgagttgcttgaattggtgcacgggtagtagcaggaggagaagtaggacctgaagaaatagatggagactgtgtttctatgatgtcagcagcagggtaatttatgggagaaccagtaaaagggatagtggaacttacagacccgtgtgaagcacctggagaagttggcactgcaggtacacgttgggatggtctcaaggcagcagccgaagttggtgtggatgttgatgtacttgctggtgtgagaggaatatgtgtgtctgaagtagcagtagccgtgggtaaattaaaccaagagtgtggggcattgacagtaacaaactgttcctgttgatagttgtttaggaatcctttagcaaagggaaattcatcttcattaaacacaacatgcctagtaatgtagatccgtccatgagggcttaaacacttatagcccttatgaacttcactataccccaaatttacacacttgattgaatgaaaggcaaatttatgactttggtatggtcggatacatgggaaacatgatgtaccaaaaaccttaagaaacttatagtcgggaacctttgaaaacagaacttcaaaaggtgatttccctttaaggataggagttggtaaccggttaattaagtacactgctgtttgaaaagcgtccgaccaatactttagtggcatggatgcttgagcaaggagcgtaagtcccgtttcaacaatgtgacgatgcttacgctccgctctaccattttgttcagaggtatgaggacaagagtggtgaaagaaaatgccatgttcttgaactaactgagtgaacgattgaaattcaccaccccaatccgttctcaattgtttgattttcctttcgaactggttttcaaccagatttttaaactgaacaaatgcagccaatgcatcggacttttgcttaagtggaaaaagccaagtgtaatggctgtggtcatctaagaagtgtatataatatctgaaattagtgtgtgaagcagtaggggcagcaccccacaagtcagtatgaattaaatctaa

SEQ ID NO: 3435 - DNA, 971 bp, Cannabis sativa
aagtccattgactatttttccggctatgaactttatccatagatacccaaataagcttaaacttccccatttcaaaagttctgagtgtttaacttcaaacaagtataagaccccattatctaaaaaacaatccaacacatggaaatgcaaacaatccagattcaaacgaaaaataacaaaaatcgaacccaaacgtaaacgtaataacaaaatgatcacttactcgaaaacagggccgttgtaagtggaaggaactgtcatagaaactgaagcaaaattctcgtccttgggtctcatggaaacagagtgaatccccaaagcatcgggatacaacccacaaagaaaatgcagagaatccgactgtccgggcttcgaaatatcgacgtgaataaacaattgattgatatcttcatcgtcaacgtcaccatcatcgtctttatcggcacgggggataatgttggccattctcattacagatatactgatctcctcttcaccgtagcttttcctcaggaccggaccgttcccgtccaacgctcccttcaggatcgtgaacgaggatggaggattcactttctgaaaaaaaataaataaataaattaaagaagcacacccattcaattcaacacagatacaagatcttcagataaatcagctgaaaatacacacatatttattgagagagagagagagagatgcggatacggacagggggagggctcattttggagacttcgtgatagtgttctttgagagaacggagaatcatggagttgacagcggaggagacgctggttgagctcctagttggtagcatcctccatgggtggttctggattacggagctaatcaccttcttccacattttcacttcctttctcttaaaccctttttttttctctatttcagggtttaggaattataagagaagacggaggggaagaaaggaggatgcgctgaacgggtcgggt

SEQ ID NO: 3436 - DNA, 1211 bp, Cannabis sativa
tttaggttttgaatatggtgtagttaactacacatgtttttgatgaaacacatgttttatcctcaaagtgactatgagagaaatggtcatctactattcctctcgtttgtggtgtctgtcttcacttcgtgtctttaccgtgtgtgtttttctcttctctcttggttttcccctacattcttgactagttttgtgtgcatgtgagctgacccttgtgtgtagtgtgacttgttggtctttgtgagtttctttttctctttgtctgggtgtgtctagtgggggcttgtgagtgtctttttcttctctgtttgttggtgctctgagtgttttctgtttgtggttgtgtgagtgctgagtgtgtcgtgtgctgtgtgttcgtgtttcttagtgtcgtgggtgcttgtccccttctgtcttggggagttggtaagatttggtaggtgtgtttcttaaagtcttggaagttcttttgttctctttgttgggtattaatggagtcaatcattgctaccaactcctctcttaaaggcaaatgtttttcttgccttgaaacctctgtcaatcttgtccctagtgataactctctcaaagctttatcttcttgctgcttacttgggaaagttattgctcccatggtggtggaggagaccaatgtgactgattttgtggctaaaacgtggaaaatcccagtttcggtggctgctgttgtggatgatattaagtgttctaatgtattcaaatttggttttcaaaatgctgagcataggaactgggctattgagaatggcccatggtgcgtgcgtggttactcattggtgctccaagcttggactccaacctttgaagggccgattgagttcatctctctgcgtacatggattcaaatccacaatctgccccacgagtattattcaatggcgaatggcaatctgttaggtgggttagctggaagagtggtgaaagttgaaataaatgaagaaaatcctgcaacctggggtaagttttttaaggttctggtggatgttgaagtagagaaacctttgttctctggttgtttcttcgatgtagcatctggggtcaagaagtggatccaagttaaatatgaaaaaataggtattttttgctacttttgtgggtgtcttggccatcaacgaagaggctgcaatctgtcttcgccggtgacagtttcaaatagcgacggaatacctttt

SEQ ID NO: 3437 - DNA, 1119 bp, Cannabis sativa
  modified_base (999)..(1002): a, c, t, g, unknown or other
aaaaaaaaaaaaaaaaaacgaatcctacctattcttttaatatcaatgaataaataaaataaaaactagtaaaaataattcttccctttgatattcgatacgtcctagtaattaaaatttgactttaataactaatattcatattagaaaggatttttggtatatttggccatgccgcctgaatcagaagctgattcttaagatagagaaatatataatatgatatttaaagtatatgggctaatattcttaatatatatgttgtttgtctagtaaatgaccttcattgtctttatactttctttttgaaaaaaataaataatgaaaacaaaagcaatcatccatttttttataattagatgttaaaattattatgaatatgtttcaattagtttttttcttcaactttttctaaacatataacttgataatgccttgtgaactaaggttcccctatattttatttaataaaatttcttttagaaaaaaaagaactattttcatccttttttgtacagatagttatccaatatattaaaataattctaaaataatataattatttatagagagctctctatatttatagctaacattccaatttaatttgaaagtagctaatggagcataattttaatatgtcccaatattattataggttatttgagattttttggtataagattattgtataaaatttatagaaatgtatatggttataatattagactaaatgactattatttagtgcactttctcaataataattataataatttgagagttatttgtaattgtaatttgtaaggttgtaaatcgagctgaactttttaataccataccacaataaaaagatataaacatgaattgataccgaaaaaaatataaattcaaacacaatacgactaataaatttgatgacattgatatgtaaatatagacatactaaccgaaaacactatgttaaaaagctcgataataataataatattaataatnnnnataataataataataatctcatattgtttgaggaattgaataaatgctatgcttattgtgattcaataataatagtaataatgataataaagtcaatataataatttatttatatct

SEQ ID NO: 3438 - DNA, 1250 bp, Cannabis sativa
agttgatgattctaagtggttcatgaaggatcattgtacaagaataaaggtatgtgtactgttacatttaaagctctaaatagaatgtgacactattaaaaaatgggtttaatttggtttacttataatgcctaagctgactcacgaacacaaattgctacctctattcataatcaattaaaccctaattttaaataatattatcatataacattgatagagtactatgccatgctttgtttgtttttgtgtctatttctaaaatatgttatattattatatggtcatgagattttcttgtttggttactttatagctagttgtaggggattattcatcataacctttaatactttgtctgtatgccttacaaaattattagaggggaacaagtttgatttgatttgaccttagtataatctcttttgatatcaattctgtttctaccctataaatatatctatatatatttttgtgatggggtagtagagtgtaggaccttcaataattatagatatataaatgagtatatacatatatatatacacctgctacgtgttaattaaaaataatagagtttcactaaaaatattaatacatagatatattaatggtaggtttattaatttgttatacacatgtgtacaaagaagtagttaattataaccttttaacttctcttatttcatctcaacaatatccaaatgttagaattggcataatttattaattttttgccaactaccacatagatcataattattatatataataaaaatttaatttttattttgttaattttttattttgttaaattttttacatcaatgtgtcagcggtagctagtaactatttgggtgtgttagtgtagatagttgtcaacaattttcgttttttcagatcagctcatatcggtgaaacaccttactgctttcttgctttagagatttcagtaagcttgggctatggctttgtaattgtggggagtgactcagaaactatcatcgcggactgttaccacagtaagagattaatagttatattagtaattgtatttttactgctaaacttttattggactataatttttattaagatttctcgattatgtaattttgagacctataattgtataatatagtgaagtgggcatatgccaataacttatctcgcgtgattgatgtatcgtcaataccaaaaaatattttgtgtaatgaccatcaagtctaaccaaaactcttttttttttt

SEQ ID NO: 3439 - DNA, 2057 bp, Cannabis sativa
aatttatatacatatatgggcttctacagtgtcttctctaaaaaatataagtttatatatccatccaattcggccccttcatgccttagaatttctgcccaaaccattataaactttaaatggtgccctcaaatttttcatgctattaaatattgttcgcaccatctgaactgctggtaccaaattttgcaccatagctaaccaatgaataactctatgtttgggagtcactacaaatttttttacttttagtcaaaataaaatttgtgactaaaagtaaaaaaattgcgactaattattaattatcattcttacgtcgttactaaaaagtccgtgactaaaaatattaatcacaaaaatctctatttattgtgaccaaatgtatttttggtcacaacagttgttgtgattaaaattaaattagcgacaacttatatctaaacattatgttttagtcacaaataatattttgttatagttataagttacatttaatcacaaaaagagtatgtttgactaaaaaattgtcactaaaattgactctttttgcagtgagtactagctctatcccatagcatatagaaaaattctacctgccatttgacggattctacaatttatggcaaaagggaagaaacaaagaaaactgaaagttttgaaactcacttagagaaaacatgtacaactttgattttgctttttgttggcactatgcttcgaataccaactagcatgtagtggggtttcatagttccacaatgtgacctgaattagttattacaactatcaaaatgtgaccctaaattttagacaagggaacacaattcaattgttgtaataatagcttgagggaaattaatttgtaataatgtaaaacttatttgagtagaataatttaaaaggccggggtaattaattattaaaagaaaagtattataatgacatgttataattattattttattaatttataatttaactttttagataaatataagtgttgccacatcattatatttatagacttacctgatcaattttctcttgtgtgcgattagatggatgttatatagatataaagtttaccatcatgctcatacatgtcatgcacatgaagcagtccactttcaagatccataataatattcgatcgaggatatatatttagcacttgcattaatcaatggttcgaaccaaatgaagctgtcttgtatatatatatatatatatattgatctgcaggtacaaaagtacagctttttcttatatgcacaatatgacctaaatggataaacctatactagctaagtatatactcgtataaagtacttcgtagtcaaatattctatagtactatatatgcaaattattacgacagggcatggtgatgatcatatatatattattattcatgatcctcattaaaacaagtggccaatccacttagctagccacttgttatgtatacatataatacctgtatatataggtttatcgtggcgactcctgttcagatacaaccaagttgtttgccttgtcatcccaaatccccaagtttcaagtcatgaagctatacccaaagaaattataatcgagagatccatatggaaaattaaattaaagtacatactttttacattttatccagatcatattggaattttgttatatatattcgtgatttcaatgttgtaatgaactttcacatcgtaacaggaaacatcaccattattactgttattattataaccatatattgatccatatatgagcacatgaaaatgaccaaatagttttcttttgagtgatccaataacaaaaccatgcaacccaaattgtctagtgccataatattattctgttgtaaagtctctctctttcttttgatgcatgtcatatgatctttccctctccaaatattaattttcttctataatattgatcatcattgacttatttgttttcccatatattgtacgtgactgtgtcagcatttcactcaagaaacttcttaccaagtgctccttcttctccaacaccaatttataacagtacta

SEQ ID NO: 3440 - DNA, 1549 bp, Cannabis sativa
ccccagccctgagttttatcggcagccataacggagaacgaaattaagcagagaatggattcactcacccgaaaccctaaggcagcactcttcaacatatcctccttcttcgacctcctccccgtagaaggcgctaaatttgttcgcctaccaccgccgcttccattttcgcctccactggctccggtgacgggtcctaccttggcaaccgactgagtaggctcttccctcatcgctctattgatcaccgtcgtcggctgcacggtcgcattcggctgaggtttcttaagtgggtgattgatcacctgttgatgattatcagtagtggtagactgtcgcagcgagtggtgattatcctgatagtgattgaccttttcgacagggacgatggctttggagttatccggtagatttcccggagagtaatccggagactcgtagggcggactttcaggtggatcaccggcatccgatcgaagaggggagtggaatcggagaggcgagtggggcgagtccaattgagacgtgtcagagtttcttgatgaagatttcttcatggctcgtctggtttgctgggagtgattggtttgagtttgtgactccattgatttgatttgatttgattttctcgaactttaatggaaaagaaaaagaggcgctgtttgggaaccgggaaaaaagaagaaaagaaaaagaggaagttccatgagtccttctttcacttggtggggaccactgcactacatgatgacgtggcactgattagtttttataactaaacctattttttattgccaactcactaaaatacttgacgtttagtccaattggtgtcgtggcagaattttattggtttatgggtgagaagatagaactactaactctataaaatccgagtaaagtatattgtgagattctttttctacttacaagttacaaatgaaaaaacaagagattcgagttttaattgtttattaaatttaaatcccaacctaaccaatttataacaaacaaggaataattgatcaaattatgaggcatctaatatttttgagtgatgagatagagtcttcttttataaattgtacgtagctatacaaatacaaattacattgttttacaatccaacatggtgtaataaaaatacaaattacagttagtagttatatattttttaacttatttgttttcaattttaaaaatgaaagagtccattgtaatatgtatctgtagatatgtaggattatatcatggcttaagtgtttaccatttgttttgtcaaataataggaatgagaaacaaataaattgatacctagagtttaaatttggttaaataattttttaataaattaatacttgagcttaatttttcaacaataacttcctatctagactaaacatcaatttaacaattgtcatcttgaaaaattatttgaccaatattaaattaagatatcaatttaatttatttacaaaatacatggtctaaattattattaaaaaaaatactagaatgagttatagtgactacacgacacatgcacggt

SEQ ID NO: 3441 - DNA, 1160 bp, Cannabis sativa
ctagagaatatgcttgagacctacaggccaggtgcaattttccccccgtcgtaactcctcatggcttgggaacattttggagtaaaaccaatgcctctgggcttagtgtgattcacttcaagtgtcaaagctattagcacaattaaggaattcattcctattcaagaaattgttttttgattgagattcttccacctcgagactaagagccatgtctttaggcttcgtgcaaataactctaatgccctaacgctcgatgtgcttaaacactggtgaatgagacaaatgtcctctaggctctatccaactgcttttttgagagtcaccacaacagtcacacatgcccaaagcaaagaaaataagtcttaagtcgttattgacgaaaggttaaataaagacttccagggtgaatattgtcctaatttttgtcaaacaatgacaaatgattgtccacccattagctgacacaactgccaataaagttgaagtggtatggcgagaagctttcccgataaagttgaggagacaagataagataacctcatgtgcctataattactgctttatttatgtctatcaatgtgtttcctcaaatcaagtgaaacattttagaggaataaaagaaatataacccatgactgatataaataggaccatggaatcacatgtaaagagttctaggctttctctctcgttggtattaagcgaaaattctagagagagaactttatcgtctccatctcaatacaagtgattcgtggactaaggctcattaacgcccaaccacgtaagaattgtggtttcctgcaacgacaatgacaatgataataacaatgacaacaggaacgaaaattttattaagtttcgaaaataatttataagataaaaaataatttctcatatgccataaaatgagttacagcaacagcagcaacaacaacaaccattgacaacgaaaatgaaaatgatagtgataatagcgacagcgacaatagtagcagcaacaactataacaacaatagcaacaacaacaacaacaacaaatattctaattttctatggtaacttttatatactttattataactcaatagttttttaagataaattgttactctaaaaataatataaatatatgttaaataaaaaataatataata

SEQ ID NO: 3442 - DNA, 1630 bp, Cannabis sativa
tttttttttttaatttaataattactcaaataaggttttacactgtccaaaatacttcaggagaaattagccttttgttttcatttctcgtgttttagatacaatatcctttttgtggttttgacacatttgcaatacgacacaggcagtcatcaacagctatttgatgattatcttttgaagataaacaaggcactctcttatgcccagcttgagttgcgggcttgcagacatcaatatgatggtgaaatttactatggagtaatcaataatgtctctgatgaacagtccaagttaggaacaagatattcacatcctcagattgctttctacaaagctattgtgagtatctctatgctatttccttactttgtaccccaacctgttttgttctggggatatttttcttgttagaaaacgtaagagtaagaccataattataaactttattgtgtgaaaaacttatttctccagagtccagagcaatgttatgatagtatccatgacatcccttggctcctgacattttttttaataaatatagggtgctggaaccaatgtttgaaaagtccaattcgcgatttgtggtgtgtttgcttaagaaaagcgatgcataagcctcaacacgtacataaaatattaggataatagaaaatcattattgaaaccagtctaacttttactggaaggaatacaactgtgcccctatattagcaagaatttgaagttgtcatcttactataacttaggcgtaaaattcgtaaagtggttcctgttgtatgatattgatttggtttccggctgtgattgccggttacatgaggatgaccaccttatgaatgaaagattaggatttaactaaggtagaattgatgaattgattatgttgggttgatagaaagtactgtaaatcaagatttccacgggtaatcttctcccaagattctctccagttctgcaagaattgctcacttgtgaagttgtgagtcatcaacatgtctatggtcgttacaagatatattatagtcatccaaaattgtacacagtacacaaaacccactgtcatttggacaacatctgaaggataatgcaatttatatgctcttcattaagcagtcttactagtaatcagtgtgatttatcaattcaactctctaatatttttatagcagcatgaatgataatttcatcccagtattctttaacttagaaccaaagcattgaagcaaaaatactatcccaggttatgcaagagcaaataatggttgtacaattgaattttgctattgtcttccttaatcatcttagtctccaggcatcctcatttctgctaggaaattttttataattttttttgtacatgtaaagtttttttttttttttttttctaaaaaaaaatgaaatataaattatattatatactatccttatgatcaatctttgaatacttatgtattttcttcttgtggaatatcagatagaggcaattgttcaaaatggtccagttgacggtagcatatccaacattgaagctcttaatttgcgattggagactcaggtttgcttgctggtggcttctttatttatttattttggtttgctgtgtaaatgctctccttgttgcattaat

SEQ ID NO: 3443 - DNA, 1216 bp, Cannabis sativa
gtggccttcagctgctaaaatttgaaagaatagaaaaatcataaactttattgagaaaagattgcaatttgcatacatgaatccctcaaaattatgaaaaacaatcctgtctgcatcaacgtggtgcctgcctaattctaggctcaacctttttttatataagataatgagcatacatgaagagttaaaactcattcttgaggttagattagaaaaaatgcataccttcttcatgcaaaccgtcaccttcaggagcagcatggccactgggagcagatgcctccactgtggacgcaggttttgcagagccaacagaatgttgttcagtgtttgtggtaatagctcttgcagcacggttaggaagatggacagaagttggttttgtattactcttcattaccttcaactaaaatgtttaagagacagttagaaacggagagaagtagaaaacataaggtaactcaaaagggaaataacatagattagcattgactcacaatggaagcatatgattgcttaggagcatcctctagggcttccggggttgaatcaacacctgaaaagctttgattctcaatgggattaggaggaggttgctgaatctcttcttcaatcacaagtccaccttcactatctgaaggatcacaaacttcaggaccattattgacatcctcctccaatggaattgcacgttccaccaccacaagattatcaggttcatgcgtaggctctgaaatgaagagcagccaatttcaaattaacgagaaattcaaaaacaaggctatagcaagcagtaaatcatatatcaaggaataaaaatgtcaacctggttctgctgccactgcacattcctgagcactttcatcgacaccattaactgggatagagatgacttgtggcacttcattctcctcaacaaacctaaatacatcgtttaagacatagtatcctttgtcttgaggagcaagaaagaacgtttgtgtaaatctctttctgacattatcctttccagtaagacatccagtcactagaacaatcactcctttctcatgcgactcctgagcatctgcagttttaatttccactgtgtaatcctcatatttcaaggacagaattgtctcatttattgactgcccaaccaaataagaaaacaattacaccgttagtagatgaatagtcaaaatagacacctgacctaataattaatggaggaaca

SEQ ID NO: 3444 - DNA, 547 bp, Cannabis sativa
aaattaccaaataacaagttctgcacacacttattaataactttagtaatatacttattatataatataataatacaattacatgattgagcatggttcgggagtttgttgttgatagaagaccaagtaacagtccttgtcatcacacggtggtgcagttggtggccttccccaatggcactggctccaacaaccatcgtgttgatgacatggttgacatggttggccgtgccagcatggcccaccaagtcgaccttctaagcactccttacaacaccgtctacgaaactggccacctgggaagccagaccttagaaataggaactgggcctggtttttctttttgatcaattttgcccatattattgtttggattatttttattattattggtgttaggcggaactacaatatcgggtactttgactttgatgatctcaatgctaataagagagtctccagccttgcagatgattttttgctttattttttctggacaacagcataccactttgatagtcaccctgttttgtttctcatcatacat

SEQ ID NO: 3445 - DNA, 752 bp, Cannabis sativa
gaaaaagatgtaaacaagagaacaatatcaaaaagtgttgatttttcctcctgaatccattttcagggaaaagaaattattacaaaccagagaggatttaacaaaataaatcgacaacttcactgttaaagaagaaaataaagaaaacccagatacatataccttccagagataacctgaaacgaggaaaaaacagctgagattctgaaatgaaaaaatcaatgttgctccagtcagaagtaagccataaggagaaaggaataaatttggagaaaaataaaactaaaaatatatattatatgaaagcggcgtgcgtttgttgggttcgaagagccaaaatggaaggaaggagtatcactcaagttgtgtatggtgggtgatatttgcagtaggaaaagtgacaacaataaaggaaaggttatgcgtttttgtcggagtgatgaggtgagatttggtttggttcggagtctcagatatttgttatttgtgaaatgagaaactggtgttgttttgttttgtagcatagagcctcgaagaagaagaagtaaggagagaacgtgaattcgagtgccgctttcacgggagatatactgactgacacccggacccacccgcctttcgaaaatgaaaccaccacacattgttttttttttttttttgagataccaaatacattatattaattttacatctaatatgtttcagagataccaatagtgtccattttaccttttcaacaaaaaaaaaaaaaa

SEQ ID NO: 3446 - DNA, 732 bp, Cannabis sativa
gaccctggcctagactcaaactcggtgccggagtccgacccactttctctaacctcactagtgctcaattaaataaaaaagaatcctttggtggagggcactgctcccacagatttatttgctgaggctttcatttcaaaaaaactaatgggaattacagaactaaaaaagaatgccatcctatcctaggacaaggcaaactccactgtcctttttcaaaaaaaaaaatattacacatgcaattaaccagtaaatattcagaggaaacaaaattaaataacgtgacaaacaatgtatacaacagatttaaacaatgacatcaatggatgggttaggttgattaaaaaataaaagcatgttataccaaatctactgactggaaattggaaagaagaaaatggaaggaaatctcataacaaggttggatatttggcgtcaaggaattctctaagcgtccgagcagctttttgaccacccattagttcagctaatctctctaccggaaggagtgcaagttccgacaagctcttgcaaccatccataatggccctgtagtttgaatcattcacacctggtagccgtctcaaaaactctaccgccgatgtgttgaaattttcagctctgtaatataataaccaaattgtaaaacattaaacttggcatctttatcttatctttaaatgtaaacgaataacaagaacaaatatcatgtcttaggttgaaggcttttgc

SEQ ID NO: 3447 - DNA, 1523 bp, Cannabis sativa
aatcttccattcccaaccttaaacactacaactactactacaacatctcaaccaaataaattattagatcatcattatcaaggaccttatcaaagcagcctaagcctctcgaattcgtctgagttcgattcgtcttcttcggaagatgattttagcaacgagaagagaaagagaagtggtagtggtggaagcagccggtggaaagtgaagataaaagagttcattgactctcaaatgaggaagctaatggagaagcaagagacttggttggagaaactgatgagaaccctcgaacaaaaggagaaagagaggagtttaagggaagaggaatggaggaaacaagaatcggctcgaatcaataaagaacacaagttttgggccaaagagagagcttggattgaagctagggatgctgctttaatggatgctttgcataagttaactggaaaagaagtacattacaacctttcttcctcttcgcccgatcaggaagaggaggaaggtttaatgttagcagctacagctgtaacagctacagctgctgatcgggaagaagatgagagggtaacaccaaaccgcgacgagagtacttggccggaatctgaggtttctagactgattcagttccggacaagcatggattcgagattcgaacaaggtggttttcctgaggaggttttgtgggaggacatagctgctaaattggcttgtttgggttatgaaaggagtggtttgatgtgcaaagacaagtgggaaagtatcaaccattatgtgaaggtatctaataataataataatgagttgagtaagaagagaaaagataattcaagaagcagtagtattggtaattacttatttcataataatactactactactaatgaaaactcatcagctaatgataatattaataataataataataactataatcatggaggaggaggaggagtttattcatgtgatcaaatgagtagtcatggtcaaactacggctggggcgagatcactacaacaagtcaacgatggttcttctccttctaataatgctaataatgttcatgataattgctttcctttcttgatgggagaaggagatcatcacttgtgggaaaattatggactcaagctcagtaaaggaggccaaaaccagtgatctcgatctcatatcatcatcatgtcattaaggagcaaagtatcattgtagtttttggtcaactggctgattagctatgggtaatggccatgtcttattcttcttcttttttcttttttttttttattgttgacttcttattatgagatataaaagtttgacaactcaattgccccttttgtttggaatatgggaggttttgggttttagaatttgtaagaaattaattaaggagctaactcatgattatgagatttatgtatagggacttttgagaatttatcttgggatatggacattctgatatatgatcatcaagaaaataatggatattttattatattgcctgctatattgctattaagtac

SEQ ID NO: 3448 - DNA, 2329 bp, Cannabis sativa
ttagtacaaatggagtccttaactccttataaactcctttcgtgttgtccattgcagcaatgatgtttacgattttgatacaggagcagataagaacaaaaaagagtcagttgtgaacctggttggcaggtaaatttcatcatcctctattttgtttgcttaagaccatttctctttatgtatcttttatgttgttcaattggaaactttgattattttttcttaaatatacaattatttattggccaattgtgtgattaaatgtgtttggttagccgtacaggaacccttgtagctgcctactttttactttctctgggcttcattttgctaacctggatatccattcaggcaggaagtaaacgtgcaatactattactcacatccgcaatcacatgtggctatatatatcaggtgaatactaagatgattctaaaaaatctttacaaattagtctgtattttcagttttcagctctaccacaacatgcttcttaagataatgtgttgcaaaacttaatctatctaataatatcatcaatcacagaaatctgttgatcctcgtgaattgttgaatatttatgagaacaaaagttcatgcaaatttctcttgaaatcattttggtcagccatgaatgtctcgaaacactttctcatgtgttgatactaattctagaacttcagtgccaaaacgtctcatgctttgttactttcttgcattacctttgggaaggtgatcagaacaggtttatatttataacaccaagtagataactttgtgggcgctcacattctcagttatattgattagataaacttgcttggtggtatgtaatccattcattccttgcagtgtccaccgttccgattaagttatcaaggactgggagagcctttgtgttttgcagcgttcgggccattcgctacttcagccttttacttgcttcagggccctacaaggttgtatcacttgagcaaccttagtatattcctagtgttggatttcaatttctttgcatttgttataattggtttgtttctatttcggcagtgatattagtcatccattgattctatcattatcattccttgttgggatcacaacaacattaatcctcttttgtagtcattttcatcaggtagtgttaaaattactttcataataattcttccgattttaatcctttcttgtgatgtgtgtgagctaacactaattagtttctacaaactcagattgaaggagacaaggctgttgggaagatgtctcccctggtgaattcatcactttgctaaacttccaacccaaaaaaagaacattcttagttgagctttagttattaccaactgacataaatgtttcattttctctctctctaaatgtgcaggttagaattggaaccgaaagaggtgcaaagatagtcaaactggcaaccatcgcgctttatgttcttccacttgctcttgccctgtgtagagttcttccttttacatgcattgtaagtaataaagtcatggtcatatatttttgtttattgtctcttcaaaccatttctgaattcttatctttgttttttctagctcctctgtgccctgaccttacccttagcaaaaatagtggttagctatgttgaagaaaaccacaaggtgagtgagtatttttaatactgaagtaatttatttttcttttatctttttatccaatggaaaacatacccatgttctctctttggcatgttaatatgttagattatctttacatgaaaacagctaagtggtacattgatgctatttgactaattaaattagcttagaagctctcaaaactctattttaaaatgaatttttaacacactgtaactgttgcacttggtggtttacaatcctgtgacatgtattagcacacctttttcgtaaaggatattgaatctaaaacgacctgattttgtatccaaaacccttttgactttgctaattgaaaattcacttggcaggacaatgagaagattttcatggcaaagtactactgcgtgagacttcatgcgctatttggggctgcattggctgctggacttgtattggctagaaaggttcctaaaagatgtatcccatcaatattatcagcataaataaaagttttaagggtaaacattttgtcttcttacaattgatttgcatatataataaaatcttaatttgtacaaccaacgtgcatagttgaaagggtatttgatctataccacttctactacctgttttggtatgatcctgaaactggtctaatataggatcgaatagcataagtaatatagaaaaattctttagtatatccc

SEQ ID NO: 3449 - DNA, 984 bp, Cannabis sativa
caataacatatccaacattgagctcgataacatatccattaggctcaaaccatcaaatacaacacacaagatctctaaacagtgtcaacagccatgttgtgttgctcaagtaaacaagctttgaaggtaaacattaataaaggtgtttacttttattatttacttaacagacagtttaagtatcttcctaagacaaacaagtttactacatcagcggaaaaaagggagaaaagaaaaagggcactagaatttatgttgcacattgtgagacaggaaattaaagataagataataagtataattaaacaacaaactcagataccccacagccaatcccataagagcactttcacaatattaaaattcactagtctaaagactataaataggggaccatcattaaattacatttatatatatgacaccaaaaactcagctaacaaacatactaataaataaaattatttagaaacccaaccagaatcaactattatcccatccagtaaaagttcagtcaggaaaaaataaaacatccatatcctagaacaagattaagacaaagccaaatcaagtacaaaaccagccaataatcccaagcaacacttgattttattttattttttactttacccagaatgaaacaacataaaccaaccaataatctttgaaaagtgttcaagcaaagcaagtaaaacagcagtaacaaattatcaccagtaatcttcaaaaacctagcttcatcatcctaaaaacaaaacacaacttcaagtatctcatatatgtaagaaagaagaacaaagaaaagaaaagaaaaaaagagtaaaggttaggtttacctgctacactgttgacaaaacctttgttcaagaccattaacgacgaccttaggtgacttagaatgcatgccacagaccttgtgcctagagtaataagctttggcgtcacttagatctactttacacccttcaacctggcaccggggtg

SEQ ID NO: 3450 - DNA, 1656 bp, Cannabis sativa
taatacataaatactgctaagcatttatttgattatttcagaaatgtacaaggaatcctatactaaaaatatttacataacatttgatcaagggaatccagcatttagaaacatttcctctcttaatcttaactaaacaaaattggttcgaaaagtaataataattcagacacaactgcatcagtgccatttaaaggtgacaaatcacttgacttaagagcagatgtaaataagcaaccacacaacatttttgtgtaaaccatatccttgaacaattgttctcagctaaaccatatccttctagttccacctcgaatccttggaccgttggatgctctcctagcagctgaccacggctctgctccaatgctttcttctgtatcggtaccaccagacattgcaggatcatcattaattataacagccatagtagaaggaatttcagagctgctttctacttgtgaaatatcagccagatctgaagctgcaacagaaatatcatcattaagagattgttgcccggagctcaccgtcggaaaagaattaccatatgtctcaaggtcatcaactaatctttcagcagagtccaatgctgatgagagtgaagagaatgaagcagaaccatgtaataattgccttgaaaagttcacagcatcacgtcgttggctactcactggtggctcagtttcatattggttaagcacagaactggctctgccttcaacgttgccaacaatattagtcagcagctgaatcctttcttctatcctaggtggtaattgtattcctcgactaatccgagactgcctcttactctcagtccttttagcctggggcctgggaggaaactccaaacctgactccttcgacttgcgagaatacttgttatccccattaccgtatattggaaccaaagcagactccaccacttctcctgcacaaacagggcactcctttacattaccatgctcataaggcaagtgataaaagcatggccaacaaaacaaatgaccacagcaggttagtataggctccatggcaatttccaggcatatattgcaatcgaaaaagtctccactgcgatgtccaccgatattctcattcgggtccgtcgcaagagccttggcaatcaactcagtacaattccttttgttccctttcacaatctccataggactttcttgagctacactaggatcattcccagaaaacaagatagtgctgcttcgaggagcatcactggatgcagtttgcacagaagttacatctacgattgaaggtggactacgagcttgaagctgcctacgagcttgccgttccctagtagccacctctaattgtctgattcttgcttcaatacgaccttgggcggtctctaactcattcagtagagattccacaccatgccaagaatactgaggttcctccagaggctctaaattcaaatcaagatccattacatcttccctttccattgtcgaaagaaacaaaatcttggaaccagcctcttcactacgactaaaagcttttctaacttttctctttgaaatttcccataccctaaatttccaaagcactgcatataacacagtcggtaagaaaaattacccatacgtgctatgttacgttcttcacagtactcagacgaatatatat

SEQ ID NO: 3451 - DNA, 595 bp, Cannabis sativa
ttttttttttttattggtggaaatgaatttgtttggacatcattttcttccgtactaaaattatatgattccaaacaaagaataaaagaactaaatgaaaagaaaaagaaatgggcacatgaaatcttatccataaataccttacaaactaacaccaatacaaaccacaatttcaacagaatgtattgatatccttatacacacacacatatatattattatatatatatattgggaatcttcagaaaaagagaaaattagaatgaagatgatcctccacctgaagaagctgctgatattcctcaaagatcttatctagcatatcatctttaccatgtgaaatttggtccaaagatgtacttttattactattattacttttgttgttgttgactacataatcataatcataatcatcatcatcatcatcatcaactttgttaccatcttgataataaagattcaaaacctcttctgcacaatcttctccatgagcactagtactatactttgaaactttaacaggttttggcaaatgtaccttcttaccatttcccgaaactccattctccttagtcgtcggttgttgttgttg

SEQ ID NO: 3452 - DNA, 980 bp, Cannabis sativa
ggcggcttctgcttcgagtcagccttctccgccgaccaccaccaatttctcaacagcttagtctctgaagccaaaatcatagccgtatccgtagagtaccggttagccccagaacatcaccttccaatcgcctacgaagattgctggactgccctccaatgggtggtttctctttcaactaacgatcatcatggtacctctgaggagccatggttgactgattacggcgatttcgagcgagtttttctaggaggggacagtgcgggagctaatattgttcataacatagctatgagaattgggaaagaagggttgtgtaatgggatgaaagctgtgtcaggagcttttcttactcatccttacttttggggtagttctgaagatgagggtggtgataatggtgagattagtttggctcatgtgatttggaactttgtgtacccttctgcgcccggtggtgtagataatccgatgatgaatccggtggcagcgggatctccgagcttggccggaatcgggtgttcgaggttgcttgttagtgtggctgagaaagattttctgagaaagagagggataggatattatgaggctgttaaagagagtggatggaatggtgagatagagttggttgatgtaaagggtgaagatcatgcctttcagattttgcattggaatactcaaaactccaagaatctcatcaaacgtttggctcactttctacaaaattaattaataattatgtttttacatgtattgttggtagttggattgaaactaggggaccaagtagggacattacaaacagacaaggatgaactctatcaaatccagctctccaaatctgccgaaggtcttagctcatacagtcattcccattcataaacatctttaaaactctataaatgtaaactctatatttaaatttgtttttgtgactactttgttatttctttcaaagaaactactttgttattattttt

SEQ ID NO: 3453 - DNA, 1539 bp, Cannabis sativa
  modified_base (773)..(773): a, c, t, g, unknown or other
gatattagaattcagaaacgtaataatgaatttggattgaaatccttaaatttaactgcttaaaaacttaaaaaaaaaacatgatttagtgtgaaaatttatggagcaaaaatgcaatttatccttaaaaaaaacttaccagagcataacagcagaggcaagagatagcctaacaaagccccaaagattctgaaaagccttggaagaaaacccagaccaagctcgaccacaagtcccactaaaaatataagcaagctgagccaccactatgaaccaccacgacacgttgagtaccacggcggcgccggccatgccccaatcaagcttgagaatcagtagccagctaaaaaaagtgtgaaaaaccagagcaacagctgatataatagccatcaccatcatcttactctgagcctgtaagaacttagctattggaaaattcattgcataagcaaataactgaggaatcatccaaacggcaaacaaccccgcagcctctgaaatctccgtcgtctgaccaatcagtttcaagagcttcgaagcgaatatgtacagaaaacagaggattacccctgttgagttcaggattacccaagatctttgcatatatatacccaacatatcatgctgaccagccccaaatgcttgtccacatagagtttccaaagcactccccattccaagcttcattcaaattcaaaacccaaaattaaaatcatcattttcgatataaatatgtagtaattttggatgtatttatattattattattattnttattattattattattataccataactccgaaggagaatccggcgatgacggagttttcgacggagacggcggcgagagcaatagtgctgacatggccggcgaagacttgtgtgatggcgccgagggagtattggcatatggaggtgaagattgctggaccggctaagaaccagagcttcttggattcgactttgaattctttataaaagtctctgacggtatttatgggctggatgtcgtcggcatcggcggtgaaggagtgatttgaggttgtggagagaagagtctctaagtggttgttttggttttcttctctggaggagagtaatggctgattattgttgttctcctccattaatggcggccaaattgccttggctctgtaaatcaatcaacttcaacttcaatgcatgagaaatgagactatatataaatatatatatatatatatatatcatatatgtgtttgtatttataaggctcgtagtttattaattaagtgtagtatatgattagtttgtaatttattagtgtatatatgttattccaaattattgtagtgaactagattttttatttgtttcaacatcttgaaaagttttttacttttaactatttttttcaacatggcatatgttatagttatataaactatttgtaataacttagggtgccaaaaataatttattacgagtataaaaaaaaagtcacttacaataaaatattaagtgattctacaatgtatttatttataagaatgtact

SEQ ID NO: 3454 - DNA, 1479 bp, Cannabis sativa
  modified_base (665)..(666): a, c, t, g, unknown or other
  modified_base (737)..(748): a, c, t, g, unknown or other
gaattaaattttatcacttgcttcgtttcaaatttaggatgcatattaataatgtctctttatattaaaacatactattttacaaaatcatgtggattcatattagaatgcatttttaattgatagattgtacctaaataattcaaccaatcaatatcaaatatactactattctctctttgaaaatgagaaagcctcatacacatttcttttagattccatttacaatgaaatgtatagtatatagttggctatttcaaaggacattgttcctagccctcaaatattattgaccaaagcatataaaattgttgtggagactccactcttacatctcgttcttctataatttttcacatatttcaggcagttatatatctaaattattttgttgggtgtttaaatcaacccaatcacaaacctttaaaagaaattttttttactatacctactcccaaagaagagatccaactcctcatcaaaaaacaaacaattagcattagtgattaagacaaacctcacacactcgtttggagtctcttccaacaagctaaccaacactacacaaaactgctatctttggtgacaactttttattcacaacataatttttttgtgactaaatgtgacttttagtcacaaaaaaatgttacttgtgactaaannataatatttagatacaagttgtaactaatttagttttagtcacaagaagtattgtgactaaaaatacattnnnnnnnnnnnnattgtaatttttgtgattaatacatttaaccacgaatcttttaatcacaacataagaatgatgatttataatactttttcacttttagtgtaaaagtaaaaaaaattgtagtgcaagtaataaattttagttttggagcacttagcctatcccaaatgaagtaaaactatttccttctcgtattgtcccttggtcatagcttggaccaaatgtttgagatgctaaattgcaagctagtgaactccctcaaagtcattttgcttctaatcaaattctttgtcatcacaattttcctctaatactagtcggaggttccaccaatcttgagttttaatgtacatcgctatgtctctaaagccaagccgaccctcttttttaggtaggcaaatatatttccaagctagatgaccttatcctgaaaagtttagcatcacctttccaaaagaaaagacatgcaaatactatcaatttctcaaagaatgtatttgggaataatcataatttttgcacaataagtagtgttatagtaactataatgaatatgatgttttgatttaaatattagaatttataatgaataaattagtctgtatttatagtaaattttaaattttatttattttaaaattaatttaaattaatgtatatacttagcttaaatatttttatgtaccttaaatagtttactaattttgaaatatacattgttacttttatcttaaatatataca

SEQ ID NO: 3455 - DNA, 1177 bp, Cannabis sativa
caaattactttaaacacacatattacattgttcctcgcaatgtcatcataaactactaaactaatcacaaaatgacctaaacacagcaaagactaaacattaaaacaaatacattaaacattttatccaaaagggtgttgcttaaaacacacaaattaccataatcatcattaattacttataatgagatgaacgataaatccaaaccctaaaaacagcaccattaattcttctaatcatctcaaacacacaaacatctcctttcttcaatttttgattagataagaatgatttccaaccttattacccaagtttcttcatcattgttttatctttattcacataataacatctaacatcccattttctcttctcattcccaacatacacttcaatcttctcaccacaaaacttcatgtactttttcacaaattccgaaggcacattctataacaacaagcgaaaaacccaaaattagacgataataaaagacaagacctaaaaatatgtactaaaacacgacacatagttacgagttacttaccatgttatgagcatacgattttactaaaagcaagaaagaagggtttcgaggtttcaatgctagggcaactttaactgccttctcagttgcctttgacatgtttagacttctttttttttaccataaaaaaagcttcttggtacaatcatttcgtgttcatcatgatcaaattcttcctctattttctctgttttgctacccttattacttcttttcttgtaccgaaattcatcaacatcaacatggttttcgttcattacatttcgatctttttccttttcttcttcttctttttcctttttgattcgagttacattccttgttttgtaccaataaaactctctacattcataggaatcaacattacttcttctttttcttttgcctatttttctaggctcaagaatttcatccttatgatcattatcatcatcattattttgatcgtgtggtggatattcaatttcagaaccaagagcatcacaaatacgaacaaagaaagaacagttaccttggtaagtgaatagtaaaatggattgaaagtgaatagagtaacaattcataaaatcttcaataccatttttcaaccaaattttgttcttatttttcttctcatttttcactattttgatt

SEQ ID NO: 3456 - DNA, 1648 bp, Cannabis sativa
tttctggtagaacatggaagtgtggttaagaaagtataggatagatagaggtagataaaggtagtgtacggtaataaagttttctcattatttagctatatatataaaaaaaaaatagctcatacatcatatatttaatattaaatgtacatgtattattaatgtgaggctattttttataaattttctttttatatttgatttagtactaaaagggtagaaacttggactaggaatgctcttttgttaccatttctcgtttcaccatttctaaagggaatgttaggttattcccttccaaacaagtttctaagatacatgatttattaaaataagtagaagttttggattattttgttggttttgaaattgcataataatcatgtaaaaaaatcatttttatatgattgtttttttctttcaaaatgctcggatattaataaaaaaatatttatattttatgagtaaattaaaagttctaaaaaaaattaaaaaaaaggggcttctaaatagtattttttgagagaagttagagaactcaatttctcaatatacatataaattaattaatcttatttaattattacacgaacaactctaaataaaattttcaattctagaagctaaaatatactttaaagattgaagcttattagccaaacaagagcttagactattagttagtattaagtacaatgtagagaaaataaatagctagtatacattaatatattattaatcacttattacgtacaattattttttacactattatataacatcaatacatataacataagctagtttataaagcttaatagtaatttcttccttcactacaatagtactattaataatagttggcaattccttaagtagtccatcttgacatatatcataatcaaccatataattatataatagtataatttgtaaattaagttaatttgatttttgcatgatgaccaaagaagattgttgttgttgttggatgtggttttgggctatgaaaggggcaacagagcccacaaaagcagcattgatataagtagaaggctccaaatgagaatagtcagatctaacatcattgaattggtcattagaatttgggcctccaacaagagctcccacatgaacatttgggtttggcttggttgatgggaaatacacagtttggccttcattgcaactcacttttgcttggtgtgtcctcaaagaaggaatggatgagcctctatggtgaagttgagttgggtatttgttcccaaatccaaccatgtatgatgttttcatagggttgtttcctaatatatagtccacctaataagaaacaacaactcatgaatatgatgatagttgtaaactctattaactaaatttgttaagattatttattttaattgtatataatatgtataagaaataataagtaatggctaatggcaaattgaacctgtgattttgcaaaggctgtgatttgagaaggtgagaatttagtggagccacattgaacagtactcccaacatgagcagaatttaaggtatttgcatagatagataacaccatggttgatgttgtcacatactgtaaattactgctatctcttatatacaatagaccccctacaataattaattaattaattaa

SEQ ID NO: 3457 - DNA, 1901 bp, Cannabis sativa
aaaaaattgagagactaatggttaaaactagttagtccaaaattacatgatgtgagctcattaacatccaaaatttgatgataatattaggtaaatgtattactgtcataattatatatatagcagatttcatgtaatatactcttaatcaacaatatagaataataataatttatagaaatgacttaaaaattagctagatttttttgtagttgatgattagttggcttgttctctaaaaatgtcacaatcaatgaaaaggtcactaaagaaagctgagattggaaattttgaataagtaataatcgatctccggacttaattaattaatatattcaatttgttgtttaattaattaataattataattcattaataattaattaagatatttagaaacaaggttttagataatctaatctcttctcttgccgtattagcaaagagaaaatacaaacaaagagccattatttgtgttaaaaaataattaatacttttttgtaattattagttggccaggtaaactataataaactcttcagatattagtaatactctaccaataatttactatgtatagtttcacaaacttttgtcccatttccaaaaaaaaaaagaaaagaatgcatttcattatgtactaagctttattttatttatttattttgaaacaatactaagctttatttggtttattttatgtacacttactactctctcactttgatatacttttttttggttaattaataatagttgaatcaactaaattataattcataggatataaaaataaattacgttattttcgataaaatttgaaaggtgctttattaaatccgtactattttatttataatatattcgatccatactaaatgtgtattttatattattgatccaattcaatttttaaaaatacaaattaaattggttgtgttttttaatatctattagaaaaatatttattttattgttttatataactaataataaaaataaattaattattgttgttttatgtctctagcaaccaattagaataaaaaatttaaagcaagaagaaaaaattatatgtataaataagaaaaaatatacatttaatctaatatgttttaaaatacattaatatcatatgtattaaatttttaaatactatttatttatatcaaaatattaattgtacatataattttttaaatatatataaatatgtatatatagattgaattagaccaattattttattcaacatccatttcgtataagtacgaattttaaatattctaatctaattcaatctacaaacgcaaatggattggattggattaaagtgtgcaaattggaataaattaagtattttataatactcctacaaaatttaattatagttagttaattaattaaatagcctagctagccaatgcatgtctatgctctataaaataaattaatgtaatagattatgcaaatgtgcatagacgagattattagtttaacatgaacacaagtagttaaacataacgacatattgaagattatataccaagacaacttttattataaattcttttgtctactcatcacctattaccctttctttgacgcacataaacacataaacaaatataaatatatattcaattataaatacatataattctacaattaaaataaaaaaattgctaaaaaataatattaatgtttagtactttttaggatcatactgttattagtgttattaagtattaagtctcatataatttagttaagaaaataatttttagagaatatcgctaatcaattataagacatcacttataaaaagtgttactgataccgggtgttaggtctttagtgttcaataacaatcctcttaaactaaataatgattaagtgag

SEQ ID NO: 3458 - DNA, 2135 bp, Cannabis sativa
  modified_base (72)..(80): a, c, t, g, unknown or other
taaaaagggtataaagtgtaatttattcttgcggggtaagttgaaaaataccccttttattaatcaattaannnnnnnnncctctaattttatatttatttaaatcatacctctttttatatgtattgtatccaaaataccctgacagtcacatgaagagtatcttgaagtgataaagataaaattggtacaatattttaaaaaagagataaaataatagactttgaaaaaaaagtaaaaataaaagagaacaatataaaaagggttttatatagagtgtaatttctcgtgccgttatgctgaaatgggcctcctttgctaaataaggcccacataaggagctcattcaggaatcaggtgtagagtgaagtgtgagaccacaaaaataaccgtagtgtgccgttccactgaatactttccatctttcttcttcttctccctaaaccctgatttcacagtccgtacttgggctttaagtccctccctcatacacagacaccccaacccgagttaactcatacactacactcacactggactcggtcctcggaaagccatgaaatccgtgctgattgctcgtagactctctaggtttttcaaatctccgattattctcaactctgatcgcttcatcgctcctaatgttcgaatctccgaagctctatacacttctcttcaatggcggaacaacagcaccttctgtgctcattcacccttattcaatggtaccttctaaaattctcgttgctcgtttcttttttttttttttttttattagaataaatccatttgctcgctgagaagtgaaattctgaaaatgatattgagtttgtcaagaacatttttttttttcaattaacttttacacattgaattgcgttgggttgctcgtaaaagtaaataaaatttcgattttttaagtttttttttttgatgggttgttttagctttagaaagttgggtgctttttaaatttataaaggaatactaaagttgtgttctttcaagggataattctcaagtagtttgccaccaacaattgacttcgatatgaacaaatgaaaagatttgtgaatgaggttgacatgttgcacttgcaggcactcactcagaaatagaacaatgtgcattgtctaagaggacgctgccacgagcaaatttttcatcaaaagcaagtattgttgaaggcagtcccacaggttgttgattttcttgacccaaatgaaattggcatttgtttttcaagttcttgtagtgagttttgctttgctatttggaatgcagaggctgtgaaggagctctatgatcaaattatccaatccgtggctgttaaacgaacaatgtctccaaatgcttggttatggtctttgatagaaaattgtaaaaaccatgatgatgtcaagcttctttttgatgctttggagaacctccgaagatttgttagtttctatcttcacagctttagagtgatctcaacttcatgtatttgataatgtagtatgaatttcattcttttgattgttctatgctttggttttggttgcagagaatgtcgaatcttagaattcctgataattttaattccaatctctgccgagaagttaccaagacatgcgcacgtgtaggggcccttgactttggtaagccgttcaaatgtgtttccaaaaatgttttctcttagttatctgattttacaaaatttatatagttaaactgactttcttgcattttggtgctacactttttttttttttttataataagtgggctctgctggatgtatgtccattaaaatgatttaccttatattttcaggtaagagagccttgcggaagcataatgttcatggattaactcctagtattggatctgcccaccagttactggtgatgcatttaacttttctatgttggttttgacatttgactagttgctttgctagtctagcttctggcatttgtatttacagatgctttgctgtaatatgactgtagttgtatgccaaggagaacaatgatgctaaacttatggtcgaaataatggaacttctagagaagaatgacttaccattacaacctggtacagcagatattgttttcgggtaagcaggatagtctatacccttatataaaagt

SEQ ID NO: 3459 - DNA, 2423 bp, Cannabis sativa
agtattttcaggaagacaagacaacattagaaggaaaggtaaaaagtgatgctcgtgaaatgcaaagcttttataggaaatattataaggaatatattcaagctctgcaacaagttgacaatgctgatcggttagtacttatttgttaagttttttttacttactttgtctgagaagtttagatagtgagattgattatattttctaatcagcacccgactgacaagagcatatcaaactgctaaggtgctgttcgaagttttgagagctgtcaatcagacagaggccgtccctgaagaggtaaaaggacattcttgtaactcctccatgatttaacaacactatgctgtactacttcttgcaaagattacatttctttgggaaccttataatgtatggattatgactacagattttggaggctcacaccaaggttgaagaaaaatcacagttatatgtaccttacaatattcttccacttgatgctgaaggtcaaaatcatgctatcatgaattatcctgaggtttgtaccaaaatctagtgatttagttttctgaatttatcttttagttctaatatgtttcttgcttatgcattttatagatcaaagcagctgcttcggctcttcgtaatactagaggtttgccatggccaagggagcacaaaaagaaagatgatgaagacattctagactggctcatgctcatgtttggttttcaggtaagttcacatagaactagttcttattcattacttgggtttttcgagtttttcttgatgtgttatattccatttcttaatatgtagggggataatgtaggaaatcaaagggagcatttgattttgttgcttgctaatgtgcacatgcgacaatggccaaagcctgaacaatacaaggttttcaatcttgcatcctatgtttcgtttttttttttttttatagtaagccatatttttaactgttggcatagactaatatattcaactttttttcagatagatgatcgtgctctgacagaagtaatgaagaaacttttcaaaaactacaagaagtggtgcaaatacttggatcgcaaaagtagcctatggtgaggctgtatacttagattcaaggacattagtttattcattcttaatcattgaaaatgtagtgttaaatacattttagctttccttcactcgtcttagtaatcatcacagaatatacttcaaaattcaaatcactttgttacctttaaccatattttggctgttcccatcccacgcaggttgccgagtattcaacaggatgttcagcagagaaaattactatacatgggtttatatcttctaatatggggagaagctgctaatctgagattcatgccagaatgcctttgctatatataccatcatgtatgcagtagatatcgtagaatgttagtctcagatttgtttcttctattttttaatttttattttttgtttttcccttctactaatgtttgattgatgtatactcttctgaaaatacattttcctagtgtcttttgcttatgtgtatctgaaatcttgaacttgttcggaaaaaaaatatagactgattttgcttgatgtgaaacattgaatttgagcttccttaaatgaaataggaagagcatgatgaagaaatttaaagagatatggaagtgatatctggaatcttataagggttttgttctaatatgtgtttctttgtttcctcaaatcttgatcataactattatcatgctatttgctccattatgatttggcctctgttcaatgttgtacttttattgttgtttatcgctgtttacctgttttgtctagattatcacattgtagtttgccgccttcttatttttattgatctttggttcatacacacaacaaatagatggcatttgaattgtatggggtgttgaatggaactatgagtccaatgactggggaacccacaaagccagcctatggtggtgaaaaggaggcttttctcaaaaaagttgtaactccaatatataatatcattgcacaggtagaggattgtaataatatattttggcttcatgcatgtatttccttttcatcctgtcacacatattctaacaaatttattaatttacttgcataggaatctcgaaaaagcaaaggaaaatcaaagcattctcagtggagaaactatgatgacctgaatgaatacttttggtattatcatgtccattgtttcttaaattacttgctttggtaattatgagatccaatatcataatactatgtttcttgtaggactgtcgactgttttaagctaggttggcctatgcgtgctacttcttctttcttttgctgtcctaatgataacaaagttgatactcatgatagagacaaggtatgtgatgatattgtaatttggatacgaattttgt

SEQ ID NO: 3460 - DNA, 960 bp, Cannabis sativa
cttctctagggcctgaatgtctatcattggccctactacaatggtggtgcagaggccttcaaaaatctcaaccctcttcacggttgagagactgtcacgtctcttttgaaggacactcttttccctctcgtgtcgctttttcaagaggcttttggactcccccatttccttcaggatggtgtgattgaggtgagtgggcctcaaggggaacttcaagcccacaaaagggatccagggtagggaagtgactggcctaaactgcaagttggaagtggacttctaacctcttgaaggagtaatggatcctgattggatttatttttgttgttgttgcctttgttgctcttcttgttggagttgttattgtttttgtaattggtggtgttttgttagtggtggttgaagttgctttgatggtggaggttagtgttgctcagtcaatggtggtggttgttgttgattttggttgttgttgatcttactgttggtggtgttgatattattgttggtcggatgatggcagatttggtggagttagggtgttggttctttgaagatcattatcccctcctagagacattttttttatcagagcccctttggccttcttagcatccctgccaaaaggaggcggaggattttttgcattttgaggtcctggatgtgtccttccaatgaaaaatgaggtcatccaaacttttgttagagaggtcgattcccgttatatcctcccagagtgttccctctacgaccaaagatcgtgaacattccattggggctagtggctcgagatggtcagtttaaattgttccgctaccaaacacaaccaattcctttgaagcctccctgaaagcggtgggtgttttgtctaccccaacaggagctttggagccagaagcttgtgtggcagccttcacgggaggaggaatcgcctggatattatatgtagaggaggttgat

SEQ ID NO: 3461 - DNA, 959 bp, Cannabis sativa
aaagttacaaactacaatacctgatctgtaggaataaactatagtttctccattccaatcagcacctgcaacttgagctattgaatcaacatcagaagtatggacagaaccggtgagggtaccgggagatgaatcgtggatacgggtcttcttggtttccttgcaccaaccagcaccttggcagttgaaaacaccaaggattcccgaacacttgttcacattccatactttgagcaaactgcaaaaggagaatcccacattagaggttagtacacgtaatattatcacacggttgtaaataatttagggagaataaaacaaacctggttccatctctagctggatcagcaaagagacaatcacgggtaggtctaccaggtaactgggcacggagaacagatccatcagggaggacaagctttctcaggagctcaaagttgtggtatccaggcttatcactagggaaaaggaaaaggtcaaagacaactaagaatgatgtttcatgtacagctgatgagacaacaatgtaggaaatatgaatacctgacatagattgcacatccaccaacagcacgagctgcaccgtgatactctgctgctgggtgtaaactctacaaaacaaagacaatatgttaagactatctgtcacttgaaatggtaaattttatgaagtttcaagtaccatttctacttacatggaacatatcccagtcaggttgcataaattctcctaggaaaagtgtattgtaagctacagaagaaatatggatggtatgggaagcaggatcccgaggataaaagtcatctgaagctctcacaacagcagtctgcttggcactatagatcccatcagtgttgtgacacatgcaagagatgcatccattgtctggaaagttccgagcaattgaagcctcaagagcctggtggtagctgcgggtcagagacactctaccaccgtg

SEQ ID NO: 3462 - DNA, 2665 bp, Cannabis sativa
tttgcaggtttaattttttaatccgtttgtgttttaaaatatatgtttgtgtctcacttgatatttgtatgttgtattcttcatgaactatgttggtttttctttttcaagtcctaaatgatatcgttgtatgttagtctgcactaatttttgtatatttttctaccttatatgtcattgttaattatagatgacaaatttatttttcgtttaactattgcaatccttctgtaattaaaatacaattttgtactgtttaccttgttagttcacaaatacgtttgtgcatttttcaatagtttacaagatgatttaaacttacgtacagttggccaatactgaagagtatattgatggacaattcactggaaatcttggtgaaattttgatccggtaactttctctcatttttatttcttctaaattttcaactacaactatttgatctgtcataaatactcatgttttacttataaactttataattacatttcctttttactttttactacagatgtaacaatgttctttatcttcgtggagtacccgaggatgaagaaattgaagatgctgagcgagaatgaatagcagctcggtcagctttgtggtttatgtcgaaggtcagttcttaactttttcttttagtggctgcttagacatcataacaaaattgaatctgtagactaatgaggcattttttaatttaataaaacgttgtggtttagtccctttctaaatgacttccaagagtttgtattaattgtattcaagtataaatggacaatttaccataactagaaaaccaccaaaccagagaagctaatcgttctaatgtgtgcttttatatagtgaatgatcgatatcaggtatcttgtcttttatcaaaatacagattttgtattcttgcgctatttataatgcttatatggtatttgtatttttaaaagcatatatatatatatatatatttgttagtcggaactcgaatttaaataataaaacatgtttaataatatgagttttaaattcaaatttagttatttaattacatatgattagtttgatcaaattaaccaaatttgagtttagtttaccaaaatatgtccaatttcatataagtaccaagaccaaataagattatttgaagtacagtgtactaattttgttttcttccatgaaacacagggtacgcttataaaagacagtagtactaattaagtatagtataaccccttattgagtgtaaaacatacaaattcatagacactgtcatatgaggcaaattcgtcgaaagcggctaatgcactagtcgtaatcaaagatgacccaacactctttctagacacttaaattcacaccccacgatataatgataattaaaagcaatgcacaagattaagtaccggaggtcatatatctactatcacttttctaccgccattcttcctatcatagcctttttaacatgtcatttcctaggcttctaagaaaaacctacttttgtatgagtatgataaatcagtgagatttgagatattatgaaggatatcaagaattttgaagtcaaaaacttcaaaatccctgaagaaacaaagcctaattcttttatttaattattgcagggataaagatgagcatggtaacgagggagagagagagagaggggttttgtatatcaacacttggtagtaagacgatgatccatataatttggtcatggtattttgttacttttgtgctctgtgaagagttttgtggctggatttaggtgttttaccagatcaagttaatgtagatggagattattgaagttctatttgttgatttctttattttccatctggttggtgtaaacgttgaacaaatgaatgtgttaagctttaggaaggtaaatatagttcatgggatatacaaccaagtcattgttaatttttaattggaaacttttactcttaaactcaaaacccttttcgtgaaatgcaactctctaaactaaaacacaagtaaaggaacgcctctcttagcttagcgtgcaactgcactagtgacagcaagcccaaaaccttgattgttaagaacacaattgtaagctaagtaaaagaaaggggtgttaatattatacaacgtttttcggtcataatttatttcacagctttccagcagaagaaaaaaaaaaaatcaaagctaagaaaagaaaagagataatgcttgaatttgtgactgccaaaacttgatgttggcattcactatgttaggtagaaatctgttgaatccaattacgtttttattattatttaactttatacgaaaaagtgtatatatattgcaatcaattgttagaccaaatgatgattacaaacattgattaatgtatatatatatatttattattattttagttttagagaatgttttgtttatttttaaatttagtagaaacttgattaatgtttcatgtttacaaacacaattttatcaattgagttttttgagttctatttgcactatttctcgtaaagaatttcaattatgtgttgtttacatggaacaaagactttatgttttacgactagatatacaaattgcgcttaataacaaactttttaatattgctaaacctagaaactatagaagtaaagagattgataatagtgatgaaacatat

SEQ ID NO: 3463 - DNA, 2759 bp, Cannabis sativa
aatccttccaggtctcataagaccccaaggaacctcctccactcctccatgatctttcccagagacagagttaatagctagccgcctatgcacaagaaagttgtctttcacctgcctttgcactttagtcagatctaagggagtaccacgacgatacatctcatttcgcatcattcacaatttatgatacaataaggtaccataaagaaaaaaaattccaaagcttccaccttagacagaagatgctcaaaggagggattggagagccaagagaccaattccctaccagagaaaaggagagaatctggtcttatactccactgagaagcgaaccaaagatgctgagtgactgaacaagctgaaatgaagtgacagatatcatccccctcattctcgcattattagtttagtgttgtaagttatgttacattttcaaaaggtcaatttgtcatttcatttaaaaagttcactccacatgttatcatcccgactttttgtatcaaacaagtgtaaaacaccttcgtaaagacgtagaatagtaaagttgttcatcgcgagaattcctactacctcgatccatgtggttaatgaggattggtcaacaaatctgccgaccaaccctcatttgccacgtggatggggtggtaggaatccctgaggtaaatggcaagttctaacgtagaatgaactaattcaaagtaattctcccgacacattttatttttaaagactgtaaatgtatttactacaataataatatatccacctcaaatatacacgaaatattacaaataataatataatatttctttaaattatctaaaataatacattttaagaaacaacatcacctcatcttattatatataatattttaatatacaaatcattactcatcttttaattaccatttttttattcaatatatataacagtcctaaaacccgaattcaatacacccgaaacccaaatcccaacccggtgtaaactattaacttattaactattaagtacttccacaattaatttaagatgccaaatgaataatatgattcaatcaatagtatgaatctatgactttttttttaaatatttgtatttccattttcacagctgtaataaaaaaataaaaaaacaaactacattttaaatatttatatgtaaattattattattattatttttgaaaaaatatgtaaattatttattttttcattttgtaaaattaaattttaaaaaaattaaaatccgttgtcaaaattccacaatgcagagcccaaagtcagctccaaatctacttcatcacccaagccgagcttcggcttcacaaccaaagccaccgagccgccactatcctcctctccgctatcggctccaccttgactcagccgctgctgcagcagagtttcctcctccgagtcgtgactcacaggcggcccagacaaaaccaactgagccgactcagtcccaaactcggtctccgattcctcaagcttagccaccttcttcctcttgagccgtcgccgagtctgaaccttaagccgatcacacaacacagagctctctctcttcgccacgtggcgaatatcacagctccaattccccaccaactcatcagaaaccggcttaataggctcacctctcagtacggcttccactgcggcttcgcataagtgccagcttcctgactggaccaagccggttgagccgctaattggattcacaatacgaccacaagcttcgtatagcaatgacttgaatatatctgcacagagtagagaaaatgaatgtcgttatagataatttaatgtcgttttttgaaatataataaaaaaatcgaatgtcgtttaggtatttaaatgtcgttttttgaaatatattgttcgctatagaaattgaatgtcgttttagatatatagatgtcgttttctgatatatagaatgtcgttttttcgaattatatagtcatagaaattgaatatcgtttttatataaatcgatgtcgttttttcgaaatatattgtttgatatagaaagccaatgtcgttttcaaaatattgtgtaatagaaattcaatgtcgtttatctcaaaaaaaaaattgaatgtcgtttttgttcaaaaaagaaattaaatgtcgttgtaaataattcaatgtcgttttacgagtgatcgttgtcgttattgaaacatagtttgttatagaaattaaatgtcgttttagatatatagatgtcgttttctgatatatatatagaatgtcgttttcgataatttgatgtcgtttgacgagtgatagttgtcgtttattgaaatttattgttagcgagattgtatgtcgttttttgacatttattgttggagaaattgaatgtcgttttttcaaaatccgacgtcgttctgggaaatataatgattttatagaaaatgaattaattaaaatagaataattaattaccaggtcggcgatggagaggaccggcattgatgaggttgatgagaccagcgcggccatagaatttggcgaggaagagagtggcgttggattgagagagtgaggatttgatccagtgaagacaaggtctgatggaacagttcttggcgcaccctcgccggagaattcgacatccattacagcttaatcgcatcactctttttagtatgaattgaagttgggtttttgtttgggaggcgagaaaatgagtgagaaaaataggtgggtatgtgccaaaacatggggatttgtggggggttttgtaga

SEQ ID NO: 3464 - DNA, 1438 bp, Cannabis sativa
ttgttcgtcctttcaccactttttacttctacactccttgaagtactaacgtattttttttttccagttgtccaaaatgtcgataataatggtggttgtagcagtgctagctttgttgaccagtacaaatggtgtagaggggcaaaagggtaaaaagatagggagctttgagtacatggcaattagctgtagatcccatagtgcgtcgttgactgattttggtggagtgggagatggaacgacatcaaatacaaagtcgtttcaggcagccatgaatagtttgagtcgtttctcatcgagtggaggctctcttctctttgttccacctggaaaatggctcactggaagcttcactctcatcagccatttcactctatatctccatagggatgctgttcttctagcttcacaggtttcaactttattaattttttttcttttttctttttattaaatgcttattcattactcaataagtcaatacaaaacttatattttaagttataaacccggccatatagtaatattctttctttttaagataaatatattaaaacaaattcatatgggatttgtcttgattgatatcaaccacatcttaaaagcatatgtctttgtcttcttttaccttacaaaatatttttctattatattagcatatagaaattaaattaattattatgagtttgaacggggtaatactattcttggttttttttggttaaaaaactgtggatacttatagaactattatatttttattgcttttgtacattgagaaatgagaataataaaggaaatgatcaagttcggtttttctttgaaaaaagacgtgaggttgttgaaaatacagctactttatatgtatttatgacaagaacaataatataatataataagaaatattacacgtgatatgatttcccataaaagtattgaaaaatttaattctcttaaaactaaaataaaaataaatacaataatttaataaattaattctattaaaatatgtacatatagcaatggaatagtaagtataattaaatgccacggtggaatcacgttgtagtgttccccttctttttttgtgattaattctttttttgctctgagtttttggttaattattatgtgcttcataaaaatgaatgttttttttgttaaaaaacatttatgttacatttactgaatgtttttcagaaaaacctattttatgagaacaattaatgctaactgaacacacttagttgttttaacaatgttttactttttaaaacgaagaatgtttattaattagtttatttgtaatcaaaataaataaataaatcgtactagtgatttttattttttgtttagatataaatatatgattgtatatccaaaacttagttgttttaatgcggccttcttctgaacaacatatatatagatcgtaaca

SEQ ID NO: 3465 - DNA, 4055 bp, Cannabis sativa
aaagcacttgattctttgactaatgtggttctacatagattagtggtgcatgttctttaaatggataaacaatttgtttagctaaaatttcttttattatttttgagatgcttaatttattcgttattaaaatgttaaactctattttattattattcaatgattatttattattttaaaattatataaaatctgatacttaattatatcaaaaaagatactgaatatcaataatacttttgtacaattctcatataaatatattgccactactgctgaattctgtagccaagttaattttttaaatcgtaaatttattaaattaatgtccccgaaatataaacaaatagaatggcataaaaaaccaaagaaagaaaaagagatgacaatattttatgttgtaaaaaacaaaagaataaataattatggaccgttgatctattacgaccctttctcgtatcttaatcgcccctcgaaatagcatgcaggagggtggactacacgtgatatggtagcaagtttgcgtcagtgcctcgacaagcgcgtaggactcattcagtcggcgccatttgaagttttcaacgaatcgagcccacttagaatccagcaactgtgaaccataaaagggtccacgtattcaaatgactaaaataccctcttaccgttgcgatttattaaacagtccactttgaattgttcccagtttctactgttaccagcaccaactggtttaatagccgccataaagaattaccaataaaatggttgtttaaccctcaaacgtaaatcatgttaattatttattttattttagaaatttattatttttatttaatttaataaaaacatttgtactctcttataaatctaatttcatgtttataaaataaaatttcattcattcaaaataaataaaatttcagcatattaaatcttttaaaaaaatttgtagtacacccttttaatatttgtatttaaattattttctatgatagtgtacattatagtcatttaaaattatttataaatttttataaaattttgtataattaatagtataaaaaataaattccaacaattacttacaaagcatataaaaaaatatagtcgcgcataaaataaaatatttaaaccttacttttggcactataaaccattcgaaaatttttaaaaatttaaaagtaatcttaaataactacaatatacacaataaaaaaatagactaacataggttgagggggttgtgcacctttagctaatttagataaaaccgaaataataattgtaggtttacaattttatcaaagaagctaagttgatcctcactacactaatgctctattcgactaatagtttaggggccataacttggtgatagacctcttgacctatagatgactttactgcatcttttcagtttgaaaggagattgattcacttgaacaaggtaaaggcaatctcactatgaagtgaactgtctagggaacaaattctttattgatgatatcgtttagaagcttcccattcgagtatattggtatcaacaccggattcaagtggcagtcatagcatgctccaacccatttctcatgggttctaatacttctgtgataatataaggtccctccctctctcattaggagtcttcaatgttgctttcttggtcaatatcttcaaaagacttatatgactcattttcattattgctcccctattgctaatcattgttggaaataaaaagacaatcttcgtcactaccccctgtcctgagttatcttgggaagtaaggggagattcttcgtcaatgctctcccactcgagatcatcttgagaaacagtaagggactcatcatcactatctccctgcttcagttcatcctggaaaacaaaataggagtctgttttagtggaagcataaggtgttgattcttcttcactttcctgatcaaggtctacttaagactcaggaaatagataagcagtgtaattagttgcttctggttgagaaactcctttgaccttcttgacggcttcttcgagcttgatgaaaccatcaactctgtctagaaactcttgaatggtgtatactgatttgagtttcaagtctttctagaatggactcattactgttagtctagctgtcaatgacatgaccttggcgtcttcactgagtatctttatttccatggttgcctccaagaattattgtaggtaatcctttagaggttcgtcttcttgctgcttgatgcagaccaaatagttaggctcgattggtttgtgccttgatggggaaaatgggttatagattacttgcttaagtgtctcctaggaatcgatagatcctggagaaagcttgagataccattgttgtgttgcttctaatagtgtggctagaaagatttcataacaagaatcgtccttaatgccttgcaggttagtctgtacttcaaagttgtgtatgtgagagagagggttttctttgccaatttatggatgccacactagatttctaaactttgaggggatctctagagccttgatttgatctaagagaggagaaaactactctcgatttaactcgtactctgttggcttaaaagtaatgatacccttaaccaaagcagtaagggtatcaaattcggccctacacacatcatgtgtggtgatgtgtgtatcagttggtcgcttcctactaatgttgttaggtaggctattttttcttccaagtcgataaaaggcatttattgacctagaccatgtggttatttcctggtcgtctggccttgctagtaattgtggggatttatcccgtatgatgatagagtcgtctttccagcattttctttgtgagcagctactcagtcctatactgactatttctttcaaaatagtcttccttagagtgacatgtgtggagggagttgaaccaatttcttaagtacagcatgtctccatgcagtcgtgggcattattcatactgttggtctttaggacctcgagcgaagtacctacaccaaacacctcgttcattacagaatcatttctgagtgtggagtagttcattgatcttcaccctctgaatctcatactcttcactttcgtggtagagcttatgggttcttcccttatgtttgattgcaggtccctttccctttgtagggtcaacgggtggtctaaagtcattagacttgtgaagagaatcccacagaagagattggtttccccgcattgttcgaattactttgagaaaaaatacaattggtcttattagctgcgtgtggtggacctctaggtctgaaatctcgagtctatgtccttttgaatgctccctcatagctcatttccctaataggtgaccgctccatatcaggaaaatatcccataaatccacattctcgagtttgagccctttcgaacgctcatttttagttcgcttacttatggggaatctcagtgactactgcttgttgagtagtagcgtcactaccaagagtggtagtgctgctttacgtgtttatggatgattgcttgcctaaacttatgaattcccttcagaaaaaagcttcaagcaaagaaatccaattatagttggggaactcgagttgtagctctcaatgaagtaccaaaatgttgacactaaaaagtggccaaaatcagctcgctagattggcaagatgaataataagtttaagtaaataatttaaagacacataaatttatagtagttcactccccatgtcgcgatggtaatggagctacgtctacttcgagtttttacttctcatcaaaattataagaaaattgactaagtgtgaaaggtctaatttttagaaagagaaactagagagagatgctatcaccttatgggtactattttgaatgtgaaaaatgagctagacgagctctccttttatagggaaggaggtcatattaaaataacaataaagtattccaaaaatatggaaaaaatacatttagactatttttcaatatagatgattatgtaacggtgagattgactcaagatgttgatcgtcaattttaggagctttatt

SEQ ID NO: 3466 - DNA, 1563 bp, Cannabis sativa
ttttttttgagaaaaagcgtttatgtcataatatcaaataaagttagacctcgcggtcattacaaaatggagtttccggtacggaagagaccgggagagacccaaacacctgatgagtaaaagcccatctagccacattatgagcagtaaagttacatgttctactaatataagagaaattacaactaatgaaagagggagaagacttagtacaaaatgagatatagttatcaagtgcccaacgagactcctccccattgatagcattgataaccaccctcgagtcactctccacaataacatacttggagctgatatccaaggctactgacacagccaaacagcaggccgcagcttctccacaaagaacatccgagaagtcctcccgagtcgtgtgaactctaatcactctgccaaaatgattctttaacaacaacaatgcacatactatccaatcacaattcagcttaatccaattcgaaggaggaggagaccaagatttttttaaaactggagttggactagtgagcaaggaagcgtgcatatctgcataagaaatacaaatattatcaaagcatttgttgttttatgttttggtgaggttattgtgttttgtgctttgttttctttcttttactttaatttcaaacttttcttaaaaataattatgtttttgggtgcttatacatttgtacttttttccttcaacagccctatctaaataaatgcataataaattcccaaattttcctttcatatcttttaaaatatattttggagaaaactacctatgagcaaataatattttaaatttaataaaatatttttcttcctctattatttattatttaaatatttagtactctcaattataaatattaattcctcaaatttaaacattttaatcacaatttttaatttaaatcaacagtaaatataaccacaaatacattaattttttttatttaattttcatgcttgtaaagataaaagtatttttttacatacatatatatttaaaatccttacaaaaaaaaatcttaaaaataataaattaattacaatataaagatatgtattactgttttgaaagtgtgtaaaaaactaattatactagttaatattttcttaagagagattaatttgtatgggtagctcccaagctcacgtgatttgtaactccttcgtctccgtaagttaatgctccactcctataagcaaacactcgactacgtactatgtataattttaggagcttgcattacttcatgtaaagccaaatttatatgtttaaattcatatttagagaatgtaaaacttgcactagtagtacgtataagagattgattattagtataagcataagtacacacaagtttcatggcactacaaacccgctgctgttgtgcctcatgcgcaaaaggcctaatcaatttctgttgaagatttaacaatagacatctcatacgcaaacaacaccatatgaagttactattatatagcctcttcattcactccaaacctattctcattaatttccatatctatttgttcataaatgat

SEQ ID NO: 3467 - DNA, 764 bp, Cannabis sativa
taagtgattcctttacacatatcctaataatggagctcaatattgtctcaaaagaaataatcaagccatcctcacaaactcacaatctgaaacgttacaacctctgccttttcgatcagctcatccctaatacttatctctccatcattctcttctaccctatccacaatgatcccaaagacctcaccacagaccattccaaagccataacccaactgaagaaatccttgtcagagacactcacattgtactacccactttctgggaaaaccaaaaataatctatacgtagatgaattctccactggtgtgattttcatagaagccaaagtcaaatgtcaaatgtctgagttgttccaaggagaaaatgagttacagaaccaactagtcccatttcaacccttttcccatgaaaaaacagaggactacgttcccataattgccttccaattgaacatattctcttgtggaggaattgcactcggcatttccttgggtcacaagaataacgacattgcaatgctaagcaattttctcaaatcttggtcggctatctccactggttcacctgagaaagtaataaagcctgatctttcttcccctgctatttactttcctccccgaacaaatgatgatgatgatgatgattttctcagcaagtacacatctttgatggatcgtttatggttcagcgaaggagattatgttacaaagaggtttgttttcccagccaagtccattgaaactcttaaacaaaaggcgaaa

SEQ ID NO: 3468 - DNA, 4891 bp, Cannabis sativa
tggctatcatgacatgcagagtatatctaagtctgtaatctttaagcctaaggtatacattgtgtcaaggttaccaaccatcatccaggaagctcttctacaagagcagtgaaactgtgccatgagagatgaggtcctagctcttgttacaaatggaacatacacacttgttcctttacctgcaagaagacaaccagttgggtgcaattggatttacagagttgaggaaaatcctaatggttcaatcaacaaatataaggcaagattggttgccaaagggtttcatcaacaactaggatttgattttactcagacattcaatcctgttgtgaaatagtgactattagaatggtattgaccttggttttatccaagaattggactgtgagataacttggtgctttcttgaattgggatttgcaaaaagaagtgtacatgacacaacctcttggttttgaaaatccattagcaccttatctagtttgcatactccacaaaagccttgtatggcttgaaataagcccatagtcttagtttgataagttacagtagtgtcttgtatcctttgggtttgtcccatccaaagctaaccattcattattcattcaacattttggctctttcacaactctagaattggtatattttgatgatattatggttataggtagtcatccagagatcattttaggactgatcaaagctctaaataattagttctctctcaaagatctaggaaggatgagttactttcatggcatagaagtgtcatacactaataaaggtatgtttttatctcaatctaagtatgcaaaggacctattgggtcgagctaaaatacaaggggaaaaaaatcatcatccacacctatgactagtggattaaacttgtaagcttatggaagtgatctagttgaaagcattcaattgtagagattcattgttggagctattcaacacctcgccattattagaccaaaaacttcatatagtgtggataaagtatgtcaattcacgcacaattctcttcaggttcactggatagttataaagaggattttgaggtacattagaggcataattgactatggcttacatctaaaatcacctactgatatggaccttgtagccttctatgatgcagattgggctcttgatccagatgacataaggtctacatttggttttgcagtctactttggatccaatttgaccacttggcaaactaagaagcaacatacaatacccggatcaagcactgaagcttgatataaaagtcttgcaatcacagttgctgagatcatctgcctgtattctatgctttcaaaattacaggttcatgtaccaaaagtccctacaatctggtgtgataacttaagcacaatcatgttgacacttaatattgttcttcatgctctctactttcttagggataagattcaacaagacctcattcaagtgaaatatgttcctgctatagactaaatagaagttggtctaaaaaaagctatctcaagttcgaggttctctacctttagacccaaactcacaattaaattcaactctagtctagtcgtaagtttgagggggcatgttagaattagagttagctatattagttggtttctgctagtatgcatgtcaatcagtcggttaggtttgtcattgttagttgtaaactagttgccttgtctctaatattataattccagcttgtgtaaagcattgtatgaatctttccaagcatgtgattgttaattagagaatctttcattcatctttggatctctttgtctctctttaatctctcaatcttctctctgcttatcttttttattttattgctttccaaatacaatatctaagaaatttattattcttattcaccaaaaataaaatagctaaaaccccaagggtaagtgaacaatgtgaactatttatatattaattaaaagattttctattttatttaagttaacaaaattttgaagggttaaattatgtttataatgtttccttatggtattgacgaagaaaagaacattatattgatggttaacaaacaaagttcaacagactctttgtcctttctccaaagttttgccttcatcgctaaggaaatgccaatattttctatcacttaggtcgtgctccgacatgagaatttgtaggcaagtatgttaggggcttatgtttgttgggacaattgtgttttgtggagtttattggtgttcgacaaccatgaattctttggtttgtgtgtcacaaccaaagggaagaccatctcaactactttaagggtccttggcaaaaaattataaatggacttcttttgaaggaaaaaaaaaaagcatattatttggtatataatggtaaaaatataaaataaaatatttttttttaaaaaaaatatatgtattagaatttttgttctttcaaaaaacataaaaaaaaaattagtaattttgaaagatatttggggcaaagtagtaagccttggcatcaaagattcttttcaaatatgcagagactttcatttatggagcttatgttaaactcttatttgaacttacaataactttgatatttttctaataaaaggcatttacattgtaaaaccaaacttgatttatagattgagttttatcacaagtgagtatctattaatatttttatttttaaagttggtagtaatatggccatttggagcacatcatatatccaaatagctaagtcaggcacattaaactttcaaagaaaccaaataagtgtattttgtgacatgaatcactttggaaacttgggtttaaggaaatatagggcttgttttgcattggtttcttgtttcaaaattgtgttttaacaaaaacataatttttgaaaatataagacgcgtttggttaatattttttaaaagctgagtttagattcttaaaaaaaataaagaaaaagaaaaaaattacttcaacactccacacctcgacatgaactctaacccagcaaagaatcaaacattggaccctaggcccaagcatggactccggacctggacccgaacttagacccggactcagatccagacccaaaaaaaaagataagagaaaatgatgagaaaaaagtgttatgagagaaaataaaggaatttttatacaaaatacaatatttctttgaaacttaacatttatattgtgataaggaatattttatatttatattattcattatttttatttactttttctatttattttagcttctacaaaatttttttgttgttctttccttctctctctctctgtcttttctctccggtcaacctctcttcttcttctttttttctcatactaatctttttttatctttatatatataaatatataaatgtaataagtgtaacccttcacatatttttttttatttaatttttttactttgtcacaaaattttattttattattttttttaaaaaaaaaatattacaagcactcattctgtatctttttctctcttttacgttttcttactacttacacttaaactatttggtactattttttttttttaattaatcacactttgtaaaaaatcttaattaattacttttaacctttactaaaataaaattattttgcatacatattttttctcatatgtatatatatagttttcacactctttcactctcttccaaaaaaattaggagcactcttcctatatctttctctttctttcatgattaacaaaagtagtatttttttggatgttttgtagtttattcagagttcatctatgaatgctttgcatatttcaacgatgtcaatgtcttgttctttattctgtcacgttgtagttgtcttttgttgttttataattattttcatatttgtttttaattattctatagttgtgttatagttgtttttctgtattttttttattatacaattatttttttgttattttttaatttatgtgcatttgtaattatggtgtatatttttagtttattcttcacaattttttagttgtatatatgtaattttttgttttgttatttttatgttgtgttttagttattctgaagtggttttcagaatatttttttgttgtatagttatttttatatatatatgaatttaacgttagacagaacaagaaaaaagatgggggaggggaggcgtgcttgtaaatgttgactccacctcatttgttgggcctacaccaaaataagagcccaagaccgataatgttttaatgtaaaaggcaactcatcaaaagttaaaagctttttacaagggaagtgaatccttgcaaagtattcttattatctatttaaactggttattaccctccctactaatttggtaagacttaattttttttttgttctatcaatcattatagatggataatgaatattcatttaaaatgttaatcttggtatagtgacagtaagagtttgaaatgaataaattttttgcttaatattagttttattaattttcctttcgatgctctgttagggctcgatcctgagctctgttatttccatggcgggtcacggtcaacctaggaagaaagttgtcaggggacacgatggagtacgactaagatgatgagaaaaaaaggatcaatgttttcgaacaaagttcttaaaataaagtcaatggaggaaatcgtaggggtttcaacattctctatttttaggagatgagattgatgaggaagatgaaatggggacgaaggggaactggagagggaacaggagactttatctccttttacaatactaaaacatgctcaacaagagcaggagatcaaatctgaattttctactaatctagagaagacgaagatatgtgaagagaaagctcgatctggtaagaattctc

SEQ ID NO: 3469 - DNA, 2234 bp, Cannabis sativa
tgaattttcattttaaatatcaagctagtaagcctgcactttcttgaattaatgttttaataattaaattaaaaacagctattttgtttcttgaaaattctgttcggtgtaaatcatactatttatatactgttttgacttctcagtttagtatgaagtctttatttatttgtcagagtatctagcaagcttctgatgtgaaatgcatttggttaaacagatgtgtcagatttgcgacagaggttgctggggttcaagatcttggcatgctaggtcgcggaagtggagaagaaattgggacttatgttgaaaaactgatgacaagtgaactttcaggaaatgtgatagatatatgtcctgttggtgccctgacctcaaagccttttgcatttaaagcccgaaattgggagttgaaaggaactgagagcattgatgttactgatgctgttggctccaacatacgaattgacagtagaggtccagaggttatgcgcattattccgaggttgaatgaggtagattttctcaatcttcactagatatacatttttattgcatggacatatttcagatgtcgagaggtttatgcttgccaagtttataaagttatgttagtcatagatggctaatcaaattgaagtatgaactcgattaacttttatatacgtttttgtctcatggataaactatggctctttttcagttgaatcagataaatcttgtatgtagaatgctatgcattatcaccatgtgttatggttgcaacattctgaggtctatactgcatcactgtattaaaatatgcactttccagccacgtcgcacactttcggtaccaaatttagtcgttgacattcactatcttatggatattttcacacgggcaatttttgaagctctttagttggagttcatcaggtaaggtacagaaattcggggtttgtgctctataaggcactgaagtgtaaggttaggtactgaagtgttggagtatgtgggtaatctttgactttgcttgactgagctacttgtcagtggccatattgatttgcattcagtattggtagttgaattatttgtagacccttgctttcgggtttcacaaactagattattctattttttttccttcaaatttttaatatcctgcagatggatttaaacctgtaaattgtttaccaatcatataagatagacgttttcctatagatattttttctaagttgttgggtatacagtagaacaaccagtggaccttatgatgttcacgggctacacagttgttgggctatcaccttcgaaacatttttgagctttccttataagcaatagtgtgctaaggatgtgtacatcgtccatatagctaagctttgaagctgtttacttgggctgttctgtgttaaatttgtttttcatctgttgcataacataaatgacatgatatcagataatgctaatttctgctagtgggttgtcatgtgttaaagttgtagtgctatttgccacctatttcaggatattaacgaagaatggatatcagacaagactcgtttctgttatgatggtttgaagaggcaaagactaaatgaccctatgattcgtgatgctgatggacggtttagagctgtgagttgggctgatgccctttctgtagttgctgaaattgtcaatcaagttaaaccagaggaaattgttgggattgctggtcagctatctgatgctgaatccatgatggctctgaaagacttcttgaaccgattgggatcaaacaatgtgtggtgtgaaagaaatggttcatacgcggatgctgatcttcgctctgggtatctgatgaatactagcatttctgatcttgagaagggggatgcttttctcttagttggtacacaggtattgtcgtgacttttttgtttcatttttagtatagatttggtatcaaacgtatcccccctattgtttctatggataaatgtaacatgctgggagtatgtttatacttacaaatgtaattacctgaatttatttatctaatgtctattgcagccacgggttgaagctgctatggtaaatgctagaattcgaaaaactgttagagcaaatcatgctaaagttggttacattggccctcaagctgatttcaactatgatcatcaacatcttggcacctctcctcagacactagttgaaattgcggagggttgccatccctttagctcagtcctcttgaatgcaaa

SEQ ID NO: 3470 - DNA, 1175 bp, Cannabis sativa
gctaaattaattttatgtcagtgttatattaataaattttgtaagtaaatgatcggaatgcaaatataaaggaatatttttaaagatttttatagttctaggataatttttcgaaaaattctatttattttgaattttatataatatttgttgtatgacaaatatactcgatgtgagagtttggctgattaagacaccactttggtagttggctagctatagtggctattatactttggtgactacagtacgtagttaggaaaaaatgttaggactactgatttggcaattgatgttgacttgtccaataccaaaggtaataaggccatctttttctccttgaccccttgagcgtcgccgtaagacatggtatggtggaagccccgcgcgcaccttgcaaggctgccatataaccaaaagtttgatttccttcatatcaaaaaatgaaccatcaacttttgggccttgcccattcttttcaatctatacaaatgaaaaactaacaagaaaaagacaaaattagaagaatgaagtgcatttattttatactacggatactgttgatacataatgttactcccagtcttatcactggagactcgagtccagtactcacttatatttgtttcaatgattaataatatatgctggtgagtgtgacaactaatatttgaaaacatatatttggagtttgggctacacagtatttacgattgcaaaattgtaaagtcattccaagttggattgggttctaagatatggtgaagactcaaaccagtggtgagaatggtgggcaatggcagagcatttgtagcaggacacacctatggctagtggtgtcatgtccgggagcaatattaatgagtttatcttagtattataaatcatcacaccaaataaaccaatagtaatattgatttaatttatatatagtaccaatattacaccatatggtatcgatgtccccttcaatttttatattttaacataagctatgagagactcggagttgagttagaatttaattcgatatctcttgttaaaagaaaaacaaaattagttggacataacattatcatttgatgaaaaatttctataagtttatggaaaaatcttcacatggacatggtagtcctttccataaaatcaagagtaactttttggtgcctcataaa

SEQ ID NO: 3471 - DNA, 960 bp, Cannabis sativa
cagccgcagccgcagtggctgcgaaccccctgggacggcggggctgggcttgggcttgggtttggggctgaaagtgagacaagtagtcggagctgtggtcgctttgcgggtccagatcgtcattcatgttgaatctctccagatgtcaccacttaccagcctcacatcacattcactcactcactcctcgactaccggcctacaagcctgcctctgctctgccctactatttttttatttcttcagccatcaagtgtccgtgctttttaactaaacaaataactaattctaacactaagtgttaccaaacattttggactctttgttttgcaaagttacagattaaaccttctcttttgttaaatagtaaaataaattctgttttttctaattttttttaatataattaacttgaagacaattcctaatacgaaaagcacagaaaatgtaaacaattttatcataatacatttagatcaaattattattaacttttattttgacaaaaatttagttcaagatcatatttgtactattttaaaaaatacaagatctattttttcatttaacaaaatagaaggtccaattaataacttttacaaaacacaaggtcctgcaagatatctacatattttacttttattattattattcttatgaatgactacaaattacttttgagtttggcttagcatctcctgttttgaagtttgttagcaaacaagttgagcatggtgcaggctcttagttgggaatgaggctattgtatttcgattttcagagacaattatacaaaaagaaaaaaccttctttctgctaaaggatcccagtgaaaacgtcgtggaaactggaaacaatacacaaatgcccttgagtcaagggggaaaaaaccaaattgcttttccatacacttaaaatcttggttattatgagtactcaaaggcggtttttggaagatca

SEQ ID NO: 3472 - DNA, 1023 bp, Cannabis sativa
aaatttaaatcaattacagctctatattatttcaggtggggtacattgatcatcttgagctactgaataaacatgggagaacctctttccttcaaagcttcatgagttttttcatttcattttaacttttagacagtttgaacctcaaaaacatttattattgaaatgagatttgtacttcacatagatctaactatctcaggtgtatcggccgttcaggttgtttatttaataaatcatgtcaattccaacgctacctgtcacagcccattatctagaaattaaaagcatctgatttcattgtttggtagggattaggcaatgttggatattgaatccataattttaaccaaatttcaatatctccaaagtcaagaagatctagtaagagaaaaatgtccacttcagaaggtagggtagtcaatccataaataaactttcttaaatttttctctcataccaaacgagtaacacaattctcgttttctctcctttccacactaaacacaacaagagaagagcactaaggctcatctccccattctctcttgttttatacctctctttttatagttttttctcttttgtcctaccaaacacacacgaactaagttagcaagtgacgttaaagtttacagggatctcacaccaaagacaatgaagtactttccacccataggacaactttaagctcaaattatgcacaagcacttaagggaagagagagaatgataggacattaatgctcatctacagaatcaatagaagaatggaaatcacaagttaaaattgcttgtcttttcctccactcttaatacatttttatttttttgtcttttcctctattttatgattttgttttatttttgattaatttattaataaattatactaaataattttttcacttattattttcctccacttgtacattctgattttttgtttttttcctctattttatgacttagtttaatttttgatataattaattaataagtgttataataaataatttttcct

SEQ ID NO: 3473 - DNA, 1480 bp, Cannabis sativa
attattcttaattattttgttgtgacagtagttctcgaagtagtaataatattaataatggaagaagtgagagatcaaacaacaatttttattccattcttcaacaagaccacctgggtagcgccaagttgaattacgaaaacgattcatcatctcaaatccaaaaagattgttggacaagttgtaccacagccactacagctactaatcctccgcccaaggatttctccggcgacgatatcatggacacctccgcaacaagccaagccttgtccgccggcttcccggtatcctcgtctccgttcgagtacacgtcagcaacattgttgcaaaatttgtttgagtgtgaaactacagctactactactacttgtacagcaacagcaacaaatcaattggcagcacacgaacaatcttttggaaatagcaatattaaccaattatcagtgaacatcactaacagtaattatgctaacaataataatatttggccaagattctctcccttaatcctaagctctcgtccttcggcgccgattccttctccttcagaagcttctggcttgcacttctccaacaatacacccttttggaatgcctcttctttgcctgctactgctgctccaaacgacggcgtttttccaaattctatacaacaatcccaggcccaggcacagcagctacgatacgttacaccaaagtttgaggaaaagcaccataaatgtaacaattatgtcacaaataataaggtatatattatatatatcatttatatatagcattaataattatattagattgatatatatatatatagaggagttgtatattattattaattgatatgtgttaatttttggtttaaatattaattacaggctaattctaatatggaagatattcgtcatgagtcggcaggatcagtttcgaagaaaagtagtaatagtactactgggaatgaccaacccatggtgaagagacctagaattgaaacgccgtcaccgttacctacttttaaggtacgacatatatacatatatatatttattattcatttaagctttttcctccattattattgctatttattatttttcttggttcttcgaaagggagaaggataagaattctaacttttgatgtattaattttaggtccggaaagagaagttgggggaccgaatcactgctcttcagcaactcgtttcacctttcggaaaggtgaaattttggagttttcttcccgtacaacttttatttttggactagcacaataaatatgtttggattttttttttcttaaaaaaagggttgtttatagctaaattaaccttgaatgattattatgtgtttgttacagacggatacagcttcagtactccatgaagccatcgaatacatcaagtttctgcacgatcaagtcagtgtatgtttgatcagtaattgctacaaattattattttacattatatgatattgaa

SEQ ID NO: 3474 - DNA, 914 bp, Cannabis sativa
atatatatatattcataaatagttgattttgatataaaattatattaataataatatttttttaaaaaagaaacaatataaatattatataggattacctctttgctccaattggttttgtaaaccatccaaaagagaatacaagtttggagcactgttccagacagcattccataccaaattccctgaaatttatatacgaaattataggcaacaaaatgcttcaatattattttagactttaacaatgtcaaaataatatacatcttcaataaaataataaaaagagaaaaatctaatcatacaatttttaagaacgctatagaaaattagatgatatataatgctcactttgcttttttttttagaaactagaaaaagtgcatagtataaactgggattcccaattcgtgcatgtatctattgttacatttgggatatattaagtcattattttttttaacatgattcagggtacgtaataaaattgaacaatttttgttccaaacaattattgagttgataaccatgttgcaagattaatatattaaggaattgtcataaatatttacatagttttagtaaatccttataggttatgtgtagtgatatttaataaatttgtaatataattagtatcagatgtagagattataattttgtttataataaaattctaaacatgattacttaccctcacacccatgtcgagcttgtagcccaataagaggcccaatggaattccaaaaatatagtaacaagcaacgttgacataagccacaactgcttgccacccagctccaattgcaacccctgattttccattaaaattagtatattcatatatttaaaagggtcaaattatatactatattgtagaatattagattaattattattataattaccagata

SEQ ID NO: 3475 - DNA, 1591 bp, Cannabis sativa
  modified_base (1522)..(1536): a, c, t, g, unknown or other
aatgtaaattttcctaatttttatgggttcctaaatatataatttagtataaattaaattttaacaaaatattatacaaaaatatgatatacatataatccaatttaatataatacaatataatacgacctaatacaacgtacaaaaagagcccttaatgatttgctgtctctctattattttttatctgtgtagatatgtttgtggcttcttttttagtcttctttttcacttgtgagaacaggatcatgatcttctaattttatttttggagcacatgttaatttttatgactatcatcatcatttgtagccttcccttttccttgtaatgaaatatttaattttcttttagaaaatatacaaaagaaaaaataaagccaaagcataaagtatcaccctttaataaatgaagacaaagtaaccacttacaagaaaaaatttaatatgtgattctttttttttttcttttttgattactgggcttcgcaagagcaccaaacacaaagaacaacagaagaacaaaccacgaaaccggccggtcaaagccggcaaaggacaagaccaaccccaatagggccagcaacacaaactaacaactaacaggattaaataagttaactaaaacacttaaaacactaaaggataaacagttccaacaaaataaactaaatgaaacacgaaaaaccatctactcaactaataagaagggaactgtcaaaattggacaggtcgatgctcccaaaatgatttgcatcgagtgcctacttggctaccgcatgcgccacaccattaatcctttgagagatccaagaggcctatcagagaccaagttgattagcagagttatgaaacaatttgaccaagtcctgtacatatgatgaattcttgaaccataatattaagtgtaatttacaataatacatacactatataattttattacaatatatgtgcataataacttattttcatacaattacacattttatttattacgaagaaaattatttttaattatgatacaatgtataaatggtaagtatatatttaattgttggatttattcttactcattataatagttaatgaatgatgttatattaataattttttatataattttaaataattttaaacatcaaccattattataaatattgaaagtttgtatttagattaaatcactatttaattttctcctataaaactattatttaaatacatactatatctaaatacaatatacacaaattatttaaacatttatgtttataaaaattataataagaagattaattttttttttgattttttctatttatttacaagtgttttcttttgatttgtatttttttttttattatttgtgttataaatgtatgcaaatttttttgtttatattttgttgatatataatcacattttggtttattgtaaaatatatgattctcaatatgattttttatttttttgaacagagttataaataatttttattttttccataaataattttgtgnnnnnnnnnnnnnnnatatgcctatatacttatctacaatttatttgtttactttttctaattaaataat

SEQ ID NO: 3476 - DNA, 751 bp, Cannabis sativa
ataagcatgaaaccataatcaaatatcactaactcaaataaattccaataataacaaacaactaacataaataattcaatatacaagcatctaatatttctcaggtatttgtctaataagacaagctaataccattacttaataaagtaactatccctattgtttcctaataaagcaaacatgacaatcctaaccaggcatctaatgtcattgtcattacctaatgaggtaaccaacaagtaagaaacctaataacaatttccgattgtagtcatgacttacagttgtttgatgaaacaacttttcctacattttcctaataaaacaacctttctaccattgtctataaaacaatattttcattacataatgataattaccatatctatataatcgataataattgattcacaaacgataataatcatagcttatttgacatgctaagtggtttgaatgtacttttcttacctttaatttaaactcatccatgccgaccaacctgagtggagaaacgcccgacgatctcggcccttgatctccccttagcaattcaacctaacttagctaaaatctaagaggaaaaaggaaaagatttagctctaaaattcttttgttgatgaggttttcttgggtggttcttggccaaaagagaggaaggagaagagagatgttgtgtgaattttttttctaacttaataaaaggatttaatgatattaagaataacccatttcccacctaatccaatca

SEQ ID NO: 3477 - DNA, 1177 bp, Cannabis sativa
tctgtgaacacccctgaaatgagataatatggtcaaaacttcttccatggtagtaaatattatattatatatgttgaagcacttgaaatatgttgtaacccaagtagaggatgtacatatgagaaggtctttgtgctaagaagaagaggtaaacaacataaagctaatctaaagaagacattgtgctaagaaaaaagatgaatcccaatgaaatcagaaagcacaaacaaagcataaaagagaaagtgactaattggctaattctaattgaagtaaacatttaaggaatgaagattatggttctagaaaacccaataatctaaaacatgattagaactctctccaagctaatgtagagcaaatatcaagaaagtaaaatgttaacttctaccaaatatagatatggttctaggaaggcattcttgtgtttaatagtaaatgagattgtcattctatagcattttccttagagtccaagttctctaacattccaacatggtctttatgataataatcgtcatatttcgggaagattcgaacttggaacctcataaaacaaagaggagtagtaccattaagctaaacctatgaaccctcatatttcacctcattataacataataaagatttatgaagaccaagaaaaagtaaataaactgcacaaacatcgtacctggatcagattcaattgtgcaccaagacattatgggaaattctacacctgtcatgaaaaacacaaaaaaaagacataatgaaaaactaacaaaaactagtaaacacaatttgctataacatttaagtaaaagattacttaatcttcgaagcaaaacataaaattttcaacaacgaagtaagtgacatttgataaagatttaagaacaaataagcagtctcatcattcatcacgaaagaaaacattttgagaaatcaacttacaaattacaataacctaagatcggttacataaagtaaaatttctgggaaaaacatataaatagagaaatgaaaaatgaaaagagttaacataagataataagagatgaaatgtagggaaccggaaaagtggattgatgggagaacagaggcgccggcagagaaagaatttgggaaaagagtatatgagagagccaactaagaagtgtacttgtatttgtctgaagaccaagaacaagaacaa

SEQ ID NO: 3478 - DNA, 703 bp, Cannabis sativa
aaaattaatactaaaaataaccaaacagatacttatggtaatgttccaagtgggagctttaacctcaccacctttgtattgctattttacacagaatttaacatcttgttttccatctcacaaacatgaatagtttagaagatctcatatgcagtccatttggccccgccaagtgtgttaataaaagaaaaactcctgtggaagtcacttctgagtcaaaaccaaaagtttcaaagaaaaccaagaagactgccaataggaagtctgcctaggtcggcatatccattggacctgagaaagtcgcaccaacaacttctatcgtaccagcaactgagagaattggtggacaacctttagggtctcttcattaggttaaactcttttggtctcaaccagagatggctctgttggagccttcatgccccctgccaacatatgcaggtgttaagggttcccaagcatgctcaatgtatgctacagaaagttggtgccattttagaaatttccaacatgaagattgggattttatcaacaaaggtgattaccaaagccttatgacgagcagtgtagatcttatgcagttggttagttcaaaaatcataagaaactatatttatattttttcttaccttttgatcttctattttgacctctttctatacaagcttccttcttatccttcatggctcaataaaggggcttt

SEQ ID NO: 3479 - DNA, 1858 bp, Cannabis sativa
aagagactccaatccaacattgaatcattaaggcaatgcagccttcaaattgaaccattaagtcatcaggattgtacgggtgcaatacctgtcatattattacattatcaaatatcaaacattctggccaaatagaagaaataaaaagcactaaataaagcacaaatcaaaggaaaaatatgcatttcaaaatagtgcctcctataacctaacccaagacagaaaacttgaaatttatcttcttcatgaccccaataatttgaatgtccaattctgataagtctcattttcacaatcaccacaaaagatgaggaattgttatgaatgtctttgaagaactctaattagattttcaagaacaacaagacttcaaggtcgataacatttgatacattgaataaataagaactagtaaagtttaccttttttcggtctatacaagaagttatttggcaccagtaaagtatcaactttctcagacacatttgatagactctccttcttgcaaaccatcgaaatcaccaactcccaagtatctacaccaatcgaattcgcatttcccaagctactcaaaactttcaccaacaacttcatatcaccttcctgacacaacccatcaacaattttttgtctaccctcggaagaaggtatataacccttaaacaacatctcatctaagaaagttgctgcttcattaaaccttctacaattacataacccaacaaacattgttctaaaagaaacaacatctggtttgtaaccaagtcttggtaaatcttcaaacaaatcattagcttcactccattttccatccttacacaatccaccaattatgatattataagtaattatatctgctttacacccttctttcaccatctgatccaaaaccttgtaagctgcatttaaatcattttccatacaaaacccatgaatcattgcattgtaagttacagtatcaggtttcaagccagaacctttcatctcctccaaaatcttatgagcttcatctttcttaccaaccttgaaaagagcactaataaaagtggtgtaaacagtcaaacccaatgtaactttttctctttccatctcatccttaagtccaaaagccaaaccaaattcaccaatcctacaaagctcttttatcaaagatacataaactgatgaattgggcttaacaccataaactttactcatatcttctttcaatctcaaagcttcttccagcttacaattcgagcaaaacccggaaatcaaagttgcaaaagtcacttcattcggttcaacacctctgctaagcattgtatcaaacacagtccgtgcatcatccaaacacccatatttacaattagcattaatcaatatattaaaagtacaaacatctgggttgacttgatttcccaaacccaccaagaattccctcatcttaccaatctcgccacacttgagaagcgcatcgagcacagcattgtaggatttcaaggtccgcctgcaacgaaaggagggaatttgctcgaacatttctagggctttgtggggaagacgagccctggcgtaggaggaaatgacgttgcaaaagattatctctttagtgacgaatcgggtttctcgtcccatttggaggaggatttggtccatttgatcgaacattttggctcgagcgagcttggtgatgataatgtcgtaggagaggagtgagtagcggaagggcttggtggattggagttgagggttagggttttggaagagctggagagcgagatttgggtccttctggcggcggaggagggaggaaagccggtgaggagagatggctttggggacactcatggtggcttcttcttcttcttcccgccaa

SEQ ID NO: 3480 - DNA, 1149 bp, Cannabis sativa
cttggtactctgcctccgagagtcgtttatacgacggggtgactatcgaacggctgctgcccgctttagacgctgtcgaagtcaaggatcccgacgaaggggtgtaaggtcgtgatggggtagatgacgtgcttcgttgcacgcctgaagtgaaattgaatttcgatggagagtgagagccagagttgaatctgggattgtgggtcttattcaatggacccgtgctcattaattggtgtccttcttctaccctttgagccatgtccattatctgattcagtccaatgggctgtaacatgtgcaatgctgccttaatgtcgtccttgagccctttaacgaaggacccttccaaaatgtgatcgggtacatcgggtacccgggaagccaaaacttcccactggattcgatactcacgaactgtccccgtttgaaccacggacaaaaactcttccgataacgacccgattggaacagctcggaaacggagaaggagcagttgtttgagcatcgcccaagatgtgatcggtcctcgctggttctcccactgaaaccacgacagtgcgtcgccgtcgagccccacaatggccgtatccaacttcatgggttcagacatcttcgagagcaagtaacgctcgacacggcagatccagccatcggggttctctccgttaaacacagggatctccattcgtgggggacggtaatcaaacccatacgcttgaccggactgaaacgtcccaatctgaattgggggtgatgtcgaattaggaaatggtggtgttgccatctttgcagggaatttaggcgaaggataagctcccccaaaactgggttctccgactgagggcccgctgccttcgacagctctcctttgtcgatcggcactcgcagctaccgcctctggcgagggctttcccggaggtaggaggagttgagaaatctgacttaccaccgtttccatttgccttgcgacaatctgctctatagtgatctgaatatccccctgtaatttttccaacccttgattcaccttctgcacatcttggcgaaggtcagacacctctgcttccacttttccttcaatgagttctgccatcgaatccttcttcgaccccatgaacagttgctctgataccaattgataggaat

SEQ ID NO: 3481 - DNA, 1142 bp, Cannabis sativa
ctcacagctccatgagaaatgttgccaagagtgtaaatcaaaaaacccttttactggttggccgatttcatgagtgaatcgatagctgtgtgaatcgagcttcgacgagaagtattcttacagtgaactaaagaatgaggtcctctccatatggacttgggattatcagggaatagaactccacacaaatccaaaagtataggattttccaaaagcttaatctggttagctttaaattttttatgcgattcttcgatttcctgaaacaaacaaaaattatcataaactctctaacatgttccctcaagagaatcattatgatattacttaatgaataccttattcttatgtcgatcaacatctgtcgttagttcctcatgctgcattgttgtgtcttcttttcgatgagtatcggattgaattctgtcacccaactcctctcctattgcttgttgagatcgtttatcagcgtcctcgcttgatttatcaaactgctctggtgtttcaacattttcttcatttgccacctccacgccattctctccatctgcatcatcatcatcgtcgtcgtcatcatccccctcctcatcctcgtcttcattctcttcctctttttccttctcagccgaaggttgcgattgctgcttagattcctccattgtcccttcttttctttcttccccttcagcagttgcatttgggtctgctgaagattcatccatatctgacgatgaattttcaccagaagggctttctgccggtgaagattcctatagaacaaacgaaatgaaacaaaatactaaagcaacttcttcctgcaactcaattggccggccttaaatttcccaaacatctcaaaagtaaataaaaactgtcaaatcataaaccaattgttacctcttgcttcaactcttgagaaagattattatcactgcctccaatctgacctttcgctattcgatcattctcctcacgctcccttctacgacgctttagaacacatatagcacataaacaatcggctttatgacgccttctgtaagaaaataagacacaagaattagaacaacaaactctgcagtaaacatagcatagaatagtgagaccagcaagaggggttagttatcaagcacccatatctt

SEQ ID NO: 3482 - DNA, 1362 bp, Cannabis sativa
tattgatcaaaagaaataataataacaataaattaaaatgtaccaataacaaagccacatttcgtacctgtcttccatgggtgtagtagtcttgaaccaaagttatagttctgtccaaaataacaatcagaagtagaattaataccagaagcacagttacatatgaatgagttgtaaggtccagtgtatccacacactccataactcttttcacactcggcacaagttctaggatactcattataaacactaaacttatatttcaaagccatcccatacttccaactatcagggtcagattgtcttccattaaagctgtaaaaggcagagtaagaagagcacttcaacttctccaagtccatgtcgtatgccggcccgagatcgacaggtgtataaacacagcacgtagagataggaaggtttatagtactaatagctctacaagagtataagaagctgcatatgggaactgttccttgattatcacacagtgggactttgtactgatcagagccgttgcctccatcggaatggtaaattggtgatgaagaaagagaacagtcaagtaaagcgaagactgtttcgtcatggaatgagaaaggagcatcggagtcaaggccaaagcctttggagggttgagtgttgatgcatgagcatgtagacatggaagggtctgagatgtaaaggacttggttgacgtagtctatagctgtgacttggtaacaaccggtgtgagttgtgagggtgagttgctcttggccatgatcgtctatggtgttgcagctcacgtattgttggaagcgggggtcaccacagccagggccaccgccaaaggggaacttcagagggagttttccgcaagttcggcggcaggtttgggatgagaccatgaaaggaagaaggagaaggaggaggaggagagaactggttggtgtcgtcgtcattgtttatttttttcttttgggaagagacttgggacatatagtgatattatctgattaaaagaggactctctgaagctgaagctgtgtttgtgtgctatttatgtatcagctgatattcgtgcatgtttctaattttaatactttattgtttttgagtatgtaattgattcattcacttattatttaatattgtttttaaatcatttacaactaatagcatattgcttaaaatatataaattgtaattgatgcttttacagctttacaattgtttatattcatacatatataatataatatatagtatgatcatcgtttcattagtattggacgtgaatttggacattgaagttgtatgcaagtgatgtttttaaatatagagactatactatgatggttcttaggttataaaatatac

SEQ ID NO: 3483 - DNA, 1731 bp, Cannabis sativa
caaatactatcttcttcctcaaactgttcatctcgatcaaaaaatatgatgactaattaaatcctaattttaaagttattttttgttttgttttgtttttgttatcatcgttaagttttgagataatcacttagtagaactttaagtagccagttgagtagaaagaaatgttgactattactattttgtatgggaattgaactacttaaatcaaatgtacttttttcgggggttcgtattttgttgtgttaggaaatatattctattcttatttacttcactaattatttagatagcattgttataaacataataatttaaattaacttttgtggatttaaagaaactctcaattaaataaaatttaatcagagcaaacataattatttgaaatagacaatttaattactttttaagctattcctagtcatttttcaatgttttctacctttagtttaattattcaagactttcaaaatatgcttctattttagagtaattataatttattttttttgtcaaacgatttataaattgagtaacatattgtgtagctaattttttttttttaattatttagtattttaattttttttttttgagtataatactttgattgaacttaaacttttattatattttgattatttaaaaaaaaaaaaaattattaatttatgagtccaattttagtaaattaaataggtttttttttcaactaaataaaaaattattgttttttttataaatataatcacaataaataattgaaacattttaatttgaaaaaaaaaaaaaaaaaagacactaatagataaccttatccacaaactcaaaccaaaaaaaacatgccacgtaagatccctaaaaatacgacacgtcagcagaaaaatctcaccattcatatcgttcttcttcttaaccccaaaaccacactcattcactccatttgagattgagaagcccttcaaaaaaaaaaaaaaaacaataataaaaggaccaaactgcaaataaaaaaatccaatggcttcagtatcaatgaccaccaccaccacaacactcgtctcagtcccacgcgccgccctaaaccgtcccaactccgactccttcttcaaccctattccgataagaacttcaaacaacaacagatctcatcacctactttctcgtcgtctccaagtccaggcctcttcttcctctctcatcaaagaaaaggccgccgcagccctaaccgccgcggcgctgactgcgtcgatggtcgtgccggaagttgctcaggcagcagggaacgatcttactccgtcgttgaagaatttcttgcttagcatcgctgccggtggagttgttgccactgccattattggagctgttgtcggtgtttctaacttcgatcctgttaagagaacctgagaaatcgacgccgccgtcgccgttgccgttgccgttgccgtcgccgacgtatttaaaggtgtattttgtgttttttattatgtataataatactaataataatactatttttgattattaatgacactttaatttgattctttaattgagtcaagaaccaaatttgttgtttgatttaatggcacaattattttgggtgttagtttgaattattatatatttaatcttgaaaattaattattactacaataaattgtttagcaaattaagttttattaagtttacataatagaattttgataattaaaattaaatattgtattt

SEQ ID NO: 3484 - DNA, 969 bp, Cannabis sativa
  modified_base (99)..(103): a, c, t, g, unknown or other
ccgcgtgcttgttgaagaatgagtcggcgactaaggcagtggcttggttaagagaactcgccggagtcgtagcaaaagcgagtcttcatagggcaattnnnnntgcttatggacccgaacctgggtgatctatccatgaccagaatgaagtttgggtaaaactaaatggaggtccgaaccgactaatgtatacagaaggctaattaataattaaggccactatatgtatagttaattcttaaattaagacaactaaatgcaaaccgagttaataagaacacaaaacaaacacaataaacaagaaatagaaattgcagacaccaagaaataaattgcttcccaagacgaaagaaatcgagtaccaattggtacaatgcagtcgagtaggatcaactctaaatgactctcacaagtgtatttctctctcagactcgcactcaaacttgcatattcatttacatattcagctcaatacaaaaccctttgtaaaatcccaactctttcctctttattaccctcttgaatctttctctctcaatctcactctctttcctataagcttatttggtagttagctaggatttataggaactaagaccacaaattttatcgagttccttcagaagccattgaataacaagtatagcctgaagtaattaaacaatctctctgaaatcagtttctgataggcaatctaactaactgtcaaaaccttaactcaaacgtttattttatttgtgatgaatcaaaagcatgatttactttcacatttttaaaccatcaaaccaatatctaaatcctctatattgatatgtcttggaataatactttgtaattctatatttaagttttgttttcagtgtttaaacaattgcagtaattgtcatcatagttaggcaccaaaatgcttcatttcaactcctccataaccagtaagtcaatgttgcgattgctgctgctaatgtgttt

SEQ ID NO: 3485 - DNA, 1084 bp, Cannabis sativa
attgagattaccaccccaaaaaatttctctgatggcttcacaaaaactttgtcccacaatcttccaaaattttctaaagaaattgcctgagaacccgtcaggcctaggagctttaacgggatgcaaactaaacacaacattttttgatctccttaaaagaatggattgttatgatgctcaaattagcttcactgcttattttcttatcaaataagtctccaaaatcagtaagcaacaccagatcatttgaggaatacagatcagtaaagtatttattaataatacctaagatactcttcttatcaacacagagctttccatagttatcccttaaggcccaaatttgatttctcctccttctaaccgttgccgaggtatggaaaagctttgtgtttcgatcccctagctttaaccaaacatcacaagagttctggcgccactcactttcttttctttgccatgcttctaaaatcttcttctgtagctcagcttcttctagcatagaggaatccgtgatctgatgttgttgaattcgacttagacgttcttccagattgcaaataacattgtctacatctccaatataattctttttctaatcttgtaatgctcgtctagtactgtcgagattgtgaagtagtcgcctactagcattcactttagtatttccccaagcctttgacacaactccaaagtaggaaggctctcttgaccaaggatcaaagaaacgaaacggtatgtaacctttatttacaaacatacaagtgtctagccaaatagtagcatgatcagagatcgtgattggaaaatttagcacatgagcattttgataaagagtcaaccaatcatgagatccaataactctatccagcctctccctaatcagaccacctgagaatttcttgttatgccaagtaaaagtacaacctttgaagcaaagatcaataccacccgtattgtcaaggaattcggagagccacttagtatcattcacatcaaccttccttcctccttgtttctcctcagcattcaaaatgcagtttaaatccccaataaccacccactgggagtcgtagaaattaac

SEQ ID NO: 3486 - DNA, 1566 bp, Cannabis sativa
tggcaaagccgacggcgagtgagccgccggctagagcgagctcgccgagccgacccaagaagagcatggatatcatggaacgggaatagagtagaagacccgttagtatcattgggaaagcgattccggcgattgaactggcctcatcaacgagacggaaaaaatgggatttctgtgtgttgttgttgttagttgtcgaagtaataataatttgcgtcgtttgcttcgtttctagtgtagttttgttattctctgcttgttggttctgttggggtgccgtcgttgttttgatgcctttttgaatgagtggagttttgaggccttcgtcgtcgttttctgaacggccatctttgttgtttggaacatgttcgctcgatgaattgcatttgcattcgttgtagctgaccggagatgacagctgacacattttctgctctccttttttttgggtatgaaaaaaaaataaattataaaggaaaaaaaggaatttggtgagtgttcttgttcaaaataagcacacaaaacaccaagtagtagagagagagggagagagagagagagagagatgagagttggaagttgagggggtatagaattgcaagtctcgtgcttttatagagtctgtttgggaatggcttcaaagtggatttttaaattcacttttggaatgacttgtaaacgcttgattatcccattaggctaaatactagaaaaagtatatagttgtaataacagttgaactttggatatatatttttatatattgttatttatataataacatacgtgtgtattttttgttcggtttaacgcgttatgttaagaatagtaaaagagaaaaataattaaataaaatagaaagctgtatattagtaacaacaaacagtactctcctaagtagagttttcgttaaataaataaataataagtcaaatttcctttagctttttcttagagaaaaggttgagcttacggttagttagtatgcttaacagttaacagtttatgtggtagtgagagttcatcatagaaaacaagacaacattccttgttggacagtcatagtatgggccgagttaacaatatacttccaaaagcccagagttgggcccatcatcaatgctgtatctttggttaaagagatagttcgaaaatgacgagtgatttaataaaataaatattatgtgaacatacaaacaatcacacatcgtcatttgccaactcgaaaaaaattgtctgctttggtaagggagtttaaatttcatcagtttgaacaaaagggttttctgtcatcttatggttacggatatatgtttttccaaagaacaagtaccgttaccagcttgctatcaagtcattacaaaaagagttgagcaactgtacttattgctcaagtacgtacttaccctcataacatctattatttatgtcctcaaattggaaaataaggggaatacaaacaaagtggtgaacgtgaagctcccaaaaatgtactctaataaatacttcattttattacacaatttcaaaaaaataaaaagaatcctgtgattgatgcaaccataa

SEQ ID NO: 3487 - DNA, 920 bp, Cannabis sativa
aaaagctaatatcattaagtgaagactttcttctgggccttgagctcttaccttgattgtagcacaagtcgccatgctcataacctaaactgtcccaatattctccaatagcaaatgcaggatttgaagcttcaatatattcttttacaaaagaacctgagaagcccctgtaaacaacataaaagacaccaataaccactaaaatttatgaatataaagatatattctgagtttatagtagcattcaaaactttcccgaacatcctatcatcccaattactttaatttgcagttgacagaaatcatcgtgatacctcttaattcagaaatcatcctagcactcaaaacatgttagatttagatgccatgttcagtcaaaatggttttgagcatagtactaaagaattcaagttgactgagcatatagaatattaatgttattagtagagcagtctaaaaacatgaattcatgctgctatctatcagcatctcgaatattaatgtaagacaaaaatggaatcaatcaccagaaaaaggaatcattgatgacttttaaatgcataagcatgcaatgctctccacattacaaataattttttttttgaaaaaaaataaaaatgaatggtgatgaggatcttatctcatctacattcttttcttagagctttataattgtgatctatgaaaaagcaatcctagaacaaaaatcagcagaaagtgtctgaaacacatgttacagctaaaaaaaacttgagaaacacattaccttacaaaatcgagacgccacccatcataaccaatattatttcgcagccagtttaaccactcttttatatcttttcttacaaactcctgggaatgatcaacatttggtgctgcatgaaatatatcacctatgcaaaaattaagagcaactgagt

SEQ ID NO: 3488 - DNA, 1474 bp, Cannabis sativa
  modified_base (770)..(772): a, c, t, g, unknown or other
ttcatgcacataatttggtcaaatgactcgacttttaccaaacaaagaaaagaaaagatttatggagttggtgagtaaaaaaaagtactattttaagtagttttaccataatagtttttacccgagtgattaatgtaaaattaatgatatgtaaagagtttagtagcgaggtgctttttttttttaatatgaattagaagtaagaaatttaactgatctgaacaaattaataataaaatcacgttatatgttattatacaatgccttacatttatatatgataatttacacaaagaaccattttgtatgattttttacatcaatgaaagaagaaaagaatattgtaataaatagaatcacataaatgataaatttaaagaattaaagaatttttgtacaatatttgatcaacatacgttgtccttagttttttgcaccattaactagtttgttaaaagctttggtgaatttggtgggaacagggcgtatccaagctttgacaccaataaagtctttggtcaagaaaggctcagcctcaaggctcgtaaggttacgaccatattccactcttttactcataactgctcctcgtccataacatttgtattgtccataataaaccgtactacaacaatacaaaaacacaccaaaattaaacaagtagaattaggatttttggtcccaaattattaataaaatttaaagagtttatgttggattaaaatcttattatgggcacatatgtataatgtatatgttattataaagtnnnatataaaattaagtgaccaattatgttatgagtattaaaagggtattaaattatcatggaaataatgtgtagatactgtaagttaatttataatttgttgatgggtcaaattcataaatactcaaaacttattatataatgagcttataaatagaaagataatgtattcttgtaagatcaaacattctctgtaatctccagcaatgatttcagattagtgtttccgcttatcttttatcactattttcttctttaatttaacaaaagctacatagatttatgatttagggttttctattttaaggtgcttttaatgaatatgattaattatgtgatatatacatttgttaagtgttttataaatcataacagtttattcaaatatacctgtgtgtgtctgagtttccccagtcatcccaaccttggggcagtatagcacttgatatgtaactgaaagcaaagatgacccttgagtaagctccccatggccttcctaacaaggcagttctcacaccagagatgttgcaccccaagaaaacgaaccccgtctcctccgatggcgactgccttcgttgcgctgtgattgatccagttccttctgccaacgaatgaatatggcatttctgcaaatatacatacattcttataaaagggatgtaccgatacacctctatctgattgagcattgaaaaaatatcttat

SEQ ID NO: 3489 - DNA, 1091 bp, Cannabis sativa
ttaaagtaatgggcttggagcaacgccgtcgttggcataacgaaagtaacgttgttgatgctggcgacgactctgcttccgtttccggctttgcaacttggacacgggtttaccccaaggcctactgtgaacagaagtttgtgatcaatcgttaatggaacttttgcagggaaggtgtttgagttaatgcttctgagagagtctgtgaatttgttggctatttgggttgcgtttttaggaggtgggattgttatggtggttggggagtttgataaggttccggtgtagtggagagttgcggtggctgtggcattgtcaacggcaattggagcgtccatgaagggagaagcggtgactaagtatttgccggagtttttgtccgcggttactaaaacgtttgtggtttgtcccggggcaatgacaatggtttcgatggagaagggctttacgtagagtgcgtcgacttctacaacggttagtttgtggccggcgattttgaagaacaactcttcattgagcgcagcgttgataatgcgcagtaggtatgttttaccggcatccaccggcaaggtgaagccacctgcatgccacccatgttaattaaaatcacaccaaacatatcatttaaatccaattaccaaaatagaattagacttgaaaaagctaccaattgtaatatctatgccacaaactaagaatagttttaagttgagtgaaaaatggtataggcaagtgaaaacaatatggaaaattcacacgtagaaaacttaaacagtaagcaagactatatatatatatatatctactactatggtccaaatattaatgttatgtgacaatattacatatatatgtaatagtttttacactaaccttgtaaagaacaattggaggcaggccctggatgaccgtttatagtgtgagcatcggacacatttggtgccaatcctgacttcagagcttcgttgatcacagcttcagtatccgatttccaccattcagctgaaagcaacaataaaacacacacatatatatattattaattcttgatttaattgatatcaattaattaagttgatgatgatgatgat

SEQ ID NO: 3490 - DNA, 1710 bp, Cannabis sativa
aaacaggaaactagctatggaggattttcctatatatatagacacactacactaggttttataattatacatacttattattatatgtaaaaatatacaaaaaaaaatagtgttgggttaagatgatgatgatgaagaagaagaatgattatgatgatgataataataataataacaataattgttataatttgatgatggtgataagttgtatagtggttgctgaaatatcttgggttatggcattttacaatgcaattaattttgcaaatatttgtattaaatgtggcctaactcaattattttccactcttttcctaatcacaatgattggagttattggtttttttgtggtgaaattgagaagaattattcaaattacaagaagggaaataataatgattggattattatcagagaaagaattagcagagaatttgggaattgttacattttcaattatatgtgtttgtttttgttggtttattgtgtctaaatttggtgtaattttatttgatatttgggttttaatgtctggtaaagatgttttctttgctttatttcatctttatgtttgtgttgtttttatttatggtggggttgttgttgttgaacttaatttcagttctgccaagagaagatttcatatgatgatgatggagaagaagacaagtgataataatcctaattcagaggatgagtttgatgatcttattgtgtaattaatctaatcttactttattagtctatataattagatattatgtattttctctttggatttatttattggaataaaatgtattttctttggtttagtcaagaattttgaatgattttattgttttgttaaaagttatattatataaggcactaattgattatttgaccaatatattcacgttaagagaattgttaaaaaatattattgatgcttagtacttttttcgatgtcatatttctattagtgtaattaaatatcgaatctaatatataaagtgttgggactagtggcaatgctcccaagttaattactcaaataattaattttcaaattttttaatggaaaattatcaactgaataaggtggactttcctttatcctttcaaaaattaagaaaagggaaactcaatttttcttgactaaagttgtcatcgcaacacttgtgattgatttttctgtggccaagctgagatttttttaagagattagaaggacaatcatggctttaggaacataaacaccaatacactaattatataaaaaatttaattacacagtgactttctaaacgcacactaaacattatttatagtgtttgtattataaatcattgtagactaatcacttatatattagtgttaatcatatttgttgcttattaagagtttttgtagctatagtgtgtttaaattttgacaagtttagtggaaaggcatgaccaaatagctgagagaattactgtttccttatggtttcctatttttcaatcaccaagtcaggggaacaacatcaacattgagcttcgggcaagccttaacgtcactattagcttgggaagaagtacttattcaacaaaagacgattgcacaataaattcaacaaaaccgattatgttcacggaagaagtacttattccttcgatacctaacacgccataatagaatcgacacatctgcatagagcctcctttctaagctctttatgaa

SEQ ID NO: 3491 - DNA, 1047 bp, Cannabis sativa
ggcttaaccacaaatgaaatagggagaagttgatatttacccgttttttgcttgagttaaccaaaaatacctacatataagattcaattaaattatacccacttttataaagacattgtccaatatacccttacatatgctagcatattgaaccttaatgcaaagactcctgattctctaccatagcaacccaacccaaaaaactatgtctcctccgccattgccggcgtccttctgctgcctccttcattgaagatgtcgacactacgactcttcaagggcaaccgcaacgaatgtaagtaacctcgaaagattttggtgattgagtttattttacaacaattttttcacttatatcgtatagaaatgtaattagtgattggggcttgtttgtagtgaatttgaaacatgccaaaaatatttttgattcaatgatgagagattctattaatttaattattagaatattggatcattttttcattacaattgctcctaggccccccttcatgtttagttcgatgctgtgtacatgatactaattacaaaatgctaatttgtttttattcaaatgaattgattactgaaatataactctatctctctatcactctatcttcgttgtttctccatttctctctattgtctttctcgacagtctgcgacacgacacaacccccacagctcctcttcccttgacattaggcaccacccagctccgttatctctctccattttgtcgacgtatgaaacacctttggagcttatagtttttaatataaaagcttgtcctttgatttacaaaaatgagatttgtgtactttttattttagtaattaattgtagtttgattcttgtatagttgtggatatttgttttatgaataaaaggtgtttgacaaaataactgagagacgggatgggtcaacatgatgttgagttgtttaagaaaatgttaaacaagggggtaaagcctaataatgtcagttttggcatgttgtgctcatgcaagtttggtggaaaaaagaaagagatgtgtaatgtgttt

SEQ ID NO: 3492 - DNA, 1560 bp, Cannabis sativa
agtatccaggtccaggacggaggttgaatataggagtttggccaatatagttgttgatttaacttggttacactctcttctttctcaactaagaatttgtccacccaagattcctacagtttggtgtgacaacttgagtaccattatgcttgctctcaatccagttttacatgctagaactaacatagagcttgatctgtattttgccagggggatagttctccaaggctttgttcaagtaaaacatgtccctaccattgatcaaatttcttatggctaaaatagattatttttagcaatcattttcttgagttcagaagcaaacttacaattgatgatgcaccaagtgaaagtttagggggaaggggtattagaagtgaaaaaaattagttttcagttaggattagttagctagttaaagttgttattagtttattatgtttaacaaactctgtaactaatcttatttagatcatcttttagctcatctcttgatgtatattaactatcgtttgtgtagttcattgaataagattgatctataaatctttaactctttttatctctcttttgattttatttaatcacgtctaaaagatttaatacctgagtatcacaattgtaataatttagttacttttactgctaattaattaaataaataattttaggtactgttctatattataacataataattaagttgttaaaaaatataataattgagatactttcaaataaggtagaacatttgtactcaataacccaccaacctagggaacccaacctacccgaactcgaaaacccaaaaaaaaaaatagcatggattttaaaaaaataaagggctagctcgagtaaaacccaggtactattcgagtcgagtttgtttttggaaaataaaaggttttcgaaacttgggtcacacccgtacccgtccgaaacccgctaataacccataataaatatatatgtatatgttttttacttttcttgcacaaaccctccaaagaaaaccctaaactaaaacactcatctttcaactcaaataacctattacactttcaactcctgcctccaaggcttcccaaccccctcttcgttctcactttgtctcggtagccaaggcacacgcgcacgaggacgaccaccgacgacgaggaccaccgacctcagctcttatgtaacatccaaatcttcattattaatctgttttacacctatttatgtgcatataacaaccttgaggtgtagtgtatttgaattctaagtgtgatcacctaaatacgatagaaaaaaatgtgtttggtgctcatttggtatactagtttatctatcaaaaaagcactttgctagaaattcttaaaacttagaaatttcaaaagatatttcttagatggttctcttagtgcttagaaatagtaggaaataagtttttgcacaaaggtgataatgctttgttcaagtcatggtgctccctactaatctacattcaaagttgtgagtaaatgtacatatatataagaaagttagaagaagaagatgcataaaaattatattata

SEQ ID NO: 3493 - DNA, 1489 bp, Cannabis sativa
ttttttttacaataatacgaaatattatttttttgttgtttcaaataatgttgttttgatgttgtcgttaaatagtaaaaatataaattgaaaaaaattgttaaaaatggaaaaaaaaaatgtattgtgtaaattttatgggaaaattttgaaaaaataacgtgaaaaatagtataattaagttacttctgtagatggataactattttttccataaaataattttgtaaagaaacaaatatatgtaattttacacacattataaaaacttgtaaaatatgtatttttatgaagggaataggaagttttcggaaccctttgaaaaatcctaggaacgagttcgactggtcaaatatggatcaaaaatactcagcatacgtttatacgtgaattaggggatttagtgatctagtcaacatattaggatgaggatatgtttatattcatcaaggtcaactatatattacgtgtgttatatgctacaaaaagtaaaagctttggcagaattcacgggtgaagattgattcattacctctctctttcatttcaagaggttatcatgcgtacgctagctcccctcatttttcctaattaattaataatcaacccaagttttctctcatggaacatggggagaccatgcaagcatgcattaattaatttccagcaaaaataacatttctattagttataattagttaccaatttgtaaaactagatcgaggaattagtgaactaattaatcacttgttaaagcgtgtactatattttgaccgcactcaagaaatattataataaacacttgcaatatacgtacagatgacatgttctcaccaaaaaaaaaaactaattacttataaatctgtaaagtatcagaaaatcaactctcaaactaaagaaaagggaacattattatttttcttctttgtagtgcattattaccacaatgcatggcgtaattaatcggagatgtgaaaacaaagtaattaaatatcaaaagattcttgaaatgaaaatggtcaaactaattataaatatatacacagtaacacagatacatttattgcaatttgtaaaaatgtaatatatgatatccacctttgaatcttgttaatatatattcaaataagacggcccgacgaccctagctgctattgctaatatataggcattattcaacatttggtagtagtattattatttgatctataaaacagttgataatcaatcaattataactttttcccaaaagcaaaacctagaaatgggtggggatcgctctgtgagagctgctttggtgaccctcttcatcttcgctattgtttcgattccattaacgacgtctgaggctgcacgtgtcgtttatctaggtatatacgtgattacactactcctcaacaatatttacttataaaatcattcatgatatgttgcaatttgattttgtgccaatacatttacgcaaaaacctaatttaattataagctta

SEQ ID NO: 3494 - DNA, 594 bp, Cannabis sativa
aatcaagacacaacaattgaaggacagtacaagtaactaaataattgaagcaacttactagtaaggcaagattttgaaaggtttatttacttcccaagaaatgaggagaagaattaccaattcctcctcttttccaaggatgaataaaaggaaattgaataagaacgaactataagaagggagtacacttctactgatatcatgctcaagatggtttggtagctgaccgttggttggcactattactagtgacgtagtattagtataaacctcataacgagaagagtggaaaacactccactgtacttagtacatgtctttattcgggtcgtgccattttcccactattaatttttaccttggctgagaattaattaattaaacgagatgaaaatagtacctatcaatatagtttaagagactcttcggcctaactacctttcaaaactgtacttctagttccaacctaacattcccttgcacttccaatatattatgactttggatcattatcttttatagtatcttgcttacgattttaattaatgtatataaaagataagtagctgaaacatttgccacacctttagaaaa

SEQ ID NO: 3495 - DNA, 1242 bp, Cannabis sativa
gatgccgcccacagtgcttttttctttctttttttgtttcagttccaggcataccaatctgatcatcagactctgcaaaattatctgaccacgattggaatgataattgcaattctaaatctaaccttgaataattgatttagccagatgtgtagaatcaatgggactgtgcttcaagaaggatgttcgtggccacattgacatcgtttcgagcctgaacaagagcctgcctagcattgttcctgtcaaaacccatagaaactagagtagcaatggagtcttctgatggctctactgcagacggaattgaaggaggataatttctctgagataataaagttaaaaatagttgacgcaatcagtcttcgtacatttacaatatcacaaccatgtcaagaagaaatgtttttcaaatgtcagcttctttaaactcaattgcacaccacattaaagcatctcccaatctaatgccacgtgtaagtggaagcacaacagttctatattttaacatgtcaaaaaataaaataaaaacttcaatgtagttctaaaaattgtgccaaaattggtacataatttggcacaataataaaatgtatttgtaaggttatgccataaagatcttctaaatatttaatttttttgtttattgaatagttggcttttcatatcacattacatcttaaaatgtgcattgaagcacgatttcaaaatggtgtgctaaatataacatttgtcaatttgtgtcaaatttggcactatatttagagatggtctaactaaagtatgtaccaaatatagcatttgactactttttgaccccaaatgtggtatatgcactggggatgctcttattgacaactcagataagaaaagcagtagactgaatgttcagatggaaaattgagatgttactagatttaggttttactaatcatgcagctcaatgcttttaactcaaagttcccctgttaatcacactagcctcatgataatcagaagtaatgattccaattgtatatgatggccattccaagttcaaaatacaacaatgctaaaacatgtcagagatttaaatgattcaagaaaaagcacttgcctcgactgggcgacctgcaaatgatggtacgtttcctcctctactcggagcagcaggtaaattccccgctgatggccaagaaagtcttgaaaacaacgaagtaataaactctgggagctgtgagaaaaaggaaacaaacaagatca

SEQ ID NO: 3496 - DNA, 1082 bp, Cannabis sativa
aggtcgtcctaaaaactcaagggccttcttccactggtttgttgtacatccaccatatggagttgtcgaaccattctttttcaagtgatcatgaaattcactcttgatctgctctgtatctttcacgaccaaagtcaaatacattgtactataaaataaactttattagtaaatatgatatacaattaaagagaaacatataaatctaaaaataattcatctcgactcttgagagtatccttctctttttgggatcttgtaaatgtgtccaatctttgcagtttggatctgtgtactgtcgtacaagcaaatctaacttcctagaaaaattggagttgtatagacctacctccttgtgtgtttttcctttgaatctcactcaaaaggtagtggacgcccgagctcttcctgtttctctcgtatgcttaatcccttatggtgtttctatttttttgaaggagctactatcaaggcattgaagactagaagattaacagaacttattagatagatagatagataaagtggtaatgatacatagatagattaaactgaccattgcaaggcacaaatctaaattatataaatgtatatataattatatttttatatataaagaccaaatgcaaaggcccaaattaaaaaagaacaaacaaacaaatataggtacttatacattcatagttttggtttccagtagaaactcaaaaactattcaactataactctaaaggacttttgtaagtttgacaattacatatgttcaaatttttagtctataaaaaggactagacagtaagcataatcatgacatatagtagaaaattataaactaaagagcatcacagaaaaatcttctatcacaaaaataaaatcaaaagcttaaatcttatttcaagtaaatcgatctagaaaacttaaaaatttatttcctagcattttgctcgctatatagacttcttttatttgacaagttttatcaagtattttagaaaatgcacttaattttatggctatagagttagacttctagagtgtcaagaagggtaactagttgtgtcattcatttatctagttaattc

SEQ ID NO: 3497 - DNA, 1398 bp, Cannabis sativa
aagtttgggccgagtagaaaggcaaaagggcttttacatgtcggctattgggcctataaatctgggcttgattcacaaaatcccaatcaaaaaagttaaaacagcccgacaaaaaagcagaaaagttcctgaccgaagaccgataaaaaagcaacaatttttattaaaaaaaaaaaataatttattattattattaatttgtttttgttatttaaaaaaaaagaaaaaaaaattaacttttttgacgaagttactgttgaacaccggacaagtaggcaatgagatatggaagccaagcttactcctttgcctctctctctctgcctcttgttatttttgttctctctttcctttctcctcaaaaaccttggtctcattcgttttcttgtaacgctcaaattaatgcctttttgattcttccttcttctttcttcagcgttctgtccgaaccacattgcccgttatttttttttctttggttcggtttaactcgttctgtctttttctcaaatgtgtgttttagtgagtgatgagtgagtgtcttttttggtactatataagagagctcacaattcattatcaatgatacattttctctcttcaaaatgctcagtctctggttttcttaaatggggtctttttatttttagtttagggattaaagatcaaaactttgagtgttctttctgtgataactgcagattactttagtggggttgttgatggttttgttctattttcctttttttatgttgcatgttttgtttgtaatctaatcctgtccttttgaacgtttcaaaccttttaaaaatctgttctttcacatgggtttgatgagtattttgggttattttataattttgttttgagttgagctctctcagtttttgaaagggtctggcgggtttggtagaattttgactatttggacgattctttttgattttgcattgggtaagtttttttttttaaaatttataatactgtttgatgagctttgcttttagtatacttgagaatttctttgttgtaaatggggatgacagtgtttttgttttagtaaaatagtatatatgtatatttatcagtgatgggttgttatgtttgaggattttaagaagatgggattaggtcctgatgctattcaagttggtccgtggagtgtgggaaaatcaaatgggaagaaaaagaaagatgaggatgatgaagggacagggtgttggattaaatttaggttcatggggggctgcttgtcttccaaggccaaggtggatggctccataagtggcagtggttcaagcacacaatatggtaaaattttattcagtgattaagaattgttatatgtttcaatgaacatttattgttttttttgcctattttatgaactcattttta

SEQ ID NO: 3498 - DNA, 742 bp, Cannabis sativa
gaataatacaggcagatgaatgaaacctgtgaaagaaaatgtgttcgataaaatccattaaggagagagcctttgatccccaactaagccccttttgcacacgcttgtgactcgacggttggatggaaggtcatcccatgtctctggaagcttgagaacagaaagaaaatactaagatagaggcaattgactcgtattgtacagttgagtaatatacagaatccatgtatctactattagcaaataagaaaaattgtaatttattgtcaaaacagtgtatatatttaattaacccaactaacatttagtatggagaaatgtggttagtagtgatctttttaacaatcaacaaacatgcattattattttaatccctctttcattcatttcaacattagtataactgaaatattgagtactttcaacagttgaaaatgaaattttgtattatatgattgtgtttgtaacactagtatagatagtttacattaattcaataccatgagtaaaattcttacacataatttttaacatttaaaacctaaccctagtcttctttgtcgactttctttccaatccaactggccacaataggagtaagtgctactgttggagggaaccttattggagatgcagccttgtgtgcagcataagccaaagcaaaagttcccactttctctccagtctcattagctgagattcccacctttatgtaagaaaccaagaaagaaaaaagaagagt

SEQ ID NO: 3499 - DNA, 1201 bp, Cannabis sativa
tttgttctacccctacaaaaaataagatgatggaccaagtataaagttaccagaataatgataatcaaggttcatatagaataaaccccttacaatcatggaacccttattactataaatgagtcaagcatttaggttctattttttcatagtattctaccagaataactcatgtccagatgggaggaaaatgaatatcatagaggcaaaaacagaagagaaagtataaagtaagaaaattatattgtttatgtatatgctgctttcattcaagaaaaaagcatgtgaggattaccttgtcgtataatccagcttcctgacactggtgagcagcttcaagcaagaactgctttctagatttctcgtcattcaaaaaccgattcaattgaccttcttctcccgcacctcttgtaccaagtagcagatagattccgctatctttcaacaacagctctgttagaagttgttttagcatcaagtttttctgtcttcgttggtctacagtacctctcccggaccatgacaactgtcccccaccaactgctgcagcagcttgagcgtaatattctagtgccattggaagattaccaagacgaagatacaaagccccatactgtctaatcaagctagatgcctctgcattagcatccatcacccccattttctgtccacccccaacaccttcagaaaagattccatggtcagccagcacaattgatatgtgtgcagcatcaatattataaccttcatctcctgcttccttagacaagtataagatagctggtatcaactgaatgcttaaaagcaaaacatatggatatactaaagggtcctttccatttttggtataatatgagggctcaaacttgtttaggtatccctgcaaatcatccagagtgtatggaaccaagttgtcacttataacaactgaaggggggccaactgggcagtctcggacagctgacaacttaaaccacaagaagtcctctatggtattgaaaagtgtgggtaaatctctcaataatctgtcaatgtgcttgcgtgacccggatatgatagcatataataacagctttttcttgtcatatgcagctcggctcattcgatcgcccattcttaacattttgtcacattcttctgaggcagcagctgcaacttctttaggcaccatacctcccgtgttgatccattccataagctg

SEQ ID NO: 3500 - DNA, 1307 bp, Cannabis sativa
tagataatagagagatgattagattagattagactagattagattagggtgtcattatcttttagtctcatcaaagtatagtatatatagtagttagtagtaatgcaattcaatgcatatcatgtatgtattgtatatatatatgactaaatggacaatccattattatccatttctacctatcaaaattaattgccttttgcctctctttggatactaaaaaggaaaaaataattcattattaatacccaaagacttatctcattctctgtccatattattatataattaataataataatgtactatagattgattatactaaccctagccttgaaattgagtgtattagtacattttttaaaatatatatatttttgacatcctaataattatttataagtccaaatttgttatatataacaatgttgtatataatatatatatacctatttaaaatatgatttaaatttttgagaaattttaaaaaatttaccttgtaaaaaatagaatttaaataattcattttacatcttaaaaaagttgacttttaaatatttttataataagattatttaaattatagtaattaatgccaacatttataggaatatgaaataatttatttattaggggttgctaggaattgtaccttgtattttttttttagaaaaatggagatatccatgtactttgtatcttttatatctttatttagaatatatttgtacggtattattaaatcaatttattattaatatatttattgatttttaattgatttgatatattaaagtaattaaatcaataaatattcaaacatcatttaatttgttattcaatttcatttctcaattaattgtagtaaaaattctcacatatttagtgtatcaatgattttagaagtcgattatcattcattttaatttgtgtttttttaggtttaatattagcagatcaaaactatcaaaattaataaccgttcatacataatttattctatttaaatttcataacaatctttattgtattttttgtgcttatgtttatgtgaaaaattgttgccttaaaaaagaaaaaaaatgcaagaaaaagaggaaaaaaaaaaaaagaaaaagaaaaagaggtataataaagaaaaagagataagtatgaaaaaaatgaagtaaggctttatgtagttggaactttcctagtttgtactaaccactacttatatatatttatatataaatttagatgatgtttcaatagagttaattaaggcgaattaacttattaacatttgttatttacaatacacttaa

SEQ ID NO: 3501 - DNA, 1114 bp, Cannabis sativa
ctaaacttttcaatcgtatggcttctacagtaaatgacatggtcagagatttttagtggagatgtgagaaagaaaatggaggggtttgcttgaaagtgtgggataaactttgtctccccaagtcctgtggcggtctggggtttcgtaagtctttgaaaatgaatcaggtgttcctggccaagtggggttgattgatgcttaatgaccaccaatctctgtgttgtaaagttcttaaaagcaaaatatttgaaagataaactttttatgaaatattcttataaggattcaaactcttagttttgaaaaaatgtgatcaaagcaagagcagtcttggaaaaaggagtgtgtaagatgatttcaaatggtaaagataccaaggtttgggaagatttgtggattactcatggtaagaagtttgtgcctactccggtaaccggtagcgttagcgatacaatctgggtagcagaccttcttctggattttggtgattgggatatgtcaaagctaaggagcatgtttgattcagagacaatcaatagtattttgaaaaacggtaaacataaaggtcatggcatggataagtggatttagataaaggaaaaatcaagaaggtttcctatgaaatcggcttacttagtccaagcacttgactgcgacccccgtgtgaagtggctccttcattgtggaacaaactttagaatagtaaaatctaggaacatcacaaagtcttgtggtggagtattctgtccaaagccctcctgattcgtgctgttattgccaagagatagcaagttagtgaaatttgttgtcctatatgtgggaagggtgaggaacaatggaacacctatttttgcactatgattttgcttctcacctttggaaggcattcccttggggccttattccgatagttgagtcgagtggtcatatgtgggattgggtgcaattcctttggggtctccattctaagggtgcggtggtggaagaagtgtttctttatgcttctattgttgtggacaccatttggcaagctcgtaatgacaaggtacacaataatagtttgtataacatcaaacattatattgattctaacacttaggggtgagcataaaat

SEQ ID NO: 3502 - DNA, 1352 bp, Cannabis sativa
tatccaccataattctcaccaggaccgccataaccacctcctagatcgtagcctctgctaaagactcctccataacgtccggagtatcctactgagggctcccccctgtaagagccaaaaccaccaccgccacccccacctccaccactgtatgctccatagccaccaaattcatttcccccatacccaccatacccaccgtaccccccgtaactaccacctctaccaccataggccccaccagccgatctataaccgccacccccaccaccaccaccaaaggtaccactaccaaatcctccataagtgtcttcatacccaccactaaatgcagacctgggatcattgtaacgttttgatgggggtggaggtgggtttggcttcttcggttcagccttcttgatctccacctgcaaagtaacaacacaatattaccttttattataactcacgagtactagacaagtcataatctactgatttcttaaataagcatgttatgaatgatgttcattgttacaaaacatcaacatgtgccagcattaaagtagcagaaaaggcatcatgtctcaaaaacaaaattaaaacgtaaacaaccaacctctgtatgaaaagaaaatgtttattagacaatcacgaaaggcaaaccttttgcaagcttgactccaaatagtatacttattagttattagacaatcgaaagcggcaaaacttacacaaactaaacttcacatagatgggtaatctcatcactccattaacaaattctcaaagaaattgacaaacaagacactgagttttggtcttgactcaacacgaaagaagatgggagggatgaaaacgaagcccctattgagaatttttcatttaaacataattactcaacactatcatccaccagtaattccattctattgaggtatttgggtagagaaaactccaagagtcaaccagcatgtctacacaatcttagaaccaactattattactgaaggaagcattgtaaaagcttgggacattgtgaaacataaaaccaacttcatcataaagtcaagaagttataaaaaagacaaaaaacactataatttctattgaataacacaagaatataatggtcaaggtcttaggtccatcttacctgagccccagccatctcaagtttgtttcctttggccaagagatcatcaactgcttgctcagtttcaaatgtaataaaaccaaagccacgggaacgactagttgcatgatctctcataatctgatgttccttcacctctccaaactctgaaaagaattctctaaactcatctgcccatatacaacaagcacacaagtaactcaatgatcaatat

SEQ ID NO: 3503 - DNA, 2873 bp, Cannabis sativa
gaggaaggaaaaagaaacaaaactcgcaagtccctccatgactactcctgcttaaagtcatttttaatttggtatgctttccctccatgactaccccttcaatttttggaaaccagcttttacaaaaacaatctcttggtagccccgactaaagtatttttggtgtagataaagaataaccccatgaatgggattcatttcattcgcctcctcctctctctctctctctctctgcctttctccctctcatgatcatctctttctctacttccactcttctcccgctctctccccctttcattttcaaaatcatgccctttatctctgtccctatccctatgtttttcacggtccctgtctaaatcatgctccctttcccgctctctaatggatgatgacctccgaatggggctaccacttctgctgtggctgcggtgtcgttttcttgatgtttcatggctattatcccgtctgtctttccgatccaaagatgctttttctgcagacaataaaaattattttagagagaaacaacaagatcttcagcctgacaactacgaggggcaaatttgggcttaacaagagttttggtactaaatcactaaagcacccacagtcatcatcaccctttttcctaatgtatggacaagtaaaataaaaaaataaaaaaaataaaagaaaaaaaaactgctaaatgagatgtcaggatttggatttttaaagcacaaagctagacccttatcctctgagaacatcacacaaaagggcagacaaaagcaacagcaacgtgagtaatatataaacagaaaacagaaagagcaaaagcaacaaatactaaaagttattggcattttgaaaaacttactattcccagaagcatctacgttcgaaacagacaaaccatactctgattccagccgtttacgatgaatcgctactttcctctcaatttcttcatgagattttattcccctttcctcaagagactcgcgatattcaatcaaggcagcttctagacgtctcaaccttttcctgtagaaacaatggcaagtcaatcaccgctatatgaatgcaacaccaagcagaagatcatatacatgtaagaatatcaattgtaatctaatctaaatgggctgtttataatattacaccaaaaccacacctaaggaataaggtaacattcacttgaaaagaaaaatcagaataaaaccctcgtttcaagaaaaagtgctaggggaatattagtaaactagactatcaaaatggaagagaaggcaacctctgctcctcgcttattccactctcaggttgtgcagtaatgcatgaatctattgcagaatccatatcatcagccttactaggaccatcaccaatattctcacttccagaagatgagtagcttaaaccaagacccgtggtacttctcttctgttcctcatcactatcatcatcctctcgagcccatttggaagctggcaaaataggatcaatcttctctttcttcatgtatgcctttagttcaggctgtggaatcggaagtgtatgggataaagttaccaaccctttcccttgagactccatttcattctctgcataatgactccatccagacaatgctgcaggctcagcttcgacattcatttcttttttgctaccagaatatctacctgaacttgagtggctttgaacctgtttcaagtcatcatctagctcaaaacccctctgcttttctgcctcttccagactcaacaatcgtgcaaccatcatttctcgaccaccaacaagagacaatccgttatgtctgcaacgtctttccaattcagcaaagggaaggctcattaactcttgcacagctgctccttttcccattgcaagagcagcatcttggttggtcttatttgcatcacccagatctgcagaaccagtccttttttctatctctggtgtgtcaccacatatggagtggaaagggaccacaccagagtttcccgatcgaagaaaagtagctcttaaaccattaacatatgcatcagagaaaagaaaccagtctgcccatacttgcaataccttcataactctttcctgaagaaatttcaggtgaaatcttttaacctacaaccaaagaaatgacaaaaataatctcacaaagcacataatcattatgtgcacaaaccttaagggcctcagcagtgatccttccagtaacactacgatacaaatcgttaaagctctccattatatctggcaatgtagcctcaaatttggtacggtatgcagatgcattctttacaggagcactactgttatgaagcacatcagagacaagcatgagccttgccactttagttgggattggagtctctttaagtgtcaaagattctgtgagaacttccactatctaaaattgaaaacaaactatgagatatatataccttttacaaaaaaagtggtgaaccagacatgtttctttctgtatattatttttttcttcatatatcagaatacctccccggcagcgtcggcattatccaatgaaaatcccatagcttcttttatttgactcctctctaatgttaatgcacgtaacatatcctcaaactcatctctctgtgagtccgtcagggttctttctggctctacacgctaaagttaagaaaagagagttgttaaaagtatgaaacatcatgaaaagggaaaatcactctgcatttgcaatgtatcaagtaccctgcttcttcctgcagcatatgttgcaccagactccttttcaagatcagggcttttcgctattggcagtaggggtggaatccatctaagaatatacatatctccacattattattctactcttggtaccaaatcgcagaacttat

SEQ ID NO: 3504 - DNA, 951 bp, Cannabis sativa
tgcatgtttagactgaacaaatgagtagggttgttaatgagctggactctatacatttctctatcaagaaagcatctcaactggtcaaggaaattggtaggcaggtcgatttctaaaatatccacatcttttgtttgtcatgttttagctgtaatttcctccatgttggcaactcatttttatttttccctttcaaattaggttgcaactgacaagtgtattatggcattacttttcctaattgttgttggagtcatagccatcattatcgtgaaggtattatcacatacatctaaattttatttatctgcacaatcattcaaatctccaatgatccactttcctattaaaatcctacttctaatgcctggaaaatcattaatttccttttcatttctcttataatgttgaatttttaatttctccctatatgttttagtggacactgtcacttgaaattttgttatatgtattgtttcatcttttgagtttgtctgctggaatggtttgtgcttcatgttgtttccttttcttagtagaagagtattttactcatctgtactatgcaagataattactgaaaattcatttccaagacttgaatgtaggtatgtattgtctatttggtgttttacatctcatcacaatacatcctcaaatgttactaagagttgagattgtccttgtactaaattatgcagaaatcataaattttctagtcacgaaatgataaattgatttctttagtcttttaggccataagacacttttttattcttcagggatttagcttaaataagatgactttaagtagaataagatggcatgtagaatagttgtattgtaagtacagagaatgcagcagtagttatataactgatggttttagtttttttaaattggttgaaggtctaatctttcaagaattattttaatgagcaacgtccttac

SEQ ID NO: 3505 - DNA, 2012 bp, Cannabis sativa
gtagtctgtagtagaattctgttaactcccatgtctataattggatacttgttcatgaaactaaacatagaaacaattaagaggaagcaaaattgcaccatggttttaaccaaaaaaatcttatcacatgtctccactattttgttaatgtagttaggtgcattagacaagaaatggccaagaaaaaaagcaatggttataaagatgaaacctttcaagttgtcagcatctttaaaatgatgctcagaaaaaggggataaaaaaagaaaaatagcaccaacacttgctaaaaccacttcaaaactgaatagaaatatgtaccttataaagatgaaattattaatcttaattatctgtccaattaagaaaaacaacccaaaacagcagagaacagcccaaaacatataccttgatgtgatttccaaacaaaagtcgataatcaagcttagcacaacactaaacaaacaaagttgtaactttttgtgactgtgtaatgataaaaccaaggccaagagaccaaaagctccaactgaatactgattgtattgactgtaacaagactttatatttataggacgagtagcaaaacgagaatatttggtgaagaaggcgagcaccaaaacaatggcatggaaaaaagagtgagttaagaatataggagataggtttaaattccttgttccccactgcatgagcctatttcggtaaaacacaagaaagcccaggagaacagaaactaagctccctatcatacgtgtcgtaataatagtaccatggttaaatggaaaagtagtgatgaaagaactttgggacagagaaattaaaccaaaaatggctgtaagggctccccaagtaattcttacatccatggagaacaagtatggaagtaaggaaagaaatgagttagaattcatcaatgaaggtgtttgataagaattaagaaatgtccaccaagttgctaagcttcacacatgtaatctcatctcatctcatatattaatatatattttttttgggttaacatcttatattaatttttaatcagttgtccatttccattatgtacaattgcttatgaaagacttcaccacttctttaaaaatgccaagtatgcaatgccaacatttttctttttattttttctcttctctttcaaaaaattagaatacttcaaatgtcatgttaacatttagaaaaatataaaaaggtctagttctactcaatgtgccatatgatttttagtgcaattaaatattaaattctacctaatttaatttaataatttctattactatctctaactatttgtaaaagtcatcacataaagatattagattagtatgtaatggtaatgctctaacatttaaaatgcaagtatattttttttttttctattcctgtactttcctaaaatgagaccatctgtccccatcttttctattgacttttttttacctgtgcagatgtgctctaatcaataaatagtaatagatattacaacttacatctcatctattttatttattttttttttgattttttttttatttttatacttcaaaatagttattttttttttgtatttttatagaaattcacataaaaacatacatagcaaccaactaaaaaatttaaatcgcaactaaaatatccacatagcaacctacataaaaaccactaaagcaactatcagagcaacctaaactgtaaatttaaaaaaataatatataaaatatatatttttttaatagaacctcatttttttttttgaggaaaattcactgttattataaactaagaatcatttacaacaacagagaatataggatagggaatttctcctatccaactaatgtcatcatccaaccctaaagtaaatttagctaaaccatgtgctgcttcattagcagaacgttttacatgggtaactaaaacttgagggaaaaaggacaaaagacaacaaatatccgtgataagatcagaaaaataagataaatcagtagaagcatgat

SEQ ID NO: 3506 - DNA, 1284 bp, Cannabis sativa
attcgagtagaagactcaacatgaattatagacataaaaagacttcgggccaacctcaaagggaaaagagacaaagctattttggttattgcctctaagatatgattaataatagtaattaatctttaatgtaaaataaaatataagaacgtgtaatattatagtattataacattgatttattttatttttctcgaaagaattataccattcagtagaataaaaattcaaaaaaaaaattcacatgatggatttcaatatttaaatattttacaaccatttttttttaattgtttatgccctgtttctcttgttatcaaatatcattcattcattgtaattagagatttttgttgataagctaagtaatcatttcattagtgtcataagataattgagttccttattcaaataacaataaattttcataaatttctgaatattgtagttatgtttcgtgggaacgagaagaaataaactaatacttcttagtacaacttagcaatgataggattacagacaccctccaactccttcaacttgtcttcaagctcatcaacttcagccaattgattcccatcaagccattcaatggcctggttcaccgccttttcgatcttgtgcttgtcagcagggtgtaattgcccagcaatcttttcatccttaatggtattcctcatgctgtatgcataattctccaatgaattcttagcatcaaccttcttcttcacttgctcatcttcaaacttgtacttctctgcctcttgtaccaatctctcaatctcttccttgctcaaccttcctttgtcattggtgatagtaatcttattcttcacaccagcagtcttatcctcaccagaaacattaagaataccattagcatccatatcaaaacagacattgatttgaggaacacctcttggagcaggaggaatgccatgtagctcaaacttgccaagaaggttgttgtctttgcttctgactctctcaccttcatggacataaatcgaaactccaagttggttatcaaaacaagtagtgaaaattttctctttcatggttggaatcgttgagtttctaggaatcaagactgccattactccaacagttgtttctattccgaggctgaaaggtgtgacatctaggagaagcaagtcttggactttctcattcccttcaccactaagaatagcagcttgaactgcagccccataagcaacagcttcatctgggtttatgcttttgcaaagttccttgccgttgaagaaatcttgtaaaagttgc

SEQ ID NO: 3507 - DNA, 2519 bp, Cannabis sativa
ttggtaagaacagccttaaaatattaaattacctataaaagtaatacagtatgcataaagttttggtgttttaatacatgtgcttaagtctacaactgaacaaattttactatccaaattgggtccttgtgcccttgtgaaaaatgtcattcaaaataattccacatccatttcatgctacataacttttatatatcaaatgccaaacaagcacatcatgcatatattctcatcccataatcgtgcattgctaatccatatggtacaaaagactagcatagatacaacagaacaactcaatttaaaagaggtagcactgttcaagatagcgtcattcagaataattcaaggtaaaggtaaaaaagcttaaaattttgatgttactatcattcttcataatgcaacatggaggaaaaaacgaactcagaactcgtctaagttcaacaaatatgagaacgaagaattcaagaaaactgggaaataaaaatattactgtaagagaaataacctttttctttttcaactatgcatgtaaggaaaagaaactaaaacaagttaaaatggtcaaagtagactaacatacaacaaaggtaaatgccaaacctcagggtttcttgagacccagtacatatctccatcaaaatctcccccggcaatctcatcagctactgaccttgcaccttttatggagaagaatatagcatacttggcatttccgacgaaggattcaagttcttctatataggtagcctttagaagatgaatgtcaccgaagtgaatacctggattacgataaactaaaacctttcctgaaatttgtccgttgccactgaaaacatcattgtcccaaaaagaaaaagaaaaggaaaaaaaaagagagatactttaatgttaaggaaaattaaatgatctgcacaatacagttctaacacttgagattatgtatgcacttatcatattgaaagggaaatataagccaataatactatacttgtacatacaggacaacgcaaacttcatcactttcaagttttccagtgggatcagctgttcccattaaataacagcactcaggtatgtaaagctttcctccttttagactcttcttttcttccttcattagtatagaaagacggtattgcaagtagggctcttcaagtggaataccagccaagatcattcttgcaatagtaaaatcattatccatgtttccataattaataccaactgcaaacaaataaaatgaaaccggacaaattaaaacaataataattaattgaaaaaataaatacattaccgtgtatggatacagtccgaggaatggactataagaaaattataatatggctaaaatcacctttaagcgcaatgcgcttgctgctggatgcagcataagcttctctcaatgcattatcaagtaattcctcgaaatatttgtgtggcacccctccaaagcttaggagataaattaaatttcttgatgtgtaagttctattaggtggattgctggacaacaacttaaaacgttatagattttgcttccatctgattttttttattccattgttaaaacataccataatatagttttactaaagaccaaaaaaagagtaaaagacacagagcaaaagcaatttgtctactgtttcctgtaaaatgaagaaattttaattttgttgctttgatggtcttcaattattttgtgaggcagttatataaggcccatcattttaatagtttaaaaccgagcctctgcttagatttcacaatttcaaacgctcaataaccttttactagtgagcattgacaaaccaactaacttttgttgaacatatgggaatgtgacagttgtctcatattgtttaaaattcaaaagtggaaaaaagagtagaaaatttacaatatcttacagcataacttagttccttggtttaggaactaaatcattacttccttttttttttctggaaaagggaatgcagcaatatgacaaaacttacgacctggtatacaccttaaaaattaattgataaagaaaatcttacttgacacaaacagaaaatcgtaccaaatttagcaaatgcaaacacaaaagatgatgctagacataccttgttccaactacttccaatgaattcactgtcttaatatccaaaattgctggatccggcttaactttaaccattgaatttcgaatctgaattgttttgccctgaagctacaattatttcaataattatttttctttaaaagtgaacaataaatttacatcagatagaatgaaacaaagtagagaaaacccatactccaaaaacaaataataaatcgcacattttgcattatgaaacttaaacatataagtgctaaattacttgaagtgaatcacgatagtgagtgtcattacaaaagatcttacatctcacaacaaatttcgtgactaaaaagttagtgactaaaaattagtcacaaacattacaatttgttgtgactacatatattattagtcccaataaatttat

SEQ ID NO: 3508 - DNA, 942 bp, Cannabis sativa
actccaatgctactttatcatattcattagtttgcaagtatatgcacgaactaaatcaatagccaaaaaggaaagttaccttgcagatagggcgtaaagggtccttcaagttgacaagcaagttgtcgcatttcaaatcaaaatgcactatgtttttggaatgcagatattccatcccaaatgctgcatccatagcaatgatgagcctcttacgacgatctagatgcctggccacacaaaatgttgataatagattatgactggatgttgttatctagaatctagtaaacttaagaagtaacaaatttaatgatgctacctttctttgctaagcaaaacatgcctaagagagccattcaccatgaactctgtcacagtagccattgttccccctggcccatcctgaactacaccataaaatgccaccacatttggatggtgaagcttggaaagaatttcagcttcacgccagaactcaactgtctgggaagaaaaacacccactatttaattacataatttatgggggtagaaaatttcaaaatacaacatcctaagcacacttagacgttgaaaaatatcaagatgtaatttcattatttctgagattgtggagtatttcattattgttctcaatgctatatgttaaagctacctctcacaccatagccagtgttatgataaaaaattagaaacaaggaccaccttcaatccatactaaccaatctttcttgctctgatgatctcccagtaaagcaactctttttaattcgtttgatggcaacatctgttcccctccattttccatggtaaacagtcccaaaagtgccagaacctaattccctcagctcttcaagatcttcattctttataatctgctatgcacccagaggtagcaatgagatcaaacttcaaatgacagctaaagaccagattccaggaa

SEQ ID NO: 3509 - DNA, 1065 bp, Cannabis sativa
gtttatgtcccgccttacattaattttcgcgggttgggtttgacccgccccggatgcatgacttgaaaaagaaaaactgctcgatggaagatgagtctccttcaatgatgacttgacgagccatggttggtatcctcaaaaccatcgcaacctatatatatgtatggaatttttctttgcaagaccaaaaaaaagaaacccacaagtaggggcctttgtaatcaaataatattatgacacgtattcactttttttttttggtcaaaattgggatgagaagcatcgattattgtttctaaaaattttactcaaattttttctcatttctttagttaaagtttgatttgatttttctcattatcatcctctttcttattttatttttgagaaagaaaatatccattgataaattaatcagataatatccattacatccagttaatacttattaaacaaaattatttacaatagactaaacaagtcatttacaataataataataaaaaaaatcctagcagaaattccaactaaaggtttaataagcaacaagttatgaagcttccaacaagtgtgaaatatgctagattttcaaactaaatgcacatttgatgatttatacctatccatggctatccgtcaaagacaaaagttaggcaataacaaacccattattcaatcgcgaataaatgaaaattaacacatgaccaaccatgcacaatacgatccacacaagagagtggaagatcgttagacacaaaaccaaataaaaatttgaaaatctcccaaatcaaatgcctaagaaaagagttcatggctacctcgcaaatgcaatttgagtaaattgatgaaacattaacaaccctacccaataaagttcacaaacaacctccctcaaaataacaattaaccttattaatctaatattgtggtgttgcaacaacattattaaaaccataatcaaaataaaaaaaattaataaaaataattacataaaataacaaaatgcatatacgagaccatagataaatggatctctgacgatcaaaatctagtgagatcagggac

SEQ ID NO: 3510 - DNA, 1949 bp, Cannabis sativa
cccttccacttgtcaagataggtcgaaattctagcctttatcgggttgaaaaagtgtttcttacttcttccaaagaattgtggtagaccaaggtacttatccaaactattggtggcttgaatttttaagtaatcttaaatgagtgtttggtaagtgagggaagtgttgagagagaagaaaatagaggatttgttgaaattcacaagttacccaagactaattcataggtctctaaggattcttttatagcatttcaagcttgaatattggacttgcaaaaaaaggatgttatcatcagtaacgagaaggtgggagattcttggggcagatttagaatttttaatttctactactttttcaatcaattcagcttgccttgggagcgtggacaggcctttagaggaaaggagaaagagataaggggacattgggtctccttgtcttatgccccagtgggaacaacattgccaagggcttggccattgatgttgaatttgtaggtgacagtggtgagacagttcatgactaaggaagtaaacttggcagggaatccaagtgtaaacataattttattaaggaaggccactccactctatcaaatgctttagccatatcaagtttgactgccatccaaccagtttttcctatattccttcccttaatagcatggaaaagtttttgggccataagaatattgtcataaataagcctttctttaaggaaggcactttgatttggggagatcaaggggttgaggacatgtttcagtctattagccagaatcttaaaaacaattttgtaaattgtggtggaaaggctaataggcctaaaattacgtagagttgagggtgttctaacctttgggataagggtgataagagttgtgttaaaacttgagaaatcagctccacgattaatgatactcaattttgcatcactcacggtactgcccataatatctcagttcttttgatgaaactaattattaaatccatcaattctatgggctttgtcaggggccatgtggaacagggcctccctaacctcattaggggagaatgtttgattaagaaattgacattgtttaggataaagatgactattaattccagtgatggcatgatccatggcactgtcgtttgggctttgagatgtgaagagatcagtaaaatacctttcaatttcaaaaatgatgtcacccgcattgtccatttttgtaccattgccaagaaacatgtggttaattggattggtacttttcctattagaagtaactctatggaagaaacgagtgtttttatctctagaatgttgcttccagtaagtttcttccttggcaagaaggatattcaaatgggattggagtttctcaattttttgaaaggaagccttagaatggtctagagagtttctagcattttcaagattcttttgggcttgggcaattttcttgggaatccaaagaaagatttatgcttctattgggacaaatgaacagcacaagaactctgaatagaggcaagatgttggatggaggaatcagttatttttgggtgatcccaagctttgaaaataacctcttcccaatttagctcagtgagccaaatatttttcaaaaagaaaatgcttgttttttaaaggttgactgcctttagaaggtaggattttagctttaagcaggatgattctatggtcagagccaaagaagttaagatgggtaaatgaagcattaggatagagagtagaccaatgattattagccaaggcccaatctaatctttcctgaacattgtgcaagccaacatgattattattccaagttaaacgaggtcgttggaagtcaaggacctcaacctagaatttgtcaataaaatcctgaaacaagtctgaaggaccatttctaaaattatcattacttttatcatcctaagtgttgggttttgtgccct

SEQ ID NO: 3511 - DNA, 1214 bp, Cannabis sativa
ttttttgttataatagtattatatttgtttggaatctcttttttgggtggaatattgaggactttcattaactgtgacactctacttgatgaactattggttgcggcttaatacataataagaaaaactttgactttcatgcatcaattcttcgacaaggttaaggaaattcaaacccatttacaatattttttcccttcctgaatgggaaactcattcacaaagtgactaactgccaatcatttgacttatataagaaatgctgtaggctgtggctttgggaagcagcttaaataaccatgtgtagaacgttttattcacgatatgtcatatcaaagccatgaaaatatattggtatcccttctcagtgcgtgcagcgtactttctatatgtatacaggataagttcatcttcccaaatgattattatttaaaatgctgaagttaaaattgtgaacttgtttcagattctgacatgaataaaagttccttgttgtaacaggaggacataatcagaaggtgtcaaagaatgcaaaaaccagttattgtagcaacaaatatgctggagagcatgatcaatcaaccaacaccaacaagggcagaagtttcagacattgcaattgcagtacgggaaggtgctgatgcggtcatgctttcaggagaaactgcccacggaaagtaagttaactaactcatttttgttaagtgtactctagtattctccagttaaaaaaatgttaaatgattcttggacactttgtcagagttatcagttatgtatgattttcccttgtgtctaatgcaagttgatgcaaattatgtgtttgtcatttttcttaatttattttacatatccactgtctaattttgtaattataacaaaggtttcctctgaaagctgtcaaagtaatgcatagtgtagcattaaggaatgagtcaagtctaccaattacaactgctcctccaagtgaattgagttataaggtacatgcagatcagtctacgtacaagtttcgtgtatttactatttagttattgagaatgttaggaaacagggcacaccgatgtatcatatgctttaagccccatgtcatcacaatatgacatggtacatccttatttctttggcctcacaaaataccatgtaagaacatgtgttggtagtaagtaattggtgctggatgtctttgccaacagatcattaggtcttcattt

SEQ ID NO: 3512 - DNA, 1744 bp, Cannabis sativa
tctctcttcctctctcttcctaggctgtatttaaaactaaagtgagcttcatgcatatattcttcacaccaacttttagatctcgccaagttgattcctgaataataaagttttagattatgtatccattaattgcagattatacgatattctttctttggcatgaaggaggcacttggtttcgcaccttcatggctcttgtggctcaggtactaattgtgttttaggttcatcccattgtgtatagaaaggtgaaattgttggcaactatacttaatttagaaataataataatattaattcatgcgatgcaggtatagcaccttcacagtgttgtatccatgtggtatcacaagtgaagttggtctagtttatgctgccctgccatacattaaggtaggaaattctatgctaactgagctatgcgttttgaaattatgctggaaatatgttcactaaatgagaggatttttgtgcagaaatccgagttgtactgtttaaggatgccaaacaagtggaacttctcctttgattatttctatgcctccattcttgtcttagctatctatgtcccaggtatgagttcatcctcttccttacaatagtagagagtttgtctagctaagttattttattcactagccatggctacacctattattgcaggtagtccccacctgtatggttatatgcttgggcagaggaagaaagcactgtcaaagtccaagagggagtagcatatttataatgtttttcatatttgattaggacaattagaacactcttagccttttatcttctattagcctagcggatgttttttcagaatacatcatatccaatatctctgtctttcggatttgatagaatgttgttttaatagaataaaaaaatattatcatttcagatgcttttgcttttaccatgaaactcaaaaggttattaaagatattgctgtcaacaaaatgaaatacactaatttctatgaataggcaagtttgcagagcacttaaaatttgtagtcaagtctcaatgttcctgaggttgtttatctactacgaacagttttactttgaagagaaatttttttcttgctaattcagaatccagaacagttggagttactactagtctattcaagcagtgcattccgacttttgataagtaccaaattcaagtaacaatagataatgcgacatcttttaattttgggggtatggtgtatgataaattgatattgttcatttcccacaaaaaaatgccatatatattgattggtaaacagattgcgatgcttaagaatgaaagagagtagtcttggagctccagtccctcacctcccttgtctgaaaatctcactcttctgaatcagtcagatccacaaacaagtccagatccaatagtcatgattgcaatcattaatacatatgtttttaaaactaattatttcttcaagtttattataactcataacttttgaactacggaggaaagaaaactcattagggttttctcttcactacactgcagcttgtaaaatgcatatattatacagacatacatataaaaagtggagtacaaggcaataacatcttctacagttgtctcaaagtgggtagttgcattgtaactctgcaaaagcattcagttaacacaagattctttgaatgataatgtgtcaagaaataaataaataacaaacaaaaatgagtttcaatgtaatgagatcaatggtgacaacatg

SEQ ID NO: 3513 - DNA, 2528 bp, Cannabis sativa
taaactctcttaaaaaatgcgatgaggtaatttaaagaaaacaatctcaataaaggcccatcaactaagttttatttcagatttgagaattgagattatttacaaaagaaaaaagaaaaaacaagattgaaactgtgagaccacttcagtgcaacttgttataattacaattaaagaaaaaaatgagaaaagaaatgaaataaagccattaacaggcaaacaaaactccatgaaaagtcacctacatgttttataagcaaatcatataccacaaatagatcatcacacttatcatcccaaattcttcttattcggggtgaagatttttcacagattatagaaagcataatcggttcgaaatcagaaaaagaagaaatagattagtgtagttcatattgatcaacttgttcacagcaggaaaactaaaacaaagtgctggatgatggcatgtacagagaggctaactaagtgtaactacagtcatatactaaggcgaaaacatagaggagtaagagttaatagtacatgtatgaaaagggtagctttggtgcattttaaacttcagcaaagtacttctcctcggcatcatgattggcttccctctgccaatgatcatccaacgtttcatcgttgtctatctttgtgtagtctaagtactcgtgatcttcccctaagagaaacttttgctgcatgatgaaagtaaattgctccatctgatcttgcatctcagcaggcaataaagagggccgctcactatgccctactgtggtggtttgagcaccgtttgttgatttgtgattatccacaggaatctgccagtgattgtcaaattttgatatgttagacctggctctaaggagggaatatctatatcataacataaaattgaaaaataaaaagcatttaaagagaatcatgcatagttagagatctgataaatcacacaagcagcaaaaataagttcataaagtaccgcagataaacgaatgccacaacccacaaacttaatatagctactgaattatgtccatctacttttgtacagaaaaatcaagatctagctatagcaatgttcctggctgtataggaacaaatgaatgccattttttaagactactgaaaccttccttcaagttaattgaaacagttatgtcagctactgattgggtttgcaagattggattctagaaggcattagggactccataaagaatagagaatagttaagcgagtcttggagagtttgttctaggtaaaatctatgttctgcatttgagaaaagaagtctaattttcatagtgaaatatcttctcctggtcttgctggtgcatgtagacgttatagtaaaatcatgtgtgttcggtttccatgattttctgttcttgtacagggtcactactttgttctggttcttagattctatttggtaaataagaacacttgaatttaaacgaacagactagattcccatacattcaaagagcatgggattctcatccccatgtacctataaagtcttgacactgataagtagagatattcaacacaagtttagtgtattaataaagaaatgtacctctgcagaatctgcatctcttttctctttcgcctcctcttcgtcttcctcttcctcttcctcctcctcctcctcctcctcttcctcttcttcttcttcttcttcttcctcctgtagatttctttcaacaccaacccaatctctctcagccacacccaatctctgctgctcccctctaatctttgcaaccaaaatcgcttcctccgcccttcttaacaaagtttctgaccacctctccccgggtcgtgccatgctcctaccacttagatcctgaaacttacccaaatactcatgatgcaagtaaggttctctctccctcattgaatcctccgaaaagtagtgcccatcacaaatcagtttattcagataagcacgccttctgttcttaactgtaactgatttcgacctcaactcatctgatgttggattcattacgctcctaagatgatttaagtgccaattgatctcataattgtttttcaaagcatcaaattgtcgaagctcttcatgtgttagttttggtccatagcgttctaattaaatcaagccaaagcagaaacaaaacaaacactaagtttcgtaacaaaaagaaatcgtaatttcaagttttcgctctaatttagaattcacagtctcaattttctgatcatcaaatcagaacgaaaaagggtttatttatgattataaaatttacctaagaaaacggggacgtcgcgagagagaaggtcgaggaggataagctttcgctgagaaggattaatggcggtgggttgaatagcacgagggaagtaaaggtcgtccattgctgatagtctgtccgctatgctttccatggcgcttacaattcattccccgctactctcctcaaactaacaaatctatggtttctttccatagtgaataaatatattagaatggaagacctgcactgcaccgacctatgcttttacca

SEQ ID NO: 3514 - DNA, 1285 bp, Cannabis sativa
agtaagttgtgtccatttcagtaaaatatattttgggttgtaatacgttgtctagctgagtatagttgtctatttcgggtttcattatttagttgcgtataaataacgcattcttgttactgttacaacatacctcatattacaaagctgatatttttttaatcatactttttctctctttattttctctgtattgtttttcttgcaagaaattccattgaaaatggttagttgctcaaatatctaaaagggagttcagattgagagattattttgttttagggtaattgtttactatttctttgtaaataatgtgattttgcagtttgtaatatgtattagtgattgtaaaatttttgataaagtcgattttattagaaatccaaggaaaataattggctggaatgtgttttcatttctagtgaagcttgtaaattttatgattgtgttgattaatcttgatttaattaagttcttaaaattagaaaagttatgtggtaatctgaacaaaaaggcttgaggtccatttttgttttttgtttttttgtgtcttttttcgaaatgaaatgcttttacatgtttggataccattttcttctttcttttcatgtaaacacttcttatttacaaaatttaaaggttactaaaattttacttatgattacatacatatgtcatacatacatatcatatatattggattcaaaaaataaatgactcttcttatttggttccaatcacccactaaaattgaatgggcccaccataaaaaattgatcattgtgacagtttattatttattctaagaaaaaaaaaacttatttcgtatgtgaatatatattaatgttttctttaaggagagagtttggtttttgtttcagaataagaaagtggatttgaaaagtaatcaaacagctgaaaatgtcgttgtagaaggtcatggcccatggtcccaagtaacaaacaaacaaaacaaagttgatagttaattaataataatgacagcgtctgcaataaaaaaacatataataaacattgttattaacaatgaaatataattatttcacgtgggatcgatatttctttatcatgcatgctctaaatcgtgggatcgatatttctttatcatgcatgctctaaatgtttttgagtcgaaataactttattgaaaatgatttcaatgaaccattaataatagcatgaatgttcaccattaatatttctaaaacaaatatatgtgattaattatttgaacttttttattcttattaagttaatttttagt

SEQ ID NO: 3515 - DNA, 940 bp, Cannabis sativa
aagcccagccatagcagcggcagcaaatgacattgcacccctagatccataggaactaccactcctatgatctgtggaatccgagcccctaactgcagcagctctactactagagccagatgcagggttagacaggctatcgcttgttgcttgagctgtactgctatcctcggctgcatcacccaatttgacatcatgaactttgtccggaatgggcatgcaatcaggtaaagaatcatctccaagaacctagcaaaaaataacaccaattttcagccaaaataactcatcagtcatcacatacgcatatcaggctatctcagcctatgctccgcccacctttcccacaattacaaaacaagggaaaagacagcaataaagaaatagataacatacatcatcatggtcatcatcttcatcgtctgagatatcatcatcttcaattaccaaagcctcatcaatctcaacaggtgatatatccaattcatcatcctacaaaagaaaacaaaacatgctatctaactgaggggaatatataatcatacatatatctgcatattttactttagggcatgaaaaaaaaaggaattatttatttatacatatatttgcatattttactttagggaatgaaaaaaacactaaaagaaatcctaccctagaatggtgttttttgactgacacaaactgataaggaatgccacaacatgatttgacttgaatagatatctatacatatcaaaattcagaaatgcctattgccacacataccctatggcctatgcctgtgttttttggctgatattggttaccaaaacatgacttgatttataaaatatctatttatatcaatttgaaatcctacagacttcatttaaaccccccaaaaataaaaatcctacaaacctagatcagttaaccacacatccaaaaatcaaaa

SEQ ID NO: 3516 - DNA, 513 bp, Cannabis sativa
ttggtaaatttgaggttgaaaacaagttgcctaaatcaaagaattacagcacaacgttaaaaatgcttccatagcagataaatgaaataagtaaagccaaacagttttacacccctagacataaactttctagtaaacgatatccaatgatatgaaacaagaaacctgaataagaaggtaatcattagttcaattgacccaaagatgtacacaagtaaaaagttccacattttgtcatttgaactaatgataaccttatatggtgcttttgatgcatgataaatttagtattaacatttggtgcaaaactttcgatagtccaaacaagattgcttctcaacaaacactagctttgttttttaaaagtacaaaaacaggtatattcaagtaaaagcctgtattcagcaatccttttaccctattcaatatgctttacttatctctttccttaaagaagtatacagagaagacaattacgcataaaaaaaaagaataataacaatttggcacaag

SEQ ID NO: 3517 - DNA, 2231 bp, Cannabis sativa
actcatttttgcaaatcgttttctcatgtaagactaatttatggctaatttactgtaattcaagaattcgtgtaaaaaataattacataaatagatctaatgataaaatttgagattgtatatttgtaattttagaattaacttttgaatgtataaagtcataatacttagttctagctagcttaaattagttaaaaaagactatagtagtgtgtgtaatttgtagtcatatcaatcttttttttattcaaaaaaaaaaaaaaacctaaagtataagttccatataaaaatatataacttaaaagttactctttgataagaaaagatgtgtttgaaatagaacaccactacaaacctaaccaagttctgttttccttcaatatgaacattttctactttatattatataataatataaatgcaattatttacaagatgtatgtgctcttaaatgtcattagccaactcaatatatattaatttcacttttctgacaattaaactatcatataattgtgttatgtcaactgcattatcttattacttgcaactctatatatatatagctctataatactaatcaatgtatagtctattttggacctctcctttaacatggactaagttttcatttgcagtgtcaaaattagttatatatactatattaatattaatactatagtaatattacaattcgcacgtgatgacaaaatctaattagactggtgtttttttaattgattatattagaaaacgatatacacttgtatatatatatataaagcatgtgacaaattgaattgtgtttcttcaggaaattaaactgagatttttatgtataattaatagtgatccacttgcagatatattgaattaaattatatgccgttgttgtggtggtatatatagtcaataattttacgtccatatatatatatatatatatatatatatttgaccaataatcctatttgttcagcactatttttactttacatatctaattagtattttgaaaccaaatatactaaaaagcaaactatatttattatataatatatacaagtcgacatattttttcttttttaattcaaaagaggttaccaaattgtatagatattctcctagaagatacactagctaaggttgactttgtgtacaacaggaacacaaaaaatttcattttatcattgttttttattttgtgtcgacaaaaattttaatatcaacgccaattttatttattttttttgtcaacaaatttttgcgctgataatgcaatatttaatttttaacagcgcaaaaatatgctaactaaaatcttgtttcttgtaattcaatagcataaatatacagagttttgtttcagcattaagaatattgataacaaaatatgtattacatacatacaatgatttgacaattttattttttccaaatgacatttatgaattaacatattagataaatatgtgtcacatttgtatatatacatatcattatttgtacatcattatggtgtttggcattattttttatattttgttttctgaaataagagcagaaaacaaattttgtagttttcaaaacattatacatgtttagttaatgttttcaaaatagaaaacaatttttagatttttcataagaaaaaaaaagaaaagagagagagaactcggacattgaccccgctctcgacccgcaccttgctcctaacccaggctcaagatccagatgttagctctagcactagacatgaatgtcaaactcggaccacggtcccgaccccagaatcagaccacgacctcagccccagacccctgacctcggtctcgaccctagaccccagcttcagtccctgccctagggctaatgatgagaaaataggtatgtgaaataaaatataaatgttgtcaccatataagcaacatatagaggcaagataagaaggggtcatagaaagcccccaaatattttaggtgttctctaggaaaaatataatcgatgttataatgacaagtgtgatttggccccagagtaggacgggacaagaaggattttcctattaagggtagtcttggataagttcaccagcaaggatatccaatcctccaggcgactttgccatatgagatcaagtaaccttcaactggtcctagatgttgctaacgtataacgcatactgaaaaagtacagtatgcatggattttccacttgcctaaaatagaagg

SEQ ID NO: 3518 - DNA, 2932 bp, Cannabis sativa
ttttttaataaaagaggtcaaaattccgtattggttagagtttagggataaattgataaatgcctttttttttggtcagttaaccacaaatgcctgcatattaaaattaaatctattcaaatttatccacttttataaggttactatccaatttacccttacatatgttaccttaattaataactggtgggtattcatattgttggggaggcacgttaattatatgaaacaggaggggcataattgaaataattaaaaaagagggcataaattaatgagttttaagaaagaggtaaaaatgagatgaattaccttaaaaagggtataccatctaatttcttctaaaatttaagggtaaaaatgcattaattcgcttattttcaaaaaaaaaaaagtaaaaatattaatttttaacgataaaagaaatagaacttaattgaagtcacataattatgtaatgttatattctaggaaaatttttcaataatgtaatgttatattttagagggtataatcagataatctcgaaaattcagagacaaatatactaattaaatatacatttctgtggtgaacatgtgttaatatagctgtcatgattatgttgttaacaattatagagttaatggagcatgtttaagctaattatttgaagccccaccaccactaaataccatttttggttaattatatacttgatgatgattaaacagctttcgtaaatcttttttatcgatcaaactcatgatcatgatgaatttgacgtaaatgaagaaaatttaagtttatatatattataaatatatctcagtgtcaagttaaattccaatcacctaattgatcaaaagagtttatgttatagatagagaccctaacttgttatgagttaaatttcaatagtatcaatatatttggtaagattattgtaagacttatcgtaagttttttatgggtagggaaacttttttaactattaatttaagatcatgtggttctatttgtatacaattaaaattttatatatattataataatatttaggaatattggtggtaaaactacataaattctatgattagctagtgacatttaatcatataattgattttttggtggtaaaattttccaaacctcacttctgttagctatttagccattccattcaaaaagcactgttaagtgccacagtgaacaagccacaatatatacaagggtacacgtgacatatttttagtagggatattggcagcaaaactaattgaactctatgattagtgacacttaaccacataatttgattttttggtggtaagactctccaaacctcacttctgctatttacccattccgttcaaaaggctctattaagtactccgagacttgaaccattagatctccccttcccccattccttcttaaatcatgacaaatccagggacgaactagcaaacccttcaactgctgtggtatcagcgaagagttgcgggagagagagaatcaaatccgatgaggtcgaggcgagaaagagaaacttcaaagaagggtcaggtctcggagcttagagggatgctgaagggttgggtttgtaaggccgagaaatcagttttggggttcgtttagattgaaggtggccggaggtgacttgtcagagctgtgtgagaaggagaacaaaagaaagagggagtgcggttggaaattagggttacatggagaaaatttaaaagaaatagcagtggaaaatagaaaaaagattttttttttatttttttttaaatatttaatcaattaaaattatgtggaccactaaaacttttccatgtgtacatttgtatatgttgtagcatgtctagcatgacacttaaaagaatattttggacggaaggggtaaagagctaaggtttggagggttttaccaccaaaaaatcagtttatgtggtttgttttgccacaatatcccctggtaaaaatttgccacgtgtacctttgtgtacacagtggcatgtctaccgtgacacttaacagagccttttgaattaaaggggtaaatagttaacagaagtgagatttggaaaattttaccaccaaaaaatcagtttatgtagttaagtgtcactaatcatagagttaatttatgtagttttgccgccaacatctctaatatttaattatatatttatttttaaaaaataaaaataatattactaattaaaaatttattattttttaatttaaattattattattattacttttttcaaaattattttgaataatttttatatacgggtattctctttatcctttcaaatgagaagattttagttgtccctttagtttcatttctgtctacttttttcattcaaaaaataacccacaagtacttcgatctttccaaatatataagtagtttgggggcctatagcaaaaaattaaaattaaaccttttattttttatttttttaaattatcaatcaatactttataaattcagtttccaaaaaaaaaaaaaaaacacttcattaatttagaataggtaaagattttaaaatcatgttttttttgaacaatgaacaaaattttattgaaaaaaatcagcattgagtacatcaaaaataaagaaggaaaatcttccatccaaattagctcaccatccagcctaagtgcgtgcacagctaattcatgagtagccttattggccgaccgatgaacatgaatcaaggacgtctcaagaaaattagacagtagactaaaaatatcatctaaaagagaaccaaggtcattacaaatagatgatcttttagtgaaaacagagatcacatctagacaatcagattcaatagaatgaagaagaaaacctattccaaacgaccaatccaatccaatgtcaccataaaatcatatattgagaccacaagttttttttttttttttt

SEQ ID NO: 3519 - DNA, 947 bp, Cannabis sativa
tattgcttctcagaccaactttaccacaaataaacgacacgtcgtttgctgcaaacttcagcagcaaactccggagtttggccaattctaagtaccctgcaaatgttcctaaaactgtagacaagaggtttttcttcacggtcgggcttggaaccaatccatgcccgaaaaaccaaacgtgtcagggaccaactaaccaaacaaagttcgctgcttcggtgaacaacgtgtcatttactctgccttctactgctctgctccaagcccatttctttgggagatcaaatggggtttacactacggattttccaagcttccctctcaagttcttcaactttacaggagtttcttccaacagtactaatattactaatgttagtaatgggactaaggtggttgtgctgccttacaatgctagtgtcgagttggttatgcaggacactagtcttcttggcgccgagagccatcctcttcatttgcacggcttcaatttctatgtcgttggccaaggtttcggtaattacaattcgaaaaccgaccctgccaacttcaacctcgttgaccctgtcgagagaaacaccattggtgtaccctccggtggttgggttgccattcgattcctagccgataatccaggtaaattatagaaccaacatgtgttattattgattgggtatatctatttagtatctgatattgtgtgacaattgacataaattgcaggggtttggtttatgcattgtcactttgaagtccatttgagttggggtctaagattagcgtggatagtccaagatgggaagctccctaatcagaagctgcttcctccaccgtcggatctacccaaatgttgacctttatttggatggtgactcatggaggacctgttaactgatttataatacatattatatatgatgagagcgcggcagccttttcccacttcc

SEQ ID NO: 3520 - DNA, 1794 bp, Cannabis sativa
aagacataataatatgtaaaattgtgatatttagatatcagtggacccattgtgtacccggaatgcaatcagtggtgtccgtaaattggattcttcgataaagactgaaaaagataatgtgatatgatatccagttgccttatctatctttgattcaattcaacaagttaaatagcaatcactacactagtatcccaaaataaacccctttgaatacgacaagcaactttgcccaagttaagatcagtaccactagtatcatcaaaatcttaggccatattatacaagcaaacgatcagaaatcattgctttttttataacaataataataaataagtaaacatgtgttgttcaactgtctcaattacatttaccatcaaaattaacgtaagtgtgcacaacttagcagcttaattgagttcaaaaactagttgacatccatgtcattgttgctctttttgaaatcaacaacagcttgatcaaaagtttccctgacatgcttgcataccaacattagatcctggcatgcatctttcattatatctgttgccggctcacctgaaatttgtgcaataaacaaaattaaaaggtgactaaatataatactcttattaagagtaactaactgacaggaacgtaaaacatgagcaacataataccagctgcttactttgtttaaggaaatgcggcctttattctagaaggcaaatcataataggtctacagctataatctaatgctagaaatgtcataaaagcaacatagaaaatatacttgcatactctatattaatgttctgttggtttaggcattaaaaaatgttttagtttgaccctagttaaaatattgataaaccaagactgagaggttggaaaatgggactaggttcatgaagatcacattattgaagtactgccactcactgtattggtaagtggttacagaagaaatttaaaacataatcagagccaataatgtcacatctatggaagaatttaaaaagacagattaataagcacagcacagaaatgtattgtcatgatctccattaaagaagattgggtgtacctgttgtctgaattctaatgttaacacgattgtctgaaggatggggaatgctgtatccacagaatgttactcttggactgcaacataagaaatcagctggtttagcatcttattgaacaccatactcacattacatgaagcattatcgaatttgaatatcaaaagattaagttaattaagaacaaaagcactctaacctctcttgtcaaagcaacaaggaaaacactagacaaactctttactactgatataatgaagtaattttatgagtagttcaaaaattgacttgaaagttctgattgtcatcaatttcacaagagtattgtcaagtaccaccaatattacctaacaccataaagtatccgtttttaaaaaaaaattgaaaaccgccaaacactcctaaggtgtcacctaatatgctaaataacaatgttggtttcacaaataaaggagggttaagaagtcaaaaactcatggaacaatctcaacattgaaattgtggcatatccaaaaacaaggaaacacagttcctaatccttcctgacttgcttataaagggtcaaactctcagcttgttttcttttatgactttcgatccttgaatctgtactcatttgttttctctcacttaatcataacagaacataatccaacaaatatcatctcatcctatggattttggggacaacatattatctgacgatgttgctcctaagattatccttg

SEQ ID NO: 3521 - DNA, 2371 bp, Cannabis sativa
agcaacaggcagagaagaagaaattagggttcgtattttttgtttttttgttcttatttttaattaaactctttttgttgtgtaggggtattaattaattttcaactaccattaaattattatgccaagagcacgggtgccagttaaaaaacttaatagaaagggtacaataatatactagttatatattagggaaattttttaacatcctttatattttagggagcacaaatccgtagtgatataaatttagagataaaatttgctaattattctaaattatgtatacattattgggtgcttctacaatacactccattaaaaggagtgtagtgatgcaacccctaactgtttcagtatctataagaattttttagtctaaattttttcatagtcgtgtacgttgtagttatttaagacatcctgcaaaattaaatttttagaaattataaataatttacaatatagaaattaatgtttaaaccgtttatttcataatcgtataaagtaaaaaaaatcacgcgtataacacgatttgaacactgttttcaatgtgttaaatttttctgaattttttaaaattttgcaagatatcttgaataagtataacgtatacattatgaaaaaatttacactaaattttttttatagataccgaaacaattaggggttgcatcactacatccattttaaggggttggattttaaaatttttcaatattatttttgagaaagaaacattatattgttgagcagtaggcaagttgagtttcagattttctttttcttgaacaaacgagtgagtgagagtttaataatattatttttgtatggggattgaatgaacacccaactcttctcacgctaaaaccctttctcttccattctctgtcccagactctgctcctaaatcatccccaaccaacaaaaccctagaaccctagcgtcttccttcaatgtcctccaataactccattctcccttaatcttcctgtcgtttttcactatttcattcctgtattttgtctgtaatttttttgaggtcgttgtttggttttagagatggatattgagcaaaagcaagcggagctcatcgatcacttcgttaaccaagcgtcgactctcaaaggctcagcccttgggtctctggtagccgaggccacgtctcacccttcgcttttcgcgttctctgagattcttgctgttccaactcttgttgaggtttggatcttaaatttccaatcaaatttcacatgtttagctcttaaagattaaaaaaataaatagcatgtatatttcttttgcttttgtcacactcagattatctatgcatcttttgttcctcaaattggattatctttagctaggaattaatgatcgtggattgatcatctagtgaattataggcttgagtttgttttgttttaaagaattatatcttattatagtggatgctctgcaaattcataattaaacattaagttatgttgatcttcattgcgggtaccgattcaattgttgcaaatatgcgttgcaatataaaaatttgtgtctaaagactttggagggataatgaaataactcttagttttttgttcagactaataagttagataataaatttgaggactaaagcaattcatctagagctctaactttatgattgttattataagtagtagagtacacgagtaacagtatttatgtctgagtggtggtgaaggggatggttttatacggctagccacaaaatttaattgatctaattcaccttatttcctttacagccatcgggattttttgttgtttgatatcattggcttctattttccattcatacattcattcatttaattttaatttttgtatcttctgacataaacttttttagcttgaagagactggaaattctgttcacctggatgtgcttcgcttgtttgcacatggtacatggagtgatttcaagagtacgtgtctagaaccttgtagatgtaaatctataatgttttagaatttaaacccgaatatgtttaattttgttaaaaataagtacttaaactttatccctacctttcaatgtctttattgttttgactgatttaaagtctcgtgaggaatcatcttattattgatgtatttgttgataggaaatgctgaacgtcttccacaactgtcccctgagcaaacgttaaagttaaagcaacttactgtacttactctggctgagacgaacaaggtatcattcctcaatgtttgaccattttttcattctagtagtttggaacctgttactcatcatcattatctatttcttttttttttttgttaattctagccaatccattgtgcattcagaaataattttcttggg

SEQ ID NO: 3522 - DNA, 1297 bp, Cannabis sativa
gtaaaataatttccaacaacctgtccttcaaaactcaacaccattagaattactcttttcagtcaaactagattacaaccggctaaagatgtttggttgtctatgttatcctaacctaagaccttacaacagaaataaacttcaatatcggtcaacaccttgtgtatttcttggttatagtttgtctcataagggttacaagtgcttatctaaagaaaagagactttacatttcaagagatgtagtatttgatgagttcaagtttccctatgccaacactgctactctccctcaaaacaaaaatatcacattccaaaccttgagtcctggtattcctcctatattatctactggccatccttccatcccaacaccaaaccttactcctgtcccatcttcatccccacaaactagcattaccaatcctgaacatgctcctgatctgattactaatatcattcatgaaccaccaactactttacctgccaccatcactacagaccattctcttactcttaataatgacaccactgttgcattacatgtcattaataataatgcatctgttttacctgtccccactaacaacacctctgtagcatctgatgtggctcctactacttcaacacatccaatgaccactcggtcaaaagcatgcataaggaaacccaaggtattttgggtgttctgggaaccaaaaatagtcaaacaagctctacaggaacctcattggttcaatgccatgtccactgaaaataaggctttaataagaaacaaaacatggactcttgtcattttgccacccaataggactgccattggatgcaagtgggtttacaggatcaagtataatgcaaatggcagtgttgatagactcaaagcaaggttagttgcaaaaagttttcaccaacaggttggatttgacttctctgaaacatttagtccagttgtcaaacacataactataagggttgttttaaccattgctgttacaaaagggtgggcaattaggcaactagacatcatcaatgcctttctcaatggtgatcttgaagaggaaatctacatggttcaaccacctgggtttgttgatccagagtatcctgacagagtttgcaaactaaacaaggctatttatggcctcaaacaagctcctcgagcttggtttgcaaaactctccactgttctacttgagtatggcttccacttctccaaatctgatccttccttgttcatcaaagccaccactaacaactgcatctatattcttgtctatgttgtgttggaaattatttta

SEQ ID NO: 3523 - DNA, 850 bp, Cannabis sativa
ttttaattaatcaatattatttaatagcaacttgatatatttttatttattatattatttaaataagaaaaaacacgtatataattaaaaaattatgtaaaaattaaatattaaatgtcaatcatattaatcaagatgtattgtaacataactatagtcgataagtgaacacgacaaatcgacacgagaacaccacgggtcaagttaaagtttaaatttcttgacaagaaatatatattaatcaggttagaattaaacatgtcaacctatataatataaacacgaatatgacacgataatacatattatcaccaggcaccaatagtgttattggtgtctgctaatatctacatatgacacgttataaataatttgcaatatataataataattattaaattaaattatataaaattcaatatttaattaaactaatggcgacataacatctctaaagactatcttttagcatattttttttaagtttacatgatatatgcccatttcttttttaattattattttttttaaatattctcccacagcttaatgggaatgaattgagttgaaaaaggaaggcaaatgcacaatcactgccattattgatggccattcatttaagcaaacagctgacattagatggtagatagatgttagagaggaagaggaagatttctgtaacaagaaaatgatgccgaaaactaaaataaaacactgtacaaactctgcaatatgcaagctagaaagggattccattcatgccagcatatacaattcccaacttttactcatacaggctttttctttttggaaaccacaattgggccatttgtaaaaatttataaactct

SEQ ID NO: 3524 - DNA, 1335 bp, Cannabis sativa
atgacatttataacaattaataacagaggatatgtgtaaagaagtggagtgtggaaagggaaagtgcaaatggaatggagctttcccattagggttcacatgtgaatgtgatgctggttggaagagaacacgtgatcaagatgatcaagatgattacccttttctcccttgtgtcatccctaactgtaattaatcaaatttttactctcttctttaattaattaattctatatacataatttaaagatgaaaaatatttatatttatatatacaggtactctaaattatggagggtgccaaccagctccacccccagttccagagaaggaagtcccacgcaatatttctgcttttgatcgtaattaccattatcttcatctcaaaaaactataattctttttaatcttttaatttcaataattaattttgattttatgtaaattaattaaactttttttgtagcttgttactgggcctattgtggggaagggacatgcactaagaacagaactcacacacacatgtgccagtgcaaacaaggcttttcaaatcttctcaacatttctgcttttccttgctacagtgaatgtatacaacagccttaattctttcctaatataattattaacatgatgagcttaatttaatttggtttgttatatattattttaaaggcacacttggatccgactgttcaagacttggaattaaagtagcagattcgacttctgggggtgacagttccaacaataataataatagccaaggtgagttagttagacttggatgagatcaatcatcaagaaaccacttttgttagttagcaaaaaaagcaacctcctttattattaactatgtatattctaaactttgctacttaccaaccatggatgttaaaaacagagtttaggtattaagaagaaagttaactaattaactaatattatttttatagacacaattagaataaagtgataaagatatcatattcatatggttaggtgggtcaaactaaaactcaaaactcctttctttctcttcttataaatgatttcaaatatgataggtcgacacaattgacttataatgccacattacttttgctttgatatctatccataaaacatgttgcttgtatgtgtaagaaaaaaaaaatagttacttaaaatctgacacttaatgttgttttttcttctccagctacgtcttttctgccaggaaagtttcaaatgatgatcatatttatggtgtcattgggtatggctatgtggaagtaggatgtgatttaatggagcaggactattggatatgtacttcagatagatagatagata

SEQ ID NO: 3525 - DNA, 2616 bp, Cannabis sativa
tttttgtaaatgcttaattttagcattgattgacaaggtgtcctttttaacattaataacaacaaccccaacccaaatcacttctaaaatatcaatagaaagtccattgtttcttttccttttaaagaaaactcccagtctttataagcaaatatcctttttaattgttccatttcaccgatcagttattcaaaaattacgccatcacgttttctggtttttggtttctttgtttgtacaactgtgttagtggactaagtggttcaaacactcgcttcacttctcctctccacgtttcccagtattcagtttcagggtttgacacttctctcttttgggttcttctctcttatctttctcaactataaaggtccaacctttgagccattctccaacaactataatggtaagtttttctttctatattcacttcaattttgtgtttttcatgttcttcatgataaagggtttttgttttttgtgtatttcttttgagttaagttcttgatttctatctttattggtcagagtaatgcttttgctttactgttgttatttgggtttaggtttatacatattgcataaaaagtgaaatggggtttttggatggtttatatgggattgttggtgaagttagtgtagagtgaaatctttttttaatttctcaattgtgttttagtctgtttttgtacgccatgcatattccttttggagatattttcttatgtgtaatcaactttatgcaattgtgtattttgtatctcacctcaattttcatgtcaaataagaatttttacacatattttcttgtcatatgtttacttcattgtggcccatgtagaaaaccataatcatgaaccttaagatagccactgttgtgaagcttgctaataatgagccacatttggtttttagtaattttgattttaaactttattgtgaaaaaacggcaattgatgatgttgatcatattagtagaagaaaattaaacaaaaagcaataaaaagtggaagatcacatatttccactcaaagtatatctctttttcgaagcacacatgacccacaaaaatcactcacttatgctctcaagaaactcacttctaagaaaaaatacttaaggtgttactctagttggtaagctcctttgagttatttctccggtttggttttgttccacgtctccacacccacgtataagtaggtgggcaagacaagctttgggcactaccaagaaatgggcagcttgcatatacgatttttgcaacctagtgcctgacaaatcttaagccacagattcacaaaaatagactcacaagtcaaaactcgatttcagtgttcgtttagaaacttctcaatttgattttggctatttcgtttttattgtctttaggtatgtacaagtttgtttgttttgaacttcacattattttgaacactgaatcaaggagattaatttttatcacgaaactactgatgatatcatatgattgtctggttaaaatgttgaatcttattgtttgtttagagatgccttaactacgttgggagacaaagtgtttgacttcaatagaacatgatgctgaccttcaaattagtagtgcctaagctagtgtatgactggatcttatttttattcatggtagtccatagaaatttagtagatatttccattgtgacacatagttatataatatatattgtggaattacatttagtaacaatgtttcttattttgttacagctgaccatttgccagctttgtggtgacaaagggtactccgcggctttgatttactgtgaaaagtgtgaagaatatgctagacatgggtatgctatattatttgaatgttgtaatgttataaacgaatctcatgcattttttcctctttgttttggacaatgataaagaatcacattgatacattgttcttttaatcagtcattgtaatcagataaacacattattttaacaagcctatggatactctattcattatgtttgtctactgtgtcttatagctattgcatggatgtattaccagaagttaatgatgagaatgtaacttggttctgcgaggattgcaaaccagatctagcaaagcagcctattcttgataaattgagatgtccaccatcaccatccagtgtcttaaaagaatcagacactgttcgaactaatcgtccttgtggtccaataaagaagaatcaaaaggttccctccaatttggtatctaagaacaagacgcagaagccttcttataatgaactgcaatgcagaaagaacaacaatgaggttagctctgacttggtatcgaagaacaagttgcaagagccttcttataatgaactacaatgcaaggagaacgtcagtgaggatcagaagttcagaaaacgacagaagttggttcatgaagatgacactactaagcctctgaacacttccaaggttgctgtcagtgatttgaagcctttgaaaattgtagaaggaagtgttaatactggtcatgcagaaaaattgcaggtgaacatgaatgattctttgcctattggtaatgtgctacagagcaggacgaagcagtgcaggaatccgaagcttaaaaatcaacaagagtct

SEQ ID NO: 3526 - DNA, 1073 bp, Cannabis sativa
tatgcccttttacgactctgttctcgcaaattcgaaatcaggcattgtttttcacttgtcctttgagttcgtactttactttttcagtggggattttgtgctctgtatattctcttagcaaatacttaaccttttgctcttcctaactctaaattattttactttgagaccaatgctaggattttaacgtgattagtgttaagaaacttctgtctttggattttgtttgtttgattcaattaaggaaactagcgaatcactaaacccgaaggactgtgaaagtaatgaataacatgatattatgtgagccaagtaggtggtataatttttcatatcaaaagctttgtcttgttctgttttgagtaataaatctaatttgtgttgaagagctcgttttcatttgtcatagaaacgccaaaacatgcagtgtagtaggtcaatgatcagagcgagtgtaagaactgaagttttcttagcataactactcttcaccattgcggagttttatgtgcataagaaggaatgagaaagctataatatacatgtatagattctcatttatagtttgcttgataaaattgtgttcttctagttttgtgtagaaatcattgataggtcctgcaaactataagtggtaaatgataattgttactaatctatgatgggatgaaagtaaaagcattgtagactttcaccgactgtttgactgaccaatatatcttttatttattggcagtatgagcacatggttctacttgacttgcttaagaagggccacgcagagtcagataaaaagattggtggaggggttaaatctttccaagttcgattccatccaatgtggaagagtagatgcttcttcctcattcgaaatgatgaatctactgatgattttagcttccgaaagtgtgttgatcgtattctgcctttgccagaagacctgaaaattaaagccggtgccaataaagcattaagcggtggcaagggtcgtggtggaaggggtggcggtggacgtggtggtgggcgtggaaactggagaggcagatctagaaactgaagtatcatctcttgtt

SEQ ID NO: 3527 - DNA, 2554 bp, Cannabis sativa
gaagggtgaaaagaacccccatcgaggaatgaaataaaggctgtgtaatactcttgaagagcattccaaatctgagtttaggtgttgcatccggccatccgagtgagtgtcttctcagacatcaaggagaggagccaagaaaccagaatgctatcttgctgatccagtcttcaaattttggattgacgcgatttgcagctcgatctgcttgtgagatactgcggtggagctcgatgaggatcaaggtacttctgcaacctgcttccttgaatggaagcaaagacttagtgtttccatggtaagtagttgtgttcatcaagatgaactgaaagaaagtgagtaaaggaaattggagatgattttggtaaagcaggggaagtagtgtttggattgataggttgagacaaagaagttgtttgagaattgtttggagggtaagacaaacctccattgctgggaaacaaagggttctccattactgtagacgaagaagttttgataccatgttaagtttgagaatttgtgaaagaaagaagtaattctcattaattgaaaacatagaattcaagctgtgattatacagtgtagcttaggctagctaaatacaattagcaactaactaactaaagcttaacagaaaacaagaaccaaggggacaactaactgactcctaaccaacttactctaacagtaattaagtaaatgttgtgtttgatgtgattaaatctatcaaagaaaaaacaagtaagcaagaatgcaaaggacctgaattggtgtatgcccaagggaatcacgaaggggtctgcaactggataaaggatgctcgggaggaagctcacagacaatttggttcaacaactgcatttgaaaatcaatgtggtcatcttacgcacaacacgttaaagaagtataccaacaaatcatctgaaaacaagcttcggtctagggtgaaaaaagtagatgatacaagagagcttacttcagcttggcgacccgcatgaagtcttacgccagtggcatcatacatcacctgcaagagctcaaacattataagcgccttctcaaaaattccctcggcaattttcccagtacaaatcaaatttacaagttggtgattccagacaaattttggagccaaactcaacagatttaatgaaaatagtgacaaatttaaagaaaatgatgagaccttttcaccatttccttgttaatcaactgcaggtgcaggtactcatttaaagatctttaacccccaacccaactagttcatttaaaaacaacaaaacagaaaagggtaacccaaaaaagcctcaaattataaacattaaacgaaaaaaaaaaagaaaggtttggtttcacatacaacgcaagccaagaccacagcgagagcgaattccggtgctccagttcctttttgcagagctatggcaaccgcaagagccgtcacagtagccgaatgcgacgagggcattccacctgaatcaagcattcgcttggaatcccatctcttttccttatacctaagcataatctatacaaatttttcacaaattccaactgatcttttcataataacaattataataatgcatttcaaatttgataatatgaagattgagtcaaaaggggatgtgtaatttgcacagaccaggtagtgaatagctttaggaactgagcgagagcacaggcgagcaaagcggagaatagaggaagattgtaagggagaaggttattgggcgaagccgttgtggtggcatcggcagccgtgatgacctcatccatcttaaccggcaaaagcagagcagagagggaagaagcttctcttgtgtttgtgttttgttctcctatgaataatggcgccgtcggtggggcccgagtaagagtcagatcgttgaaccgcgttggatcgtccaggcatttggccccatcggatcaactggagcgtggagtttggactaggctgtctctttgtctcttcttctgtcaccgtccactcaaatatattaaacaataattcgaatatgaaagtggaaaattgggttgtttggatgagaagaaaagttaaacagaaaagtgtgttccttcggcggctaagcaaaattgggttaagatcgatcgcccccagggagacgtaatgtctttagaaatttttctagttatgattgaaaattctgtttacaacctaattaattaattttacatcatgcttcacaatttgtttctcctttcaaaatctcatttctatctaattttataagtttaataacacgtaattttcgtgtactaaagtttcgaatttttatatttaaatttttatttagctagtaaaatttgacaaaatttttgaatccaataattttaatagtttaatttttttttttttttaacaatttgcaaaattcaagaagcggttacatgtcaaaatttcaacccaaaaatccaaattataattaataattttcgtccaaattgatctctaaccatggatggtattattataatatacttgctaagtacgaaaattgatccaagcaccgagcaaattcatgttgtt

SEQ ID NO: 3528 - DNA, 1635 bp, Cannabis sativa
atatatatatatatatctgatattgtatccctatttagcatcttattttctctaatgaattgacattattgtcttctatgatagctttatacttgaacatttctctatgagtacttctaaagacttatggttccattcaatgttatcaaattattgttttcttttgtttttagtcacagtttgagtaagctcttagacctgataatcttacataattttgtaaatttgacagttgatggacttgttctttgcaataagcaagttttcagaagctcatcagagcaaaatccgaatgcaagtcaacctagtagtgacatgccggccaatgtttctaggggaagcgaccgtgaaactgccagtttcccatttgtagaaggggttcctttcacttccacattatgggctggcatggaaggattccacatgactgtcaatggaaggcatgaaacatcatttgcttatagggaggtaaggtacgagtattctaatatcaatatgctatcgttgttcttgaggagttaatttttcttttagctaatttcattttgatagatgaatactgacattttcatgttttggtttcccttttcctacaaatgcagaaactagaaccgtggttagttaacaaggtcaaagcggctggcgatttaaatcttttgtctgcattggccaaaggattgcctgtttccgaagatcatgatgtagttgttgatgttgagcaactcaaagctccaccaatcccaaagaaaagacttgtaatgttggttggggtcttttctactggaaataactttgagcgtcgaatggcactgaggaggtcttggatgcaatatgatgctgttcgttctggggaagtagctgtccgttttttcattggccttgtaagtgatctaatgtaaaatctactgatttattgaacaaaatctttcataataggcattatgctcacttaaaggtgttaagtaatcatcgatcggtcttatgtctgcagcacaagaacaaacaagtcaattatgagctgtggagagaagctcaagcttatggagatatccaactgatgccatttgttgattattatagtttaatcagtttgaaaacgattgcaatttgcatcatgggggtatgttgacactttgaatatcaaaaccgaaatcaattttctcctgggtattttgattgcctagatctatgtccttaaatgcaagtaacaaaaatacatctatcagctttaagaaccatattttcatatgataatatgcagggaaaaatcctccctgctaaatatattatgaaaacagacgacgatgcttttattcggattgatgaagttctatccagccttaagacaaaggcatctgatgctttattatatggtagcatatcctttgaatcatcaccccaaagggacagagacaataagtggtacattagtgatgaggtaaataaacatcttactacatactactctttgatttggatgatactgtcttttcttcattcataaaatcgaaattggcaatgaaagagtgttgtattgtgcaggaatggcctcacgctttataccctccatgggcgcacggtccaggttatgttatctctagagacattgctaaattcattgttcgcgggcaccat

SEQ ID NO: 3529 - DNA, 894 bp, Cannabis sativa
tttctaaataaattatagctctgatacaatccacaaaagaagaattgatctttcaacaaggtgtggatgaatatagctgcaaccatgtttcacctttaatagttgctagctaagaatttgaactaacaaacaaaatattataaaaagcattttctcaggaggaatttttaagagttgatgaaaccacatcgaccaaatatatgaaaagaatctctatgcatgctaagattattttcaacagtagtactattcacataaaaaactaaacagaaataatggcctccccatctagtctatgattctctagctagtgatcctaaagccaaaccaggcattatgaggcaccaagaaaagcaaaaatagttaaagaaaatcacctctgatgagcaatggagcgcttctttcctttcttctcgtcaataactccattaactagagcagcctggcacaaaattatcattatatgttaacaattgtaatggtggaaaaagaaaatcttcagtgtgcagtggagtaactataatagtattaccatgccctgtttccacttgataggagtaccggttatctgggttgttccttcatcggagaatgagaaggattttgtaagctttgtgtcttcaaaataaggattctccgtaaaattctggaagaaaaaacgccagttagaatgtcattaattcgagtaaaaaagcaatccctttacttaaatttatagccagagaaagaaacatgcacacttaagggaaattaaaggacaaagacagcttacaaatgttatggagtaccccgattttaaatctttgaagtcctccacatcaagagaatccaaatgcttgaagatctatacaaacataaaagagcatataatgaatcaacaagaaagaaaaccga

SEQ ID NO: 3530 - DNA, 2175 bp, Cannabis sativa
gttattacactatgcagaataaggtaacccgtcttgcttctattgggggtgaaggtgaaaccatatatttatgttctgatcaggactctgtgtcaattgataacgaagtgcaaagcagagaggagaatgtcctatctgatgatgatgctgaaatacgtgatttaatgaataaagttgaactgatgaagaaggagcgttctgttctttggttgcgggagtttagggaatggatggatcatgattctgagaattgcatagaccacagtaaaaatagtgggacatcatctccaaggggagagaatttattgagaataaagacaactcaacgacatgttggtgaatgctcaagatatgtctccgactcggtcaaagcttctggagatgagaatagtataagtgttttggattctgatagttccttcatggatacatcttctggtttgcatgcccatcaatattttgatcaaattgttttaatgggccctacccgtgtaattagtccgaatagcatggggagaatggatcttaaggaggagtattcaaaagtttatgaaagagttaacagtttatctgctcaagctaaaagttcttttgctgatacctttgctaatcaagttggtcctgggatcgttgaaaatgtaagcatatcccctctgactaccattgatagtatttcagaatctcattcctctacacatcccggatcacctcctcagtaccgagaagatattcttcatcgtcgtcaaaacctagaggaagaaatcctgcagttatctgctgattcatattcagtggcttcatcagatagtaatactagttgtagcgacgaggattcatatgcctttgggccaatgtctgatgttgatcagtcacccaatggaaaatcgttgaagacaatttttgacttgcatgcctgtttggaaagttttgaacacaagtattgtgacccaactcatcgaatttctcaagtaagagaaaatggtcagtgttcagctgattctcgtgatgttgttaaagatcagtccattaaatcacgcggcaatgattgtcttgaggatgaagacggtggagatacccgtgctttcaaccaaaaggatgatttattaagaaagaaaaaaggcaaaagaaaaacaaaaagaagagttgttccactggtaaatgataataatttggttgggaaggtagaaacatgccaaaaatcaaatggcgaacttgattgtcataaagcagaaatggtaaaagatcaacatgttggtgaagagaatcaagtgttaacaagtgttgacagaactaagctaaattttgatgctgatgggtttccgtcatgtagaaagaatgatgattttatcgagaaatatttcaattcaaatgtagcagattcaagaaatgatgaaatttgctcgcagtatatgcgttgctactgtatacttgagaaggattctgtgttcggagaaaggtgacttttcccgaaactcttcaaatcattttcagatgtgtttaattgggttagttgttgatacgggttgtctaataatttgctgaacatcttttaaacatgtgaattaagaatgtctttttttttggttgacagtgaagtttttcccatcattgtttgtttagtttgatcatgtgtacaagatgtatttatttatttcttgtattaatttcaatcttccaaaatggcgtaatttattgttattattatatttatgtgcagagatgtggctcttgtaatgagcagtgaaaagaagctatacattttccttgtttgcaccacaagggatggatcaggttggtcttggaatttttcttttcaaggttaataatgatgatagttgttctgatttgtgtttgctgaagcttagcataatatattttgcagaaagtgtctcaagtttaatggcttgccataatgttcaaaacatcagtgaagtcttagttggtatgggacttcaggttgtaaggttagtcggtttattatatatatttattttaaataattgaacttatagaaattcacttctctgatgatatactcttcttcggttgaggcagggtgtctattgaggagagtgcaacctacctatttattaccagaagtactgaagaattaagacaattactttgtaccttacaaattttcgattcgtttggagtcgataacaagtgttcatt

SEQ ID NO: 3531 - DNA, 1350 bp, Cannabis sativa
agagagagagagagagattcaaaccctaatttctgggagtgtacggacaaataaaacaacaaagaaccttctatttaattttaaaaccaaaataatttaagcaggatatatcataatgataattaaaaattttaataataacaaaaaacgaatgataaaagaatatttagccacctatcttggttcacaaacctctgtcattctcttttggaatttcctccaagttagaccaagattacctcccaaccgaatcactcgaccggagctaccttcgaaggcaaccccgccacctctttcttctcctccttctcctcaccaatgtatcaaactatatatcacaaagagagcaataaaatcgtttcactaaatacaagcagaaatgcaagaatgtcaaagcgagtaaaactgtgcaattacgacatgtgttggttgttggacgccatgtctggagatggttacagtttcttaggcaagttgtaggtcttcttcagaaatttggaagctgcatcgtcgttcctgtagcacagaactcgtaggagagtgtttggttcggttgggttccattgcccagaagtaggtggcagtggaaatttggacctggcagaggagccatatgtctctagtgtcccacgtcggaacctctcaatgaggctgtctgtttcggttctgaaaagtggaagcacccctctcacagctgttgaaaatttatcgattagctcggaaggcaagccatctccattggcccagaatagatctttaagggatttgaaatcatcttctattatctgagaatcttgcttggagaatgcacgagagggaccgccagcaagcaaaactaacaaaaaaccgtcaaaggaagctctcattatgtcggtaataattctcgtacgaactctctcatgtacagcatccgaaataattgacaaatttctttccagctcctgaagaaatggttcaatcctggcggaagatacttcaccaacatataaaccatcccacaaaacatgactgagatcgtggaaaacgatcctgtatgctactgcctcacaaagttgttggattccctcgacacaagctgctggtgagagttcgaattgtttttccaaaccgttagaaaaatcttctactttagcagactcagagttcctcaaatgagtgattacccttttctccaaaacttctaactcactcctaatacgttgtaatgtgtttatacgaacacagagctgttgaattccgaacgagttatctccattcaatgtagcaacctgagagtttctttttggagggtttggtgatttttctttcttcttgccaaagccttggaactttgatcctatagtacatctg

SEQ ID NO: 3532 - DNA, 1288 bp, Cannabis sativa
aaactttaaccttgaaaccacatttgaaacacataactgtatatgtatcgctaattaaatgtcataaactaactttcacaacagaatagaacaactcagatcatggtatgtgcatatttatagctaattgaataaatgccttaaaatcagatcatggtatgtgtattcataaaaaaaaatctgccttaaactaactctcacaacaaaacagaacaattcagatcattgtatgtgtacataactaaaggcatttaactaaattacaatcagaaagaaatgagtatgttatgaattgtatgtgcatatttatagctaattaaataaatgccttaaaatcatatcatggtatgtgtattcataaaaaagaactgccttacactaactctcacaacaaaacagaacaactcagatcattgtatgtgtacatgactaaaggcatttaactaaattacaatcagaaagaaatgagtatgttatgaatggattatgatgtccattagttcttccttcactaggtcccaaattgattggtacataaccatttggactgatacatttttagagtaaaacgagataatatcatctactatatctccctctttgtctagaactgatccactttcagtctcaattcttgaaatgaaagtccttgcactcaactcagcagcttaaggaatagctatgagtttgcatcctcttctttggcctatttgcatcttgacttcagccaaatgcttctttcttcttctttgtttctttccattaactgtgaatcccactcacctcgttcctccattttgtccagcataaacaggcgacagtttctttagttgtttactcccacctctttttgattccattctcttatttttctttggcatgtcgtagttttccatgaatctaaaccccaaccacccgtgaactcgcacactattccaccataatttaagtcattcttgaaatgcttgagtttaaacatgtcaaatcgaaagggagacggtccccatgatggcggattcagctcaagaacaatcgggcatgatctgacacaattctcacatgaacattctgtctttaataaggaaacaactcattctacttgttagtgaccagaaatctatccaactatagcaaatggggttttgtctgaaatttgaccatgtaaatctcccattattcaacttgggatcaatcaacctcaattttctaactagctcatcaaagagcatcatgctcttaatgttaatagaactacttagtttctaactaacattaaaaccaaccccca

SEQ ID NO: 3533 - DNA, 1126 bp, Cannabis sativa
taccctatatgtatatgggaaagggttgatttaagtgggcccaccgaaacagcaaaatctgatggatattatcacaacaacgaagacaatttgataggaaaccacaactccgaagaaagaaaagctagcatgttatgatatgatattcaaggacctttaatactaaccactaatgacaagactagagaaagtgacaagattacatgtaccccatttatgatttattatcaccatacaatattttattccaaactggaacgctactaaatcacagtgcaatttaaatcggtccaagcaaacccactaggaaccgaaaaagcacgcaggggcccttacaactcactacccaggccatgccggccaaagccaaacaaaacccatatgtctaattttcgaataaaaaactcatagatttttttactaaataaataatacccacccaccaccctaatttacaatgaaagcacttgttaccatgtgatgactattttattaaaagtataaatggcacattaataaataaataaaaaatgtaatgttttccctaatctaaacccacaaacagcaacaataaagccaaaaactgattttggaaaataataaaataagatataggagcgagaaatccagtcaccaaaaaaactaggcagcttgatgtcaccataattaattttttttattttggtttttttgcgtgaaagtgatttttataattatgatggccgacatgaatcagatattttaattaaaaaagttcaggcttttatggatccaaatcataaagatatataagaaaatggcatcaaatctaatccacagcactatttccataaaggaaaaaaaaacgaagaaaaatagaaaaacaatcctaaactacatctgttgagatatcaaaattaagctaataaataaaatataaatacacaaacatataaacatgtctacataaaagtaaagagattcaatcgcatagccaagattcaataagagtttgaacaagtcagtatactaatttttcgaaagaaaaaaagaatttctttcatgtataatattacataaacatcaaaaaacgaaaccaaaactcagattaacgagcatatgatatgtcagacacattttaacaaaa

SEQ ID NO: 3534 - DNA, 760 bp, Cannabis sativa
gctgctgcggctgctttttcagctgcagctttgtctgatgatttcttcttccagggccaactcctccggtccatttagactgtgatttctgagcccaaataaacttaaattattcaaaagagcaaaacaaagggacaaacaattttcacaattaaatagattcgcaaatttactggaatttaagcaaaaccaagttacagataggaacacaatttttatttaggagcggttcgaaatttccattataataaaaatgaaaagtaatgggttttcacgcagtgcagagaaaaagcatatcagaaaaccatttgaagatttacaaggctattttgttgtcccttttagaatttttcacaggcctgctgatattcacgtcaattatcaagaaacactcttattaatttgcaaacaaattattagttcagagggttcggataaaaacatgggtaattagcgcaatttacaaaaaaattaaaccaaacaaacatcagtgaaaacaattaaataaatacatttaaatttcctttagctacagtgtgatttcttcaccgaacagagtacccggatttattccaccaaagaattctatagacaaatctcctagttagaaaaattatggtaaactgtaaggactacagcaacgttcattttattttgattttttttttcttttttttgaggaaagatacaaaacagcaaacgcaaaaacaccattactagaaatagtaatgttcgaataccacccacgaaaaattatact

SEQ ID NO: 3535 - DNA, 709 bp, Cannabis sativa
aaaattttaactactactccattctacaatctttccaactacttaaggtaagtgttgacaactactaatgatgtgaaggatgtccgtcactaaatgtatgatgacaatagaacaagaataaaacatgcaaaagcttttcatatcttggcaggcaggcccgcaccaagatatcatgctttagtggaaccagtgaaataatttttattaatagcctgaaactgacaagcaagcttctaataaaactgctcgtaaatatccactgtcaatctgatagcccaaagaatggcagtcaacagaaacagttttgcaggacatgtcaataaaagagagcacaaacagaacactcatgcaagaaccataatcatagatttgaaatatatgccaaggcatttctaagcacctccatccacttctcaacctaaagagtacatagtgacaagaattatagcattcctgggctatcaatatcattcttgctcaataacaatatcagataaaaaggttcctaaagaaatgaaacactagaaggtgattcaagaattttccatgcctattgagataaaatagattaaggttgagctcttctattttcatttttcatatgtgatttacaaggaatatgaaaattatcgcttacacaaagcagtaagaactttgaaaaacaatttaacaaaccacataacttaaccaaaggtataaatgcttgtat

SEQ ID NO: 3536 - DNA, 2257 bp, Cannabis sativa
acctgcatggcattcgagatgattctagtgtcagaatctttctagccacactatcaaaaataacacagcagtggtatttcaaactttctctaggatttatcgattactgaaatacacttaagcaagcattctatgatcaattctctccgtcaaggcacagaactattaagcctaatgatttgatctgcatcaagtagcaagaagatgggcttctaaaagatttgaagcaaatatatcagacaatcattttttgtgtcttaaatataacataattttacatttcccaatgaagtagtttattatgatgtaaattgaacaatgtactagctaaggacatctccaatgtaaatgtaaattgatgatttattacgaaattataaatcactttataaaaaatttgctctaatggtgtggcaaaaattgattcaaaattatcacatagaaaaatttgatccaaatttggatcacataggacatgacatcatatttcaatcacaataaatgcattatttttatatttatttttatactatttttagtattttattattacatttaattattgtattaattataaatttttaacatttatttttattgttctatataatataataataataaaattaatgatttttattttatattttaaataaaaaatattaataaaatattatattttctatcaaattttataattgtgtattggaaaacaatattaaaaattaatagaaatatatgataaaactattttataagtcaaataacacaatttttacatttttatgggtagtccgggtaaggattatgggttttatgattgaattcattcttcattggatgatgaccgatttaagtggggagggggagggtaatgttgaattgttgattctatggagtaaatgctttgtgggtcaattagagaatgatgggactttagaggcatcattttcatacattgttatgctatttattaagagtaaaggacatgtgcattgaattaccaaggagagaaaaaaagaaaaaaatatccattcttctcctctatatttaaaagacactcaatgtttattaagtgctattattttcatttaaaaatagtatgattattcttttttttctttcttttctaaatataataaaagtataaaaaactgtggaataatctccaactgttgattatcattaaaatgaaaagattacctttaataaaattggttatttttaatcatgaaagtttgctcaaaactagtaggtcaagctctcaataagcatgtatgagattatattagtgtcaaatacatgaagaggaggatcattgatttggtaagattgcatgaaaatggaaattgtgtgctaaaactaagtgagtactaataaaattccaactaaaaaacactaaaaaagaaaattcatgatgcaggtaaaaaatttgttaatttatttggtgggttaaatatatatatatatggaactagaaaacagtcataagcttacaacaaaaattccaactaaaagtaaaaataaaaaatcattacacataatgaaaatgttaatttaacattaaagatgtaatcatagatatgaaaaatggaaaagttagtcagaaaactcaattttattaagagagcttcattattctcattctaataaataaatacttttgcttatatttattatttatgttaggtactgcacacaaaaaaacttaagatccccgccaatccgacggtcataattaatcattacgattacatatatagtgaaaggggaaaatgtgattattataataatagttgaatccttgattagtgtagtctgcagtcgaccccaaatttttcattaatttcagaaacaaagaaagaaacaataaaatgaaaaatggaccccaatgataataaaaaaggaagaagcaaagccccgacaaaattccacgaaaaaaaataaagaaaagaaaagaaagaaccctgctttaatttttaatttagtttaatatatattttttaattattcctttttagcttttgtctttgttctaatattttacaattgttttcgttttgtttgaatgcttagtcttcaatactaagaaacgttacaattggattttttttttttgataaagccctattgtcacgagaactaattcagtatatatgttttttttttgcagcataatataaatagtattatctttgaggaataatataaatagtgtttttagatagaataataaatagggttttttttttttttt

SEQ ID NO: 3537 - DNA, 1077 bp, Cannabis sativa
aaaaactaataatatgcatttaatattatagccccatgcctattaatttgtggagtaggcatttattataaattaagaattaataaagtatagagtcatcattatatattgactataacttttaatcattagatagtttggattacctacattgcactaatattttttctcaaatatacaaatataaacatcccaatatatattgaattctaatataaataatataaaaaatttaataaaatgagataaagataatctagaattttattagcattttgttaatatattgtaatctgaatttagttctaattaattcatgagaaatctacatatttatatctatatatttttaagaaatataaggtggtgacatagtactctaaaatctctctaactagtgttatttgttctctctttcattctcttatttatataattttttattctcttgattctctttattattgattattaattaatttatttattcaatttttatataaatatgtttatagctttatatctaaaattgctcaatcacagtttaaattaaaaaattgctcaattaattttaaaataaatatcttataccaacattcaatatatataaaatacattctaaacattcaatatatataatacattctatatatataataatttttatttttttatttaatattttaaaaataaattaactaatttttaaacttatctatgtatcacaattatatatatgtatattacttttcaattaacttttaaatttatttatcacaactatatttattatttttgttcatcacttgtgtttctcttcgattttcttcaaggatccctactattatagtaaagactcggtttgaccgagttaaaaagaaaaaattatatatatgtatgataataagtatgataataaataaattaaataaataaatatatatatatgtatataaaaaataaagtagagcccgcaaactccatcactggcgcgacttcagcgacccctctctagttaccgtccggccccacgcgccaaaccattcaaacccctaggccccgacgacctcaaccccc

SEQ ID NO: 3538 - DNA, 805 bp, Cannabis sativa
atttacagattagcaaatcatctctaagagtaaacttttttaatgatgcttctgttttttcaatcaattcaaaaagaaaaaagaaaagaaaagaaagtattcattttttttttggaacaaaaagaagtgttcattttggaatgccttaaatcttgataaaagattcccaaaatatattgtaaacaaaatgtcatttatttgtcccaccaaccaaaccttggagtaacattccactacaaatattaatataaactactcaaacacacacgaaacatgtttaaaattgaataatgaccacctaaaagatattaactccaaaagattataaattgctttaacaatgtatgtagccagagaaatgcacaagttgcactcaaattaattaaataaataaaagacaaaaaatatgattaattaaaaagaaaaaaatgaaatagcatgaccaatcacattactctatcttcaacttgagaacagagccgaacagatcatttgtttgttccctaaactcttggagcaaaaaaatctccaaacacgaagcagccatggctgttgtttcagattcttcttctttgattctcttctttttcatatgtctcctctctctatctgtaatttcatcatctcattctcacccgatcgatgatgttccacagactttcatcgtccacgtgtcaaaatcccacaagccttcctttttcacttcccaccaccactggtattcctccatcatcaaatccctccctccttctcctcaccccactaagcttctctactcctacgaaaaatccattaatggcttttt

SEQ ID NO: 3539 - DNA, 2002 bp, Cannabis sativa
ataaacacccctaacctaacactattttgaattgtaccaagcacactctaatttaaatattttgaatggttctttaaaactgtgtacaatgttttcttcacacgaaaccaaaagggccgcctagagggctacccaagaaaagaacaatgacgtatgcaacaacatattacaccaaacactaaattccactttaaataaatgttagtaagggaaaattactctgcatattttagatgcagatatcattactgttaagaaaccgcaaagagcaaagaaccagccaatgcatttcatttcagccttttttaggcatggctgcgagccttgtgtacattctagccattgattggtatcctctgatatcaccagatcgcagaagattacctgtacacgttaaaactacagagctaagtagcaaacctatctaaggtttcaaaaacatgctttctttaggaaataggaatgtttagaaaaagtttgtaatcagaggtagcatgatttctttaggaaatgctaatacacaagattatactagataggttacagacaaatctataaagaaggttaaaacatttagctaaatcctttgacttcacttttgaaatgtgaggtgatgggtccaactccatgggtgcaaaagacaaaagcagtaaaactaacgaccccattaaagtttagcaactcggaatattattctgctttgcttcaacctggcttttattctataatacattcataactgatacaccaaagacttttagatataagacaatttagatggagaactagcttacctgaatcacagttgaggggactatcaggctccggatgtgccatcaaagcaataatagctctgcaaacagattggagtgtccaagccgggctccatgcattcttcaagatatcaaggcaaatctctcccgtctacaaaagaaaaacaaaattaaaaaagaacactaccaggaagctatttaaagatgcacatagtatacacttttaaagatttcattaacatttgatgctccaattaaagattgaccttattcaagcacaatggtcactttataaaatgaaaatttaaatagactaacaaatccccctcataggcttcgaaatttgatttgccgccagaagtcccgtgagttgtggttgaggaacggggaaagtaataccaatttcttccatgcttctgctgttatcaaacgacaaaaaactttatgggagtggtgacgaataatgggatggattggataaggggtcgtgtgaatgtggaacactattttcagtctagattcatggaggtcttcttcacaactacttcagatttggatcccgacctgtttgacttggttaccccaatgttcacgcggcaggagaatgtggatcttgtcaaggtgacgtcacatgatgagattaaagaggcaatccagactttaaaccaaacttcgcttgtgctcattccaaagaggaagagggctcaatgttttgatgattactgctcgattagtttatgcaacattgttataaagtgatctctaaacttttagcaaactgcttgaagaaaatctttcctaagttcatttctcctcatcattttgtccctatcattgggtccctaggagatagatagtggaaaatgggatcatgacgcatgaaattctagattcctttaaaaagaaatagagaagagttgcgtggactggtttgaagcttgatatgtccaaggcctttgatcgagtggagtgggatttcttggatagggaccccctcagcctttgggtttgatgaaccattttgataattgatccttaaatgtgtgacgggcttggtgcgtgtaaatggctgccctcttaaacagtttcaaccggaagaggtcttaaaaggagattcgttgtcgccatacttatttattacttgaagtgaaattctctcaagacttcttttgctggcgaaaatgagaggcaaaattcatggggtcaaagtatgaagctaagatcggcct

SEQ ID NO: 3540 - DNA, 753 bp, Cannabis sativa
tggttaaacatgtcattaaggtgactcgatcgcttgaaaaataaataaagaataatgtttcaaaaaaatcaattaaaaattgacttctttttctcaaaattctgaatcttttgatttgctactactattcactagtccaacctcacaatttataaattacatattggaaatatcttaaaagttagcaaaacaaattgggtgagtttaggctaagatttaggaaaaaagaagatcaattaataacaataagacatgtttcatgattataattgttgtataaactttcttcattacaaataaaccctatagaagctccttgcgatttaacaaccttacatttacaatttttcaagaatataaaaacctatgttagagttgttttgacccctcataaatattttggtagcaaatccaaaataaattgattttgaggccaaaaaacaccatattatataagattagagggattttttcttttctcttttataaatagaaactaaaattgttgcttgtgtataaactcacaagggagcaaaaaatttctgccgccaacaagacattcctcagctagaaaactacaaatttacaggttggaatgatgctaggattcaatgcaaaaccatttcctctgggaggtgctgaccctttcctgaaattttatctactataccgattgttgccgaacgaacctgccatgaaagaagatgctttatttttgggttcacaacagtgcttttggctaacatgctttag

SEQ ID NO: 3541 - DNA, 870 bp, Cannabis sativa
cctgcaacaaccaatacaaggcatcttttagtacttaaaattaagaaagtcaactatggaagttgataaattaatcatagatagtcatacttacattgtttggagcagaaggaggttgcatttttgttactgataatatgatgtgattcattcaatgttgattaatttcatgttcaagatcacaactttaatttcttggtcaccaagagacaagcatagtgtttaaaatctgaagaaagacttttagaagaagtttgtttattatgtcatgtgttatgttaagaaaaagtcaaaggagagactttaggaggaagtagaggagttgtttagagaccttgactttgatgagtttacttttgatgttgtattgctgacgtggaaactaatacgtcagccaaagtcacaagcaagattcattcattctctcttttctttcacattaaaagacattgtcaaactacaaagaacaaaacctttttattagttacagttatttagttagttattctccataacaacaatatatcataactttttctttattctaataaaataaaatggagtgtagtgtatcccttaccatgtgttctcacttctcacaaccatgacgtttggtcacttgtaaaattcaagaaagagaatgaattgtagaatagtgtgttgaacaacgagaaggaaggaaggaaggaactctcctttttatattcattcttaaattccaaaactagtaatggctaactcttttggattttcttttctttttgggattaattacttactaaactaaactagtatagtattgcaagaaagattgtattccttttttattttatttttataaatgagcttttccttttctttttaaatgag

SEQ ID NO: 3542 - DNA, 1699 bp, Cannabis sativa
aaagaaaactatgaacagtgacccgacccggaaatagggtataagataaaacagaggaacaataccaaacgaaattcgagttcgaggatctctcagaactcgtacatttgattcgaagccaagctatgtatcaatggaggaagttcgagtttttcgaggagaaattggcgggcaagtgcgcgattcccgatgacgtccaaggcaagatccagtgctgctccagcggaagagggaaggtcgtgatcggctccgaggacggcgccgtaagccttctcgacagaggtctcaacttcaattatgctttccaggctcactcttcctctgttcttttccttcagcagctcaaggtattttccccctctttctttagttctgttctgattagtttataggaaagtgtagtttgaaaagaattagattatgtcgaaactcttatgggtctggtctactctgattaattttgaatcaaggtaagtttttttgaattgggttcgggtattaatatcttcccaatgttgtaatttgttctgatcacgacttttttatatctttattaatttagcaacggaactttttggttaccattggagaagatgaacaagtttctccacagcaatccgctatttgccttaaggtttttgaccttgataggatgcaacctgaagggtcaagctcaattagtcctgattgtattggaatcttacgcatattcaccaatcagtttcctgaggccaaggtagtgaaggcactacatattggttcacattaagttacattttttaatttgaatctctacagtgatgaactttttgatttacttaaattttgtcctacagattacatcttttttagttcttgaagaagccccgccaatattgctaatagctattggcctagataacggtgatatttattgcatcaaaggagacattgcacgggagcgtatcacccgtttcaagcttcaggtggatggttcttctaacaagagtcattcctcaattacaggtctggggtttaaggtggatggtcaaacccttcagttatttgctgtgactccaacctcagtgactttgtttagcttgcaaagtcaaccgcctaaacggcagacccttgatcagattggatccattgttaatgttgcaatgagtgatcgttcggtatgcattttgcttttgtatctatgcttcaatattgtctgcttttatggttttatgttgcaatatgtcaatattgctatgtgtctatattgttacttctagctgaaaagtcataaatggaaaagaaagaaatattatcgtgattggaaaggttatacttatagtatctgaagcttgtggagtttttatttcatacattggaagtatttattttgttataactagaaaaaggtactggaatgtaactgaaagaaaagaaaccaatcagtaatatcattaaagtttcatttatgcaataactaataaaataaatgagaatatatagctcggatacagaacaaaatttgtttatatgtatcaagttatcaaggggctcgtttaactgtaatgggtaggaaacaacggagtgtttctgtttacatacactgatgtgtttacttagataaatatgcaactatttttgtgcactctacatatattccttgaaatcagttaaggaaaagacaatccttgttttctggttttattgtttctcatttgtt

SEQ ID NO: 3543 - DNA, 2142 bp, Cannabis sativa
atcaatatggattgccaattaaaaattcaggatcatttactatcattctctagtagtataattatgtctgatcgtattgaagttgcccacttgttattttttggcagaaaaagcttttggggaagatggaaacttaaagcaaccaaaggaactgtccattaataaagttggccatggtaaggttgacaacccctttttgggttatatattgttattcttgttattgtgttgtttgcctgtaaattttaggtctaggtagttgtttctgtcttctgctttgtcttatggaaactaatcttgagaagtttggatatgtttacgcagcattacatgagattgatccagtttttaaaagcttctcgaactctgagaaagtttgcagtttgttctgttctttgggttatgagaagccaattattattcagtctatgtacatatttaaggtattctattttctttccgtaggtggtttgatatgttattgacatttttgataaattgaacacaacaaatttcttcacatgaagtttgattttgagattttttgtggatttatagcaaccaggtattgggggtgaggtagtgcctcatcaagacaactcgtttatctatactgagccacaaacttgcacagggctgtggttggccctagaggatgcaacaacaacgaatggttgcctctgggcaatccccggatctcataaaagtatttaatactcttcccagtttcctttaatttatttttatgtacagtatataacttttacattgtgtttttttcactatgcagatggccttgtcagacggttcatcagaggtgaaaatggggtaacctttgatcgaccttcccctgattatgatctcaaagattttgtgcctatagaagtaaaagctggttctttggttgttattcatggtgatcttattcatcagaggtcagttggggttttctcctctatcattagataaaaattgtattgaattttatctgtggaggtcagttggggttttctcctctatcattagataaaaattggtctcaataatatctttttttttttttttggtttttcatgcacccaacagtttagagaaccagtcttctaaatcaaggcatgcctatggcttgcatattgtagatacggagggttgcacttgggctcaagataattggtaattacacattacaagttcccaaatatttactataaagaaaccagctgagttgttttctaggtaccaagaaaatgattggttttactgtgcaccaatcgtaaacatattattaccatctttaagaaaaatgttacttgtaagcttgcgtagtagcagatccattttctgctttttattttgagtgagttatctaagaaatgtatatttatattgttaagcatcttgtcggcgtctgtgaaatcctttaacatttatgcctctttctttaagatgttggggattgagttgatacttgacatccggctattctagttctcattatcagtaatttgttattgtgtgtatctgaagccttcgtcttttatgtttctacatgttacattagctttaccttttttgaagctttactttttgtttgaattgagtacacacttgttttatcttgactttcttttataggatcaagcggaaggtagagccaactcctctttatacatcataatctaatacgggaactcatctccaatctgttaaaaaaagctgatatctgaatctcaagctgaagggtttgctccagtggggactctagcctgttatgttgactgctcatctagtctttctttcttttggacagtaataatcaatttgcatgaagaatgttttgggcagaaaaaaattaataaaattgcccgtctcagtaaagtggttttctgtataaacttttacactttacagtacatactcgtttgctatataagcataaacagaaacccattcatatctcgtgtttttttttttaaacattttatatctcgtgtttgttaagatgaactataagttggagtaagactaggacactagtttggtgtgcctggatttttactccttaaagtttagactatttttaccaagattgtttctgtattcaatattaaagctgtacattcggacacgaatgaataaggg

SEQ ID NO: 3544 - DNA, 1024 bp, Cannabis sativa
atcagaaattcattaccaagaatactagtgtaaaatgagtatgcagacagatagaatgattgtttaataaagagaaagctcaaaccttatctaactcagtcaaaagtttataacttgccataatcaattccaaagactctccacaccttaggatcctgaagacctcctggaacattttgcttcacaagacatgtaccaaaaagtaaagggaaaatccacatgataacattgcataacactagatgtagtacatgtttagcggagataattgtaagaattgttagtccatgacacgatcacaatttttcccataaaagaaggttataaaccgtttccattcgtgctaaaactaacgtaaacatacagagcaaaacagagaagaaaagagaagattacttggttggtggagttccgttcagcgaaacaatcgaaattgcacgaacggcttcaagaaatgcgagacctgtttaagaatcaacacaaagcaaacgataaaattccttctcaaacaactcaatgaaactccgtttggtttttaagaaaatctcgctacgtaaaaagcaatcaaactagaccatcatttcgaactctaaaaatcatataaataaatttatatgtatatgtaatcgtactatcttcattagcttcctgagtgtctttagcaccagaaccattgataattgccaaaatgttttcttccgcctgtccccttgtcttctgttttataattccagcgacctccattttcactttcacaatcacaatctttaaaccctaattcatggccccattttttacgctggatgctattttcccgccaaaatcgattacagctaacgagtgttcagttgagagaggaaaatgtaaagtttacagtttagagaggaaaagtttgtttgttgttggtatgtcagtctctctcttcgatgtcagtcctttttatgctttttagaggagaatgaaaccaaattaattttatgtttggtttaaggatggatggactaatttatttattttattttct

SEQ ID NO: 3545 - DNA, 3319 bp, Cannabis sativa
ttgggtttaagtcctaacggttttatttgtgggcacttttctaaaatgcctcatattaatagagttggtgaaatacttatattcaatgcaactcttgcttattcttccgatgtgaaacaggttgataccctaacaattttaaacccaaaattcagattttccttatgtaaatttgtattttttttttcaagcgggacatctttaagaattagtttccactcatgctttcaaaacacacctcaaaggactagtttttattagtctttatccttaagtatatttgactaagtactctaatctaacaataatttcttcaaatagagactccctatactagtaaaaaaaaaacaaaaatattacttctacgtacctgctgttactatcaattgcttaccttttgtaatattgaaaaacccaaattctcctacataaatgtgtatgtgtatagtaggggtaacataaaagtaagtacttgtgagttgtgatcattattagtagtttaagtactccatttgacagattcttttggatgcattggagtaattattctgtaatttacttttgtagtttgagaatgacagaaaactcatcaattataaggcaatagacaagtgattcccgcagtttttaaaaggcatttattgataccattataacaatattacaatattatcattgctattatgaagaatgtccaaagataattaaggtgtgtttaaaaacactagctatagtgatgtcattatataacaaccatcggctagaataataatcagattccattccattaagtacactattttttttttttaagatttgtttaattagtactaataagtaattgggaacattatgctttttataatcaaagaaataattactgcatgttttatccattttgttctttggttgtattcttgaaatcctatatgcacgtatactaactatatacattatacaaattatatttatacaattaatttattcactttttcttttttgttgattatcaactttaaagtttaaactagtccaaatgaatataaactgttaccatttgcaaatatgatatagtataataattttctatgcttaaaaatacacatggtcaaatatcaattcaataatacacataattcaaaggttaaaaatgtaatcaaacataagaaataagattagagggtaggcaatatagttgatggctatggttggtgggtacaaaaattctcaaattgtggagatatttaatgagtggaggttgaacaaagttttgaaaatatacatatatattatttataagagacaattgtcttacatttatatttatgggctatatatttaaatataaataaatgattattcatttactaatgtaatgcatgtggtgggtatgtacttgattagttcagaataataaagtgcaaactagtggtgatatatattgagctttccttctattcaaaaccccaacacatagaagaagaagaagaatagcaacaattatttctctgattttagggtttattttgaccctctcagctttcaacacaccaaccccacatgtttttatttatttatttatttttttttttaaattttccctacttttgctgtggaaattatttcttcaatagtgggaaactcattatcaacatgttactactgcccttcttatccatagaaagaatggtacacaaattgaccatctgatgatttatggcaatcaagtaaatatggaaacttatatacagtatatataaatattctactaaaactagctatattgtagttgttaaagaaaatgctagctatagcagtattccaaattcaatatatatagagtaaaacaactgttctgtctagtttgtttttgcatcctgtcctaaaaccacaactatttatttactttagtagaaatttttttatttattttatttttttttatatttttgaaatagaaaatgtaattagaaattttaaagcaatatcaatttcaatcgctttaaaattgtttgctgagaacataagcaaagccagcctcaaaagctttatccaagtttcacactagacagctcaccgattaatcatcaaagtgaaattaataaacaaaataatctgagacacaataaccccattaaactttttttttaaaaaaataaaaaattacacaaaatattgttcattattttactactcttaataatgtaacaacaaaacaatatgtggccattaagtatataaatgacttcattatataatataggaatggttcatatccatatacatacaccgctccattcaagaagatatgaaataaagccaaatatatatttggtccaggtgtcaaaattaaatttctatggctgtgattgttctaagaaaaattcagattactgggcacactatcattgtcaattttagtaaatagaagggagaaaaagacatgcaatgtaaacaaaatggtggattaaactatttatttttggattattttatctaaacaaaatctaaggttatggtcctgattctgatcaagaggagagagaatctgtttagtgggaaatgcaaaacctctttttaattattactggtttataattagaaatgaaatgtgaagaaagagacaatattggcttagccagcatttattaatccactgttagttttgtcattttccagcattaaaattaactttgttctcatcttctctgtttggtctattccaactttgtaacttatatagataagtgccccattagcctgtgtttaactaacatcttttgctgtcacaagagaccataattaaacctctgttcatttttcaagactgatttaaaaaaaatcaaaaaagggattatataaatatatcacacaaatataccgttgtgtggtaaaaagtgtattcttccttgagagctgtgacctctctctgttcaaaataaagcttatatgcttaacactttgttgtccaaaagttacagattcttttttctttttcatatattttgtatttgaaccatactattgcaaattatatataatacatgcatgagaaaaacaagaaagaatattagtatttattttgaaattggaattaaagaaaaggatcaccaaataatgcttcatttttttctttgataaagaaaggtaagtataaatcatgagagtgatatcagtccctattatatagcatagcagtagcactaccaaaatggtgtatttcaatttgaaaagtcatacatgactatatcaaaactaatcttaagagatatataataacatgcaatacacaatattgggttggttttttttttttttt

SEQ ID NO: 3546 - DNA, 3244 bp, Cannabis sativa
  modified_base (1503)..(1505): a, c, t, g, unknown or other
attttagctagaaaaggagccaaagaaacaccaaggaatctgcctctgttgaaagcacaaccacgataagcttctgtcccttctacttcttgttatctctctctcagtttggcgccagagtacacattctgtgctccatgaagcaagacttgtacaacttctttcctccactccctgagttccttgccgacggcagaggctctcgcatcttttgccttttgcttcgcatggcagtttaccccaaccgccccttcgaggctcctacgaagttagattttttttcattggccaaaagttaattatttgaaataattgaaaaggagagcctttctctggaactttgggtaactttaagagcttgcgattcttgtctcttctagtttcatcaattgagggttttcgcacctgtttgtggtattcacttcttctctttgtattattatttctttgctattaaattagggatctcaatttgagtaatgatggcatctaattgtattagtaaaaatagttctgaaactttattaatgcaatcataatatcaagtaatagaattagttacaaaactaactgtatttgacaataaaactaaaataactaacagttcaatataatcagctatatttaagactccccctcaagatggagagtatagattagtgacacacatcttggacaacaatgtatgaaactgataggggaagagggcctttgtcataatatctgcagtgttgtgtcgagagggaacgtaggagattttgattcgatttttgttgacttgttcatgaactatgtggcagtcgatgtcaacatgcttggtacgttcatggaagacatcattttcatatatgtggatggcaacttgattgtcacaataaagaactgttggttgagtttgggagatgccaaagtcagatagaatgttgtggagccaaagtatttcacaagtagtgttggcaatggaccggtacaaaattagcttttcccaacggtttataactgtcttttatactattttctaacagttcctaaaaccgttggctatgtgggtgtcataaaaatatagaactttaaatgacggcttataactattgggaaaagttactttaaatgacggtttacaactgtcaaaaaaagtcactttaaatgacggtttataactgttaggaaagacttccatcaggtagtaactaatggaaaaagtctctttaaatgacaatttataactgttgctaaaagtcactttaaataacagtttataactgttggaaaaggctttagtcgaattataaccaacaaaatacactactataaatgacagttataaaccgacgtacaatatgaggtaagagagaaattacaaatgttaatgctattctccccctacatttttagaatttagattttcgatttacaatgataaaaaaatataataacagtaacaatattcttacaaacaaattcatacatttgtcaagttagattatatatatataaatatannnatatatatatataaaaaatctttataagttaaaatatatatctcaaaaaagcagtcttctccttgctctattgattcttcttcagtgaggcctacagttgcaagaaacgaaatgctgcaaataaacagaacagagatactcatcatttgcaaagaaagtccagaatattttagcaaatctcaaacattggaataagaaaaggaacatcactacggaactttctaatatgataaataaaaaggttctcaagtaacaaagaccactacttaataataagttataatcaccaatctaacttaattttgtgcttcatataaagacaaataatttatcatctagtgtttcggtaccaaggcaagttaaatggttatatgtatatatagagagaaaaaattcagcaacacacaaagaatacaaaattccaattaagttcacataattaatttctattcaggattaatcatacatattttatatgcttatatgataaaattcagacaaaaatttcactatatatatacattgaaccatttgtaattttctattagttttcatttttgcaagcattaatgtactcaaatcccactgggattatagtaaatgaaaattaagcatattcaaatggatcttaaacataaatcttttaagctaacaatatctacattctatcttagccaccttaggtaggttcacacataacatatattattacctaaattagcgataataaaactcatgaataaaagggagattgaattgaacaagctcaatatgcaagcaaagaaacaagattaaagcaatgatttaggtgatccaaaatttataaaacgtttatacagagagtagagaacaacgtacttctcccagttgatgttttatctcttgtgtggtgttaattgtggtgtatctttataagcaatgacattgtaagtttcttgcatttaaaaaaaccaaattagaaaaccttgatcaatatagaatgaagcatgccaaaaaacaaagtataaacaatattgcttattgataactaagcagtattaactaaaactaaacaaagataatataaaaacctttaaaagaaattagtaggcaatattttcaagtgttagttcagatgaggcaatgcaaaaccactctgcccaaaatttgaatttctcaattaaacacaaatgtatcacgtactgattggattaacatcagctgtttttcaatttcactttcttagtaaccaaacactttagctacatgggagttgtactaacaaataatttttcttgtgcaaaatcataaaagaaaatacgaaaagaacgaagaagtgtgagacatgtaaagtcgagtccttatctaagtatttgaaactttgtttcactaatccctgcttcataaactactatgtaaatcccatttcagataatatctttggtattctaaacaaaacaaaatccagacagtaatttcaccttcatacatttttctttaaacctatatttagaaaaaaagtacaagatgaattaaggagatgtttcataaaattctacatttcaattaaaatttctcaagaaaacaggacccaaattaatttgtgcaataaaaatatctaataatcacatacaccaaaatcagatcagatctagaaaagatttattaagaaaaaaataaaccatggtacctgaggaacgcacggatggaagataaccggtgaagaagagacgaagtcggcggccgggggagtccaaggg

SEQ ID NO: 3547 - DNA, 1464 bp, Cannabis sativa
tgacaggtatcataaattttataaaccatacctggatttgcatctccaaagatgatttctgcgagtgctcttccaccagcttccccgggatatccgatccagagaatgcttgcaatttgcgggtccttttcagcaaatgatacatcaagaggtccaccaccagtgagaactagaatcactggttttttactagcagcagccacatgggaaacaagagccatctgtttgccgggtaaaagaagactaactcggtcaagatcttctgtttcctgggataaatcgaggccaaggatgagaacaacaaaatcagcatcttttgcagtacttattgcttcatcaaagccagcatcagagtcacatgatgcgttatggcaaccagttacataatatgccttgtttacgaactcttgaaatccactaaagaggctctttgaggtgcagggaattcctagtgaaccaacaaaccactccttagcttaaagcctagaatttgattatattaatgatgtgtataagttcatctgtaaatcaatatcatatacagttcaaaatacctgtatagccaccacccaatttacttgaatcgtttgccaatggaccaataacagccaaggaaaaatcagtacccttctttaaaggcagaaacttcttatcatttttaagaagcacaataccctgcctagccgcttcaagggccaatttcttgtgctttgaggtacaaacatcttgaggtcccaactttccatacttccctttcaaaggattcccattaaacaatccaagacgtagttgaactgagaaaagattgtgaagtgctctgtctatgtcttcctcttgcacctttcctttttcgatagccgaaagggtatttagatacaagaatgttccacaatttatatccgttcctgcaaatagcagataggcaggttgatctgtaagtctttctatgagaaactagtcatttgcatttggaaaaatttaacaactttaatggaatataatttcgaaatagaaaaatgtacaagacctgctttaagaacatcagcaactgcatcttcacgatttttggtgtaatgctgatattcaaatactgtggccacagcatcacaatcagaagtaatatatctgtacttcatagcatcaaggttttgtacatatgaggctcattcaatcaagtgacttaaaattctaacattgcattgcatttatctattttattattagaggttagaactctgaaaatattattattaccctttaaagccccattcatccctagctatatccaagagatccttacgagcacaagcaggaaccccattaacttcattgtaagaacacattaaacagctagcttttccttgctgaacacagctcttgaaaggtggctgatacgtgtcctcaaaatcttggtccgtaatctattttgtagaaatacataatgaatccagttgagtttaacat

SEQ ID NO: 3548 - DNA, 4139 bp, Cannabis sativa
  modified_base (3159)..(3163): a, c, t, g, unknown or other
atatatataaaaatatataaattacaccaccaaatgttggtaccctctaaactctaaactcaattcttattttattcatgcatgtatagtgattttctaactgcattcaagaatggaggcagtttttagatttttgtgaagtttacattttttttttaattaaatatcacttttagttataataaaaataatttgtaactaaataattatatttaaatacaacttgttatcaatttattttagctacaacacttattatatgactaaaaatatttatgagttacgaaaaggttataatattcataattatactcttagagctcatttgataggttgtataaaaatcgtattatattaaataagaaacactatatttggataaaattttgtattgtattaattattacgaccataaattttaatacaatgtgaattgtattatataatacataacaaatgatctgtattaacatgtattataatattaacaaagggtatagggttaaggacttagatctcgaccctagacagggaccctagactcagatcatgaccttgacccaaaccttagacaaggtctgaggtcggggttttaggctggggttcgagtaggagtttgtggcccgaggtcggagatgggattcgagtctaagaccgaggtcgtggtttgtggctggagttcgagtagggatttgtggcccggggtcagagatggattcgagtctaggatcagatttggggtcgagtttatggtaaagatagttagtataattttatataatttatttatttatacaagtcaatatcaaacattttattgtattaaataatattaatacaatgcaattcaattcaatacaatactctatataatacaatataatacaaaacagtatacaaaacagtgtaccaaacaagtccttaatcacaaacttttaagtaagaatatagaattcatgatattttttagccacaagttttataagtaaaaaattattatggtgcataaaggtcgtgatttagtataattttcatattagttgttgtgaacaactattaaaatattattttataaatatgtttttctttaagaaaaaatattaacataattaagttttattagactcattcatttctaccatatatgattgaattagtattagtaattaagctatatatatactcttttcaaaagggtcaattaattattaaatttaaatggtatatattatatataaagaatttttggattaaagtggtttaaaaggaaaagcaataaaagattaagatgctatcatggaaaataattaaggagaaattaatgtcaactacttagaaacaaaaactagtgctttcttttcgatctagtatatgtatatatatcaattaatttaaattttccacctactatactctcacacacatatatatatataaataaattccttttcaatataaatataaataaataaataaaaatagagaaaataagaagaaaaatactttactcctacttaaactatcattttgcaatatgtgctttaagacatatccatatatgtcttcatttcacatttgatcaccacaaacacatttttatattcatcatattaacaatgagtgtatacatataatatattaattcaatgtatgtaacataatgtaatgtattagaataattaagtactagctagtctaagtcttggtcttctcttctatataatttcaatatgaaccaaactaatttcaactaggagtcaatgtcacatttgatcatataattttcaatttatttgactcattatattatatatttcttataacaataatgggtattttgccctgaaattcttatagtattaagtttataccttatgttataggataagttgagaattacattttttttattacatattaactaaatataactgtaaattaattttaattaataaataccctcttttaaaatcaaaatactaaatataatctcacataatttattaaaattagagtccctaataacacacataataggaatatggcctataaaactagatataaattaaaaaaataattaacgaaatataaaaattaaaatcaaaaaaataaaaagtgggtatatagagtgtaatttcctctatattatacaactcgttaataatacctatcaaaatataattttacagtaacgcagtccttcgataatattttattcaattttatctgaaataagtgaagtagtggatgatagttaataaattaatgcaaattaaatatccattaactatttttacgttaatgaataataaaataaaatacttttttatatataaaaatttatatttttatttttagctttttaatttttaaaataaaaaaagtaaaagatatttaatttgcatttatatattaactatttttttactgcgtcactcattcaagataaaatttgataaaatatgtatgatagaatgactacattatgtaaaaagcatagcttgataataataaaaagtttcaacaacaaaaaaaatactaattattctacttataattagatataaattaattattaatatataagatatatgatatgatgtgtattgtatattatataactttgaattggcatttctcacacgatggatgtgatattatatattattaataattattgcttatcttgacttgtattaatacctaaattaatcatcaattttatattcctaattataattttataaactattgtgcaattttatttaatccattttattgtataggttgatcactatatcctcatctttttctcttaaggtctctttctctcattcttctttctctctttcttatttatatctcctctctcaaactttaaaaataatttataatcatatcaagatttgaatgagcctaaaaaatatcattgtaatctatttttcaatgtgaacatatcaaaatgtagaaaacatatattttttcgctatttttaaaaaagaaaccatttagttactaatataatgattaattactgttatatatatatattttaatcttagttaacattcattttagaattttactcttttttttttcttagattatactggacctaaaatatttaatgatctgatctgatccaaaaaatactaggtnnnnnatattagataaactcaaattaaatcaataaatatatatgaaatacatccaacggatagaactgatctaattcaacatccaataaatgttggatcgattagatgactgaaattaattagatcagatcatatggtaaaatctaacatctaatatataattgaatcgaatctggatagacctaaaaatatttgacgtagtccaataaacacccctaggtgaaaatatctaatccaattcacattttatttataaaataataattttaagttaccatatatttgctaaaaaaagtaggggcttttacatttttacatttcataattattttgccccaactttcccacaaacctacatagccatttctaaagaacataaatctattatctttaaaattatatcttaattatgtgacgatgtgaaataatttgagtacgatacttataaaaaatatatatttaaattaaattttattaataaatttaattaatgtataataaaaaaaatattcttcaacttcacaatttcacacgaacttaacaaagaattcaaaaaaaaaaaggcccatcgttagaaacacaggccactgtaatatatgtagaaagtgggcttcttttttggattatttcagaaatacccaaaaactataaaaattttacgtttttatggaatatttctttttttatacattttacgtgtattttttcttacaaaccgttattaatatactataaggaaacatgaaaacaaagttagtttccttctaaaaatcacaaatttgtaaaatttataaatgaaaaaaaatctgtaaaaatatataaaaaagtgtgatttttgtaaaatttacagaatatagttttgtttttttttaaataattattctttagaataaactaaataaaactaatatatgagaaatatagtttagagtaaccggttatagtttaggacacttataaagtaaccaattattattatta

SEQ ID NO: 3549 - DNA, 1877 bp, Cannabis sativa
aaaaacattagaaaaagattatacaaattcaaaagatatcatctacaatgaatttcacttttctttctatatatgctgcttttgtctaaatcagttgataaatcagttgaaaataagaaaaaaaataagaaaaaaaaaacaaacaaacaaacaaatcaagatacttttataaatactttgaatccaaatctcttttatctcactaaaaattcttaaaaagctctttccttttttctcaactgctgatttcttctgtacacatatgatgatgatgatgatgatgacttcttcttcttcttcctaacttcactacctgttgtctgcttcatctcattattcaaaaaccaactgcagtaattttgtctagaaacagaaaaataaataaattagcaataaatgattgtaatagtactactagcagtataatttttattgttcttcttcccccgacccgaaatgtacaagtaatctatgttggattcctatccacattactatttaacaatgctgctgttgccccgttgttcccagctatcttcgatgatgatgatgacgatgatgttgagggcggtctatttatcttctcgagtaacctactaaaaactaacttcacaggtatgcaagctactgttgtcggcccagatgatgttgtctctggttgtttcatcaccccgtcatctttttggttaccactgccactgatatcgtgtgttagtttgttactgaagttatgtatggatgatagtgtccttgttttctggcttgatagtgaggctgttttctttggcatccttttgtgttttctttcgtatggtgaggctgagttttgatgagggttcttccttatgaggttgggtttatgactgaaattccctttcttgttgaatggtggcggtttattttctcgatctaagaaaggaaaatcataagcagtttcatcaccatcgagtgttgatgataaatgaggacgtggtacacggaccttagctgtcctcctcgcggttctccatgcttgaggaagagccgtattgccgtcatgttccattggctcgttgccatagtcatctattgttggaatgagattactagacgaaccctcttctaatgtttcgatttggatcgggtgccctataattgccttcccatttagcttactcataagagaaactataggaacaggctctttctgataccttgcttggacttttacatcaatgtctatcaaaatcgatcctgatctcccaccaaactgatgacggccatcgaaaagtgggtcaaattgttctcttttaatattcctatatccttttgaagaaggccgttcatcccaattccaatcatcccagtcagttatattatgaccaccaatatttcgacgtctggatgcagctcttggtgaagagtatccgttgtcctgtccaaacatttctgccctataatcctaataagtcatttcagccttgtcagaattatcatcaagaacagtataaatacaaaaactagaactcccacttgagaaacaaaaacccttaccttatcttcatgataagctccgtatatataccctttctcatcagtagcatccattgacctctttgtaagattccgaatattcctcttcccttttaatttccatttggatactgattcattggcagatgtaggataccgagcataaaagtgagaggcatcaccagaaagcatcatatcatccggttcatcgcatcccatgcgtccatgttcttgtgcttcgtatcttcccaaagagctcacattttgttccataggtacagcagcatctaaacaagtatcagaaggttggtgagagagaatattaaaccaagaacatgcaacaagctataaatcacaacatagca

SEQ ID NO: 3550 - DNA, 1050 bp, Cannabis sativa
caactttctgtttcaattcaagaaatacaacttccttccttggggcctggaaaaacgaaacagagtgaaaactgagaatagataaagtgtgtggttaggttccgccatgggtgcgcttgctcccatctcttcttggattcctgaagacgaccttttactcaagaacgccgtccaggtacactcatataactcccactgtagtgaactatggctttcactttcactttgccattgttacttcttgttattgctcaatttctttatttagaaactcaccgtagttcactagcttagttcgtattgtacctttctgcctgctgtttttattttattttttctttctctcaatttacatatctatgtgaatccttaacttacattcttgcgttgaagcttttgttttctatttctgttttttatttgtgtgtgtgtggaggaggagaatttatttacaagtgtatgtcgttaatatatattcggggtttgaatatggtttcccttaagatgcctttcaactatgctttataaaacaggccaatatttagggcatttgaacaagggatttgacccttgctattgctaaatgtggggtaagaaagtgtgttaaatcactttgtagtggtgtagagacatatatttgtgattctagtggaatggtgttcttggaaaaaccttaggttaggcttggaatgtctatagtggatatggggatgtatatagggtgggtcgccccgaccatcaagacatccaccccaccccaccatgtatttttgccatggctaaggggatatttccaattagataagtcttccatagagtgagacttatgttctagaaacttaaaaatctgcttttacattgagatgcttgaaaactaaaaacgggtgctccacgtaacaattcttatgggtgcaaggttgctgtgcatcgattccccatatttttacttcccacagcattatttttatgtgtatggttgggcttttaggcattttggttgtttgagaaagtcatgtcgtagatgttttctgaatcttcaatattgctaca

SEQ ID NO: 3551 - DNA, 1457 bp, Cannabis sativa
aaaaaatctcttttgttgtaatggttccacctaggagtcatagttattttctccctcggtaataaatgataatatttttatatgatgtatattattcagagatataattaaatatgacgtgatctctacttaaaaataatataaataaaagttgacctcgattattatcacattagtgtgtatattattttgagtatgtaaattaattagtagtgtaattatatagtcatatataattaaacataatgttgtagtcccaattaaaaatatcagtaattcaaatttaaatatatcaaagatatataatttgaggactatgaaaattaagagtatataacttagtattaatatgaaacaaaaaaatatatgcatattataagtggcacactaattaataaattatttattatatattaactaaatgtatataagtactgtgtactcagccctttttttttgagagagttactgtatacttatcttttattggttattttaatcatcaattattattattattaatatccttgaaaattcataattaattcagtataatatttgccagtatatattgtatacataattacatacatttgaatattgtattaatgtaataaatattcttttatataaggaaactatttcaagttaagattctatcgatatatatatgtccatatttgaaaataagatagatttgtagctaattcaatttattaattagatgttaatattttgtgtctatatacaattttacagatcagagtatcatcacatcaaattattaattataatttcgtaaattaagataaatataatacagacagctatagctagctcaatgtttatcttttcaatattgtatatatgtatatgaaataagtatgatccatatatacaacatatatatatattattatatttcaaaacattacatgcaggtgatgagaattgtgaagatgaagtttaataataactacaaattattcaaatattatttgttctacatcataacaatactactcatctttttggtaagtaatagtgatggttataatattaataatggtgttacaatgagaaccataacggttgataagtctggcaaaggagatttcaccactgtgcaacaagccattgattctgttccagatgataacaaatcttgggttcatatccatattaaacctggcaattacacgtaagtatatatatatatatatatttatatgtatattattttacataatatacattagttttaaatattttttgttttattttttacgtacagtgaaaaggttagtataaaaagagagaaaccattcatatttttggaaggagaaagtagcaggaacacgattattgcatggggagattctggtgacatcgttaaaagccctacgttttcatgccatgctgataatatcgtcgcaagcaaaatacaattcaaggtt

SEQ ID NO: 3552 - DNA, 1175 bp, Cannabis sativa
ataaatacaaacttgatacaaatataacgaaataccttggcctcaacaagctttccatacttatcaaaggcatcttttagacccctgtcagatgtggaccatgacaggccaccaataaagcagcgatactccaactcctccgacattattcaactgcaaatttcattataaacaaaagcaaattcaaataacgtcactgaacataaaaaatttaaatacaaaaaaaaaaaaagaacagtaatttaaaatcataactcatcaggtttaatcattcaatactataaaagccaacaaaagtttgagatcggaaaaacgcaaaaataaaacacacatcatggcaaaacccaaaaaataagatcaaaatcagattcagaataagaacaaaaaggaatcgaaagagaatacctttgctgctgaaagagaagaagaatagataggggatctaggtttgaaagaggcggtgaagcagagaaacgcgttgagagacgaaaaaggaagcgaaaggaataaaactttcggcttaggaatgatgtatgtatagatggagatgaagaagatatttgagagagtgggtagggcataaaccgggtcagctggttgattggtttggatttgccccgttaagccgggccccgaatttggagagccaatggggcttttagttttaagcctctttaggctgtaccacatccaccctctaacgctcttacccatatgccatttttattttttagaatttttttttaaattaattaaaaaagtaaaaaataaaaaaaaatacaaaataggattgggaaaaattttaaatatttttttaaaaaaaaatggttacatccattaatcagccaaatcggcactaatcaatgtttgaagaacaatcagagctgatctttccagaaaattacaatctgactaataataagagtttctagtaagacagtgcgcaactccattagcagattgcttaacaaaataaatcttaacattatgaagagaagataaaagcaattgacactcataaactaataaaccaatcaaagaaggcatacgaacagagctatccaaagcttgaagggctaaaagatagtccgtttcaataataatgtcttaaacaaccttcctcttgatccaacttaggcctccttgatgccaacaatcttagcaagctcgggttg

SEQ ID NO: 3553 - DNA, 1607 bp, Cannabis sativa
gacagtgttttgagagatatgagttagcctagatctatgttggtatttgtattagatcgaatgctcaggcctactaaaaaataggctcaagcccgaaatcgaaggctaaatccaaacatacttaaagactgggccaggcctagttaacctttaaaatagaatttgggccaaggcaaatccggtgttacatccagcccaatgctagtcatgggcctcatggcctgttataagaacctggacctgatgctcatcgtgaccagaactaagtaatcacacgagggcctttaatcatgccattttttgttcacttattaaatctatatcaagatgtaacttttttatccacatgatctgatcatgttttgtagttgacaaaaaaatgtgtttttaaaaattgaagactactaaaaaaacaaataaaatgtatatttttaaaagggcatatgatttgtcattttcaattaaaaaatctcataaaataataataaggaaaaaaaaaagatagtaaatgaatatccaaaaaaattcttcattctttcaaaaaataataataataataataataataatcttctccattattggtcttaaaaaatggaaagcattacttctttctttcttcttttagcatatgaatatcaaattatcaatcaatatgaacaaaacaataatgtataaatgataaatacatatatgtaagtacgtggctatatatttttatgtcaatacataattgaataagagatgagaaagactgaacatttatttatatctatacatcattaattctcttaaataagagcattgacaattgtattttaagaatctgaaaaagaacttgtaaaaagagtaaacttaagctcatctttaaaagtctatttgcacccttattttaattttattttggaattattaattatattataattttcttttctcaacctcccttcgtgtttttattatatttacaacatcatttcaataattttttaattttttttaaataattcactgtgttcaaaataagtttcaagttttttgaatacgtatagtaaattagaatattaaaaattctgttgatactataaattattcagaattttttgaaaatttataaatttaatattataattaaaatgagatcgcagtgaacaaaaattaaaaaaatattctaacatgtttcttaaatacaaaaattaaagaagagtttgacggtaatatttttcttttatttttgtgatacgttgtaatcatgataaggagaaatataaatcaaagtttgtagtctttgcacttgatttattttatttggaaaataattttcctcactaaagaatctattggaaatgtgtcattctctattttatttttttggttggtgtaaatccaaaatgtggacattttatttggtccaacaaattaattctttttaaaatgatatattataaaatattttcaaaatttaattcaattaaagtcataattatctaagtaaaaagaaaatgtagaaatttgaaaaaggtgaatgcagttgttgcatacttatttttacgtgaaaagtctcaatcacaaaataccataaataataataagtactctaaaaaaga

SEQ ID NO: 3554 - DNA, 1412 bp, Cannabis sativa
tttatgttccttttaagaacatgtgtaggtgacaatggaggttggagctgttgcagctatgagatatgtgaaggatggaataaaagctgctaggttagttatgcaacatactggacacactttgcttgttggagagaaagcatccgcctttgcaatttcaatgggacttccaggaccaacaaaccttagctcaacagaatctactgagaagtggatcaaatggaagcaaaatcattgccaacctaatttttggaaaaatgttcaacctgtaaacagttgtggcccttatcatggtaagaaggactatagtcacaggacatgttttgaagcctctcttctgccggaaaaattcaagtcaagtttgcctcgagttggtgtaaacaatcatgataccatatcgatggcagttattgataaagtgaatccataatcattagcatttttttattactttttcaagataatggtttttgtaaccttacctattttttcatccagttggggcatattgctgttggtacatcaactaatggcgctacatttaaaattccggggaggtaagttatattgagctagttgttcatacttgatactattttcagtctttgttggtttacaattttgatcgcttacacacaaaacatctgtatattatataaagatataatatttatatgaaatctaggttgcttaagtgaaatgtaactgagagtttgagataaattcatataaatctacaaaattttattagcttccttttgatctaggcagagccagctgctatatgcggtgtctgtttatattttcattaaggcttaaaagaatatttaactgtaaacaagttaaacaatatcacccaaaattcactcatgttcatatctgaataaaaacagtttatttatgttcgcaattaaattctctaaatagattattatttacttcgatcttacttacacctaccaaaatgaaaacaagggctcttcccgaaccatcttccataatttttagttctctcattgttgcttttttttttttttgttaaaaataatgtgaatatatgtcactgaaagatcttggtaatttcggaagtcttcaatagtttggtcacagtagttctcaagttccgacttattgatcatttagaagttttatctagttataagtattgtgttgagtttgtttgatatgtattttggaacttatgtcaatagaatataccatcaggatctctgaaaacttgataagatgaaaacaaaaattaaacaaaaaggagctcttgagatttttctcaaaagtgttaggagttcacaaaaaagatgtgaataacattaataaaagaagtatctgtaaaacaatttctaaatgactttgagaggatgatgaaatattttctgtccacttgagtgggctcc

SEQ ID NO: 3555 - DNA, 3089 bp, Cannabis sativa
ttatcttgtttgatgtggccggcataggcaaatccaaaagttctcagcctttcataatttccagagtgtcttgttcttgccttaattggtgtcttgaaaccaattgtgagggacatatgttgatcagatggaaagttgttacaactgcttctaccaaaaaaattttggcgatcctaagtgtattatcatgcatctaaccctttctattatggttctgctcattcttttagcaagaccattattcttttgaaggttcttggggacaacaaggtaattagctatctcatgttattttcttgcacaattttttttattttatggattatctttttgtgagatttgactaatttataatttcaagtgtcaaaacttgaaattaataaatataaacgtaattctattcccaaaaatgataataaagaagaaaattaatacaaaaaataacataaataataggctaaaaatattctaacatctcgtcctttgatcaaaattagaatcaaattaaaaaaaaaaaaaaaattaagtctttatataaatactttaattttttgatgaaatactattaaatattattatttggtatattgataaagataattgctctgcttaatttttattttttgtcaagtagctaggtcacaaatttaaaactctatatctaaataatcaccttacttgaattttatatttctagtttggctacgggtgtgtttagttgaaaataatgaaatgaaattaaataaaaaatattcttttatttgtattttaaaatattaaattaataatcaaataaaataattttttaattcaaagattaaagaatataaattgatttcattacaaattgaaaaaattattattttgcttttatttctttcaaccagataacaaataaggttgagtacgtttagttgggaaagaaatgaaaacataaaaaaaaatgaataagaatggacataaaagtaataaattgaatggatcaaaatttttaatgcatggattaaattatattaattttttttttatcttaggttagaatagacttttctttcaatttattaaaatagaataatcattcctaaattttcattagaataatattttaatactttaaaataaaacaaaacaaaatgaattaaatgaaaattaatctcattccattccatttagttaccttcaaccaaaacacaaccaaatgtggtgaatgatgattcttacttaattatttcaggtgatagatctcaaaactcaagttagctacttgaagaacgttagccatcatttaagagttaagacaacaaatagggaattcagatcccagaactcttctttcaagagctgtttacatcttcaacattggtgttaacgattactcatttcctttcattatcaactccactgatctcctcaattcctacacaacccaacagtttgtgggaatggtcataggcaacataactgatgttacgtactagtactgcatataaatactatactatatatctttgaaaacattcttttgtatggctttcaattattttcttttttctctcattagatgtgtaactatgtgattaggaactttaccgcattagaggtagaaaaattacaccacacacaactctccatggatttacagaggaaattcgagctgtagagaaagaatatgaactatatgacagtgtcaaagagtatatcttctttgactctggttatgccacggaaaaagtcaacgagcaatttgccgtagaagcatggagcggaaagccttgtgtctcagggacttacgaactataggcattatttgaatccaactaaaaattaaggagacgtattattgttctattgtttttgaattaggtattctattctattgtgacattgtgttctcttcttttcttttctacgtataactttacttttatatatccatacataatattatacgtgtttctttttattttatattctacgttatgttgacttgaaaaagtcaaaatatatattctagtacgtgaaactcaatcgacttcttattgaactgaactcattcatgttaactaaaatgtatattttgacttggatttagtcaaaccaaccatgtcaaacgaacttgctggtatattaatcttttcttttttaaaacaaaataaatatattgtacaaatgtaaaataatataatatatgatgggagatgggtttttagtgaatgttgacattatttctgtattattagttattatatatataatttttactaaatttgtgcattacttagtagaacatgaaagcacctgtaattatgtgatcattctaatatgataatattaattgatgcgcaatcggtgaggcgtgactagtgagcgtagattattagctagggactcggtctagtacctgcttttatttattttattaaattcctcattcaaagttcgaagttcacattcagattacaagagttgttaaaaaaataaaaattacatcctttaccagttttatgaaacatttttaattgtttgttttcctaattatgatcgtttattatgaaaatgtgtgtaaatattatttggaattttgtatttaaaaaaaattattgtttatttttgtaaataacaatttaaaccatgtgtacttaataaaaataaacataatgaatcaatgatagcttgtgggcctgatttcggtcaaattatttataactgtaactgtaaaaattggtcttctagttctaattaactctaaataattgtattctctacctctaatacttgtggttcaatttctattctattcttaattagggcccactaaagtattgagcagcataaaccattcgacaagacctcttatattaaaatgctgctttttttttatcattcatttatatatataataaatgttttttttataatatatataaaaaaaatgttcataacttaacaagaaaagcttataaaaggatttgtggtctcaatatgcctatagttcattgcctattttatttttattttataagtcaaatatttatttgttaataaaatactaaattttttgatgatagacataatttagtagtttcacg

SEQ ID NO: 3556 - DNA, 782 bp, Cannabis sativa
aagttttaaaaatattacctagtgttaagtgaatcccatccagacaaattggcagctgattccaaagcatccctccactctttgactttatcaatgtgaaatctttgttgaagttgagcaaaagcaacttcatagctgcccttctgttttctgacatgggatggatcaatgccatggaaaacagggacaacaagctgtccatttctgtgtttgcatttgagtatgtgaacaagttcatctaagcaccatgaagaagaagcatagttttgagagaatataacaagtgaaagctttgagtcctctattgctctgagaagagctggtgagatctcatggcctctctcaagtttgtaatctatgtaggtttcaactttttttcggcacaaggctgagtagacatgacttgtaaagctgtctcgagtatccacacctctgaaacttatgaacacatcgtatttatttactacttgatcatcgtcaacaacaacaactgaagaggaagaagaagccattgatgatatgttcatagaaatatcaatatgtatatctacatttttacatatctatacacacaataatagaatcaaaactatggttgcatttcagcctcaaataaagtcaatgttttgtatacatgtgaacatgatcatttgagactactaatttggacatatcccataaatataaatatgaatataatttgcgtatatgtacattattatttctagctggaaatatatatttctagagtgttgttattgtcggcactactataaggcgta

SEQ ID NO: 3557 - DNA, 1070 bp, Cannabis sativa
ggaaaagttgattgaagaatatccatagctaaaggggttccaattctgatatttctgatattcaaagctttaagagagcttctaatgttgttcatggcaggtactaaatcaaaccacattactttatcttgttcagtagagtaacttagaatttcatttccaattagtaagaatctgatcatagtttgtggatagtaaggaagaacattgttttgaacccattcattagctttactttgatttgaagctaaaattgagatttcattgtttggaaccataattgagacttttaggtttgtgcccataagaagttttaggatttctgggttggcatcatagagctttactccatctgcattcatggatttgatgagctcaatggattggtatggtgatggaagattgttcccaagttgaccatagtttatgcctaaaagctttgcacctgtttcaaattgaagaaagcattgttaattaaggtcttcacttcactaattacaagcttaaataatggtaagtgtttgtgtgattttgcttttgggttaatttaaacttgaaaaaccaagttgagagatgataagaacaatgaaagcaaaaaaaccccatttgagttttttctttttatatataatctttaaaagaaattgatataatgtagtgatgagaattatatctagtttttgtatgtatatatataagtggtcatgcaagatgttacatcttaatggtaagtatttgtataattttgccttttgcatttaattgatatgagagaaacttacttttgagttttttgatattgaatgatttaatttgaaggagattgatatgaaatagtgatgagaattatatctagttcttgtatatgtatatatatacatgcctataaatggtcatgcaagtgaatcttttgttttctgtagcttaaacaatggtaagtatttgtataaatttgctttttgcatttaattaaaatgagagaaacttacttgaaaacccaagtggagagatgataagaataatgaaagcaaaaaaattcatttgaaagagattgatatgaagtagtgatg

SEQ ID NO: 3558 - DNA, 930 bp, Cannabis sativa
aaggacaaggacaaagacactcaccacaagactgccgttttctagattagtagtgtatcttaaagtccagaaatctcgtgcaggagccaatgttgttggagcataagtctgcattgatgtaaatacatatcataacattaagtattcagataataaatagtaagatatctcagtagttgtttgtttacctgtgtgtaaacaagttcaattgttcctccatttccagcaggaaacatggtaaaaacttcaaggctccgacaatcccgaaaccacgatgtacgatctttaaggatctctgcaatctgttaagaattcaacaaaacataagaaactaaaaaagggtactgagacaaaacatttagctcggtcaaattatttaccttcgtaggctctaaacttactaaaccgcaggctcttgctgccactccactacaaccttgtgaaatagcaaagatcccaaccgaatccggaccaggctaaaacaacaaacgaaactgtaaataacatatttatatagcaaaatcaaattatgttcttagattgatagatataagacaagaaacaaaccttcatcccaggcatctggacccaatcgacagcagttcctgtagcctttgaaaggaactctgccaaggtctcctccgcaatagagaggagtctgccaataacacaacacatgaaaatgaaatcaaaaaccacacaatacatgaaattaaaatcactgattttgagagctatatatattatatacccagcagggttattagcatctctaagggaatgttgaggagtggtaaccacagagtcacaacttgcatctgtagttgccgctgatgcctgcaccaaagtcaaattttttatgcttattatattatatatacacatatattatgtatatgacagtatccaaatatagtcacacctaagaga

SEQ ID NO: 3559 - DNA, 650 bp, Cannabis sativa
agtgtaaagccaaattggatgagaacaatggaaagcttctcaaactaggccctaggggcctatttgagaccatagatggccttgtttaattggcatactttaatgggatgtttaggatcaacaaaccctagggattgaaccatgtaaatgtcttcatttagatcctcattaaggaagatagtattaacatctattgccttacagtccaccctttatatagagtaattgtgagaaccactcttatggttataagtttaaccacaacgctgaatgtttcatgaaaataaaaatcttcttgttgatgatatcctttcgctacaatcctagccttgagcctatcaataaaaccatcagcattttctttaactctgaacacccatttgcagcctataggttctctgttaggaggatgatcaacaagtgtataggttttatttttctttaaggcattattttcatcagacatagcagtaaaccattttgcatatttcaaagcacttttcactgaagcaggtgtgagagaaggtattagtactttaggcttttgaatatatgattttcctgttattttcataggatgatcattgacaatatgatcacctacaaattgagaaggaggatcaacaataggatgagcaccaggaggaaca

SEQ ID NO: 3560 - DNA, 657 bp, Cannabis sativa
taccaccatatataagcaacaagaaaatgaagataaatgtacttgaatttgagaagtaattatatacattacctgaattttgggaggaggcaaatggagaaggtgtggcgtaattaacatttattctttctctcttcttcttcttccttacaaaccacacagccatggcaagaaaactgagcatcacaaacccaactataataccaatagcaacagctccaccagttttaatccctccatcactagatgtggcatttgcattgacattgccattagttggttttgcagtaggcttctgtgttgggagagcaggcaatggcgaggcagtgttattaggcaaagcagcatgggatgttggggagggcgatgagggtgatggaactgaaggggctgaaggagaagaaggaggaggtgatggcaatgtggtctctggggtgggtggaggacttcgagaaggaacatcaggagacgacggaggagacttctccggtgtcttggcaactggcggtggaggcgaatccgatgaaggaggatccgggacagttgccggaggaggtggggaaggtgaaacagctggacgagtaggcgcagtcggagccggaggagttggagaatcttcaggaggaggtggaggaggagaagaatcagttgatggag

SEQ ID NO: 3561 - DNA, 2003 bp, Cannabis sativa
taaattgttagatgaatatttaattatatattaaattttgtatgaagatttataataatacgcataatagtaaaaattgatacaaaaatatcacaaaatcattatttgtactaatataaatcaatttttacatctctcattagagacggtctaaaaaagtaacatattgcaaatttattgaaaaaatatttgaactatggcctcacgtgcgaagcatgttagacccaactagtgtggaaaaaaaaggaaggagatagaacttgtttaggggaattcattcaaaaaaaaaaaaaacttgtttaggggaaaattttgtgtctctcaaacatgtcattaatatgggcacataaaaatcattcctagataaatttcagtttccaaaaataagacaaaattaccagtactggacaaagatacactatgatggatcatggatgggataagggattaatggtgggtaggtacattagttagtcatgccactgcaattccaacttcgctcactctcatcttccaactcttctttcctcatttctaagctctcaatcaactttcttacccatcacctctgccgctcaatggccaccaccacatcctcagccgagcccactctaagcccatccaacactcgcgtgggctggatcggcaccggtgtcatgggccgttcaatgtgctctcaccttatcaaagccggctacactctcaccgtattcaaccgtactctatccaaggcccaaccgctcctcgatatgggggctcacttggcccactctcctcaagccgtcgccgcccaatccgacgtcgtattctccatcgtaggctatccttccgatgttcgttctgtccttcttgacccatcctctggcgccctcgctggcctccgttccggcggtgtcctagttgatatgaccacatcggaaccctctctcgcatccgagatctcttcctccgccgctgccaaaggctgcgccgcgatcgatgctccggtatctggcggagacctgggagcaaggaacggaaccctagctatcttcgccggcggcgatgagtccgtggttaatcgattgaatcctcttttcagtctgttggggaaggtcaactacatgggcggtccgggtagaggacaattcgcgaagctggcgaaccagatcaccatagcttcgacaatggtggggctagtcgagggaatggtgtacgctcacaaggcgggactcgacgttgcgcttttcttgaaggcgatatcgactggcgcggctggatcgaggtctctggatttgtacgcggctcggattctgaaaagggattttgagccagggttcttcgtcaatcactttgtgaaagatttgggtatttgcttaaaggagtgtcagaatatgagtcttgctcttcctgggttggctttggctcaacagctttatgtctcgcttaaggctcatggtgaagggaatttgggtacccaggcgcttattttagctctggagaggcttaacaatgtttctcttgaatcttctgttactgcttctgctccagctagttagactggtaagtaaacataataatgttctttaaggcagtgtgttaaactaataaaagtttcattatgattatgagtatacgaagtaaatattacataatgaagattctatgcatttcgtctgtgttgtctcaagtcaagttcagaactttctctttctgattattggctacattttatggttagtgtaaaatgtaaatgcatgctttttatgatggaattaaggactaagtttttgtgattgtcctcgttttctagcattcaccaaattttagagctatgaatatgatatttgactttgtgttgcaaggggcattgttagtttttttttttaaggaaaaatgttaattgataagacgaaattagacgtgacggttattatattcactataccaattctcttgtgcgtctattttgtcacagggtcaaaaaattacaagtttttataatcttaagaaaaatacaacca

SEQ ID NO: 3562 - DNA, 1593 bp, Cannabis sativa
tttcatgagaggaaattgtccacaaacaattctaactgatcttgaccccgggcttagggatcctatacagactgatttgccagcaactaaacatgtcatttctgtgtggaatattttatccaaggtatacagttggttctttcaaccacttggatctcgttttgcagaatttaaatctgagtttgacacactttgtcgattggaaactacggaggagtttgaacttcaatggaatcaaatgatttctgtgtttagattcaatgcagacaaacatattgctttactctattcattccgttcatcttgggctccatcctatacaagaggatacttgcttgctcgaatggcaacaacagtatattcgaaatctgttgatggatttttgaagggcattttcaatgcccaaacatgtttgcgcagtttttttgagcaggtactggtttatattatttctcacaacttcgctcaattgattgtccttaagttcttgcactgatcaaaagatttcacctttttaggtaagcatctctgctaattttcagaatcaggcgcgtccagagatgcaatacatgtataccaagacatgcatccccattgaggagcatgctaggagtattcttacgccttttgttttcaacgaatttcagcatgaattagccctgtcaatgcaatatgctacttctgagatggctaatggatcctatattgtacgccatttcaagaagatggacggggagcgtcttgttatatgggttccagaagatgaacagattcactgttcctgtaaagaatttgaatcttcaggattattatgcagacatgctctgcgggtatttatagtaaagaactactttcagcttcctgaaaaatactatctgaataggtggcgaagagaaagctctctagtcttttatgaagaaaatggtactcaacatagcaatgatgactggattccagaatttcaatgtcttatggaaaatctatttgcggaatcatctattactagggagcgttctgattatgcacgttcggaactgataaaacaagttgcaaggatactgaatgaggttggaaatatgccagaggctgaaggtgtggctatggatgtgacactgtcacctaatggttaattttgaaggtactagtgggttagtgctagatggggtagcaaatgcagcccctgcttaatgcggagtagattagagaagtgatttatataaaaatcagaaagccattaaagagtgacattattttgattcttacttccaaatttgagcacaaaggctaacatttggagtaagaccatctaacaatgagtaaaattcagtgtgtttgattaatccttacttgatatttgcgagtctatgaccccatggaagaaatgtagctcacgctgcatcaaatgcagaataaggataaaggaacttgccaaggggaaatgtataatgtatatcattatattctaaatagtaagaaatttagtttctacttttcttaaatgaaatatcaacataaatttagctctggatataattaaggctttgaaatcagctgaactattagactaataaatgctacaactgagagtgtcta

SEQ ID NO: 3563 - DNA, 1427 bp, Cannabis sativa
aaagagaagattagaaagcgaattcaaagttgggatgggcgcttgttgtctagagcgggtaaggaaattctgattaaaactgttgttcaagctttacctacgtacgctatgagtgtctttcttattcctttggatatttgtaaggatattgaaagaatgatgagtatgttctggtggaattcaaaatcttcaaaaaagagaggtatctcttggatggcttgggatcgtatggctagaagcaaatttgggggaggaatggggttcagacgattgcatgaatttaatattgccatgttgggcaaacaagggtggaaatttttacaagaggatcacagcctagtgtttcgggttttcaaagcaagatattttcccaatgatacctttatgactgctacactaggaaacaatcctagctttgtgtggagaagtattttggaagcacaaaatctcttaaaatctggttgttgttggagcattggctctggttcgttggttaaagttgtgtctcagccttggctcccagaccgtgcaaatccatatatcacttctcgacatcctggtttggccgatgctacagtcgatcagctcatggtgccaggggaacaagtgtgggataaggagattcttgaagatatgtttgaaccgagagacattaatctcatcttgagtatccctctcagtgatagaagctttcctgatagatggtactgggctccggaatccactggtaggtattctgtcaagtctgcctacactcttcagttggagcttgctggtttgaaccttgaggacagtaactctggtttttggaggaaactatggaacctgaagatccctccgaagtgcaagaatttgttatggagagccctagtaaactgccttccaacgaatactatgctggctacaaaacgagttcacatcgacaccacctgccctttgtgcagaaatgcaccagaaaccgtggtccatgtcttcgtggactgtgcgtttgccaaaaattgctggtcttttctcaatgaaggtcatattccaggtgctaatggtgactttttaaaatggatgattgacatctttgataacttctcaaacagagttataaggattgttagtattatctgttggcaaatttggaaggtgaggaatgagttagtttggaataaggccactcctgctgctttcaatgtggttattgctgcagttaatctttttgatctttggaattcggctcataccgataatcattcggacactctaaatgctgatggtgctaatagagtgagtgagcattggactaaacctatgcaaaataggatcaaaattaacacagatgctgcaatatttgacagcacctctgagtttggtttttctttcgtggctcgggactctgctggtgctctggttgaggctcatgtctgctgtgtcaatgg

SEQ ID NO: 3564 - DNA, 1117 bp, Cannabis sativa
atttaaacactctgtataaagaataaagttcaaagatgaataaacccaaccaagaaagaaaaatcaaaagagaacaaaaaaattgaagggatttcgttttcgtgaaaaacctaccctcttcagcaaaggttgacacagaaagcttctaagtctgacgatttcaaatacccatcaaagaaacaaaaaaacagagaccaagtccaaactactccagcaaaactcaatcaatagaggctattatattaaaccccttttaacagttccaaccgaggacccagtttctgatagattcttaaaaatccgacccaatgccggcttcccaataaagcttgctggaaaaattaaaaattaaaaaatgggtcttgagaagaaggcaaatgtaatgaagtagtagggcctaagtataagtctgatgttttatgttgggttgtatttgaaatggcgaggcggcgtttgtcttgtttttcacacagaatttgttttcgactaaagatttgttgcagggagagatgttgagaaagaaatatattcggggattggaggagacgacaatgactatatatgagaagagaagagtttgagataggagagagaaagtgtgaaaacagtgtgaagttgatgggttttatttctttttttatattaatttggacatttcggaaactatgagagtcgtatttctgtcgcgtgcaacgcggtaccgagaaaatgttccaatgcggtcgaaatgtttcttgtcttaatacaatcggatatattgggaaattttatttacacaagacaccccattttttaataatgtaaggaaaacaatttaaaaaaaaaaaaattaagggtaattttttgaaaaaatttatgttcattttttttttatgcctaaacactaaaaattacccggaaagcatgaaccctaattgttaaactgaagggagtgacaagatgcaatgtaatcgtaacccaaataaataaaaaaaaaaaaaagaagaaggatgagatacttactataaaaattcgaaaagtcaggtgatgaaaaattctggctcaacgagttttttgaacatctggagtcgaagagcaagtctgagtagattcacaggaagaacgtcagtgataatga

SEQ ID NO: 3565 - DNA, 1216 bp, Cannabis sativa
aatttgggctgttaagatttcggaaattgctaaggaaaagagataagcacattagtaaaacaaacgaaatgaaggacttaccgagactaggaaaccaaattaataataattaaattatgctaagaaaaagagataagcatattattaataataataattaattagatactaccaatcattttaaagcaataaattacattaaaaattattatattaaattatgtgaaatctcgcttctattagacggcttaagagcagtttatgcagtttatcttttttttttttttaaagaaaacaaagttcattaacaacaagagcaaaagatgggaatcacaggggaaattccctccccaagaaacaatcctgcctttggactagcaattctagtgctcctagcaagaccatccgcaaaagagtttaaacaacgaggaacaaaggagaacttacacacatcgaaattcttgactaagtctaaaatagaaagagaaacatccataattaaccaatccggaaggattctacccttaaaaaaattgttaattactattagtgagtccgagaaaagatgaatagaggtccaagccgaactaacagcccacaccaatgccatttgtaccgctctcgcttcagcctccaaaggagaagacgctttagcctgggcagtcatataggcccaactcccattgccaaaatctgtcatcaccgtcgccaatcccgcaacaccatcacgccaagaggcatctacaacaatcacaatatccacacccttcctgcatatttcagcaggcagagaacttgaaacagaccctgttttaccaacaggaagagaagagcaagcaaattcatttaaggaggatgatattttgagaagaattttatctaaatccacagcacctccttttaatcttactaaatttctttgctgccatatagccaacgcaacacaaccaaaataaagaagaatctgagactttttgacgtttgaaaacgtaatacaaatagcttctatcacctgaatcaacgaagcacaaggaatagattcaagacgacagggaaacataccagaaaatcagattgctttgaccacagaccattctttaaacaaatgcagacaactctcttcagcagacccacacaagaaacattccttctccgataagaaggggagtcttgatttcgttgggagggcctctgttaaatctctggttcatagctg

SEQ ID NO: 3566 - DNA, 2058 bp, Cannabis sativa
actaaccaaaaatgtgaaacactataaccaaaattagaaaagatataatctcaaattaaaatgagagtatcagacccatcttctttaatcaacacatctttgattaatgtcaactattaaatccactgtatgtactatttcttttcccttttttaaaaagaaaaaaaaaattcctaattcttttgaaaaaaaaaaaactatggatggaatcactcagaaggaataacagtgatgtgtttcaaaggagtagatacgtcagtacagccggcatgttcaacgaattcagccggtgagaatgcagttccacggcaaacacaaacaatattcacttcagattttgcatatctatacagaaaaccagtcacccttttccgatttggaccctcacctttagtcgaaatgtactaatttctctcgtttcaaccactgattcagaaacagtagtagtttcagaactattactatctgagtagtgagtagaagaactagtataaccaccatacgacgtcgtttttctatcttcaccctgtgttttttcaccgctcttatccgacccgagatccgaacccgtgtaaaagggtccgaacccaacccgacaaggcatgggttgaaccgcattttttagagtagaacctgcgtttggcgtccaccacggcatcatcatgtatgggtacggaaacccattcgtgtacggaacgaactgaaacgacgggtaagggtactgataatgcagtgtttggctattattactcatttgccacgcgaatttatgttactcttctctttttactggctcgttgttcatcatcgcgatcttgattttgatcttctgttacaggagagatattgttcgagtttcttaaccctcgattccttttctcttgtcgtttcttcttcgcctcttgtctcctcatcgcgtgaatctcacgtttcgtcttcgcatcaagaacatcactctccggtaccggcgccggcgaggtactaatttctctcgtttctaaattaaagccaatattggggttagttgacgtttcgtattttctgaaacttcctcttcctccaattgataatcctaattcaagttcaacctcttctcgctctatctctgccatggctaagaaaatatctgagctttgtttggtttggagagtcaaaggaagaaaatacgaaagtatatatatatatatatgaaagcctagagagagggagagaagctaggagagacaaccagttgccacgtggcaggaatatataaagagataaagacggttgtgacacgtcagatgatttatattttattagcggatgcgttaagcaatgccccttaccaccactcactaatttggattattaatcgttaaaaataaatcaaattaaaaaattaactagcctacaattggttcggggagcgccacgtggaggttccacatgcattgtctgtagaattggacacgtgtttggtttttagtgcatggctagggcggtgatagagggacacgtgtacagagattatcacgtcgccgagaatctctaccgtcattttcaaatttattttaaaaaagcactgaatttgctacgtagttgatggtttggatgacacgtgggatgtctgttgagtggggcccgagatacaaggggagatgtcagagaagaataggcgcagagattgacacgtagcgcgcgtgttgcgtgttacagttcatcaaggcctgcaatccaagttgctttgcagctttttagaagagggtggtgatggagacgttgccacgtgtcagaatgtgatgggtttttacacgtgtacgaattgatttggattggttttgttatcgggtgtggggggttattggaaacgtgtggtgttgatcgtagcgagatttaagcttggttgtgggttgtgggctgatttttggaggtgggtcccatatggactggagttttgaatgaaaagtccagttgtgctttaattgcgcatggtggccaagtgtcgttgaaggagattttatgggtgtttaatgtttttgaccgtgccagatatttgtagaagatttgtttattttg

SEQ ID NO: 3567 - DNA, 1049 bp, Cannabis sativa
tctctctctctctctctcctcgacaccatggggcatgggtaacagttcttctattctcacccaatatgacttcgaagaagtccacgagaattgtagcaacacatgtgagtagaaattattttagttcgtaacgtattttgatcaacgatcttttatcttgtcttcaatttcgaatttgatttttttgtatgattcttctggatctagtttcgcagcaggaggtcgtttcataacgatctagtttgcaaatgaaggtggcaatggagatgaggatgacgattcactctgtgctaagacgattcactccagtgatatgctcaaaccatttaacgataacttcggtgatttctctcttattattataatcaattttagatccaaaatactgaaatcgtgtatactcctaccctaatatcttttcaaaatcgctacttcttgactcgccattggacttcattagaacttagaagttgctcattaacctttgctcttcattcatccaagtaaagctctggtaaactctctgctttcaaatttataacaaatttttttttcctatgtgagattctcatatgtgtttgtatacactcatgaagtttgttttacttcattggttgatctatagtgttgtattgtgttgaatatgtactaatagatcgaaccgtgtgatggataatctcaaatgtctcattctccaaaggtaaattactaaattagcttaactcgttttatatggaatcaattaattggtttgttaacatgtaaaaaaaattgagccctatataaggtaccttctaatgttatgtactacactaaattgaatctttatatttcaatgtaatgaaattgctaattactcgtaaattatcacacattatgaaaagaagcttgtgtgtgctctttaaatataatcaatgaacaatgcttggacactttaagatgccttgtaacaatattatatactcacttgacttctcaattccttcaaccccaaaatgggttgttatgttcacttctattcattttcaataaaaaaaatttgtttcatt

SEQ ID NO: 3568 - DNA, 1026 bp, Cannabis sativa
aaaataagcagcatttcagataagagcaacaggtgaagtacaacaatatttcaatctaaagcaccattaccaacaacacaagaacacattgggaaatgaaatgatatgttaatttagaatcaatatcagaataaaaaaaaatgacccaaactcttgacaaacatactgaataaaatttaaattaaataaaagctaaatcagctttcctttaattaaatgaggtaaagcgaaaataaatccaaaatcaagaacatcaatttcgggttcataatattcttcatattcatcaattttgatttaaaaaggaattcaaaatgaagaacaagcatgcattttcactaacacaaatagaacaaatcgttccagtaaaaaaagatagagcaatctgagaaacatctcaatcacaaactcataacaatctccaatatctcaaatgccacaaataaacaagaactcatcaaacccaaaaaaacaagctcaaattttcagatttgcacatacaaacaagatatatccttgcaaacttatatcttaccattttctcagcttccaaacaaaaaataaacagaaaccataaatcaatgacaatgaacaagtaccagaaagaaaatcactttttcccaaaattcaagatcaaaactttagaataaattcatatcacaaatcaatattcaagaatgatccatatcaaaagatctatctcattagaagcgaacctaaaattgaagatgtatgtcgcctgactcgaattggatctgttctctgtctccctgcacaaggttggagaaaaacaaaaaagaaattggaagaacgggttgttagggttgagaaacaaaaccaaggggaaaaaatggaagggcaagggacaatgtggtgtgggttttatcgcatttaaaagtgaacaaaacttgcatagcttaacatcaaaatacaattactcattggttttaaatctcaaaacaaaacatatattgaaaaagcacaatttgtaaccacaatacatacaaaatttgatttaatcaaaca

SEQ ID NO: 3569 - DNA, 539 bp, Cannabis sativa
aaaaacacttcaaacaatcaaaactgaacaagaaatgagtgaaagaaagaaaggaaaacaaacataccatcagcagccatggcgaaaacagataggtttcttcttcggctttgctgggttgaaccagtgagcttaacagcttttgagctgagacgaccattcccaaagaagtgggaaagagaagaggaagttaaagaagatgagggtcgaggacgaagccccagaaagccctgtggagaaagaatcgtggcaggccttctttgagaggcattgaaggtgaaattagtgagtgaagaagaagaagaagaaggtgaggccgtggtggtggacagcctgagagacttggccgccatgtccttcaagagtgagaggacagagtagtaaggtgtgagggtgggttgggttgagttgagttttggggataacgtccacagaagaggagagatataagagaggtgcttatcagtttttctcagctttcactttcgattctctctaataatgtttcggtcattttgagccccaagattgtatttttt

SEQ ID NO: 3570 - DNA, 739 bp, Cannabis sativa
atcttttccaactctgaaatttattttgtttatgtctcagacatagttgtacttgttgctgttattgtactagccattttgtttagcattcaacaccatggtatagataaagttggttggctgtttgccccaattgtgctcctctggtttctcttaattggaggaattggcatatacaacatatggaaatatgatagcagtgttttaaaagctttttcacctgtgtacatataccggtattttaaaagaggaaagagagatagttggacttccctaggaggcattatgcttagtataacaggtaaactaaagttccttgccattgatttgtttctcctctccaaacctaattttggtccatgaaactaaagtaaaaaacttctgactgtttattctgtacaatttacaggaaccgaagcactttttgctgacctgtcccactatccagttacatctatacaaattgcatttactgtagttgtatttccttgccttcttttagcctactctggacaagcagcataccttatgaacaattcagatcacatagttggtgccttctatcattctattccaggtttgtagtactttaaaatttgaaattaaagaagaggaagtctaggttttgcgatttcgtgctcgatcatgcaaatattagaacacaatgttatcctactttgtttgaaggcattttataaaatttttctttttgcatgcatggtgacatgaacactactta

SEQ ID NO: 3571 - DNA, 1374 bp, Cannabis sativa
agccctgcgcctgcgtgcccgcagcctcgcaccgtgctcactcccccgaactcggcctcttacatctcgtcgatcttcttttccctcctaacactagtagtctaagtaagaaaatattagacgagataacaacggcacaatgagtatagataatagggataaagttcatttcgtctgaggtacaaaaagaaaagggatattttttgtgtaacttaggatttcaagtgtgtcagatcacataggatacaatattatcatggatgaaagtgactttagatagtatgtaatggggactgatgagggtgtaaagtaaaaaggccacactataaatatggcccttgagttcattgtagagggagattttcttttaaatgaatgaaatagtaacgtcgtgagatagaaaaagtgtatgagattcctattctaaacattaagttttcttttaaaagtaacttgagttttaactgttatgttaacagtactaaaacaagattccagttacccatcatagtgtaggtagttatgccatttattttatattttcataacaaagttgagtgggaaaatcaaaagcacccaaaaatctatctcttgaaatattataacaaagaagagtcaaaaaattattagactccaaagatattagttaagtagttataattagttggacacgtgtccttgctgttagtatgttagttacattcggttatactattatatcaggagcttagctctatattaatgagaataaacattactcagtttactattctctctactaatacggtatcagtttgatcatatgctttgattttcttcttctccaatcatctcaagatcgacttcttcttcatgcaccaatagccaaacatcatactcagagctctacaaatgatgagaatggcgatacttcatcagatcccattccaaatcctgagattacctcagcttcaattcaacaagcagccatagaaacaagaaatctacttgctcatgaggacttatccagtccctattttttaagcacatgatatcattcaggtctcatacttgtttctgctcctctaacatgacctaattttcagtcctagctagtgtcgagctattactatagcttttcctgccaaaaacaaaactgcatttcttgatgacagtcttccaaaaccaatcccttgagatgttataattttcatttaacgtgtatataaagtaatgctttattcattgtgaggctccttcataacttttaagtgccactttatttttcaatttcacggatagattagtactaaaacaagattccctttacacataatagtgtttgtttaggtagttatgccatttatcttatattctcataacaaagttgtatat

SEQ ID NO: 3572 - DNA, 651 bp, Cannabis sativa
atatacatatacattaaacaggaacaaaaggttgttgatgactaaaacccccatctgctaaattcagctattcgccaacccaaaaaaagaaataaagccgaaaacaacaacaataacaaaagctaaagctagctttaacaaatgacaactattaattaatgtcgacttccgctgaatttagcacctgttcctgctcctaacccacctgatcatgatatttatataaattaaactagctagcttcataattaacataacatatattccttcttctacccaacttatatatatatatatatatatatatatcattctgcttgcagctggcccagcattctgtccctctaagaaaaatcattgtcttttcttatgagctctttttcttttaattgtaaagccttttctttcacgactggcacagcacagcaattgtgggcgcttatctaccttttcgatgaccatcatcatcatcaagtatatagtacttactatactcctttcctttgccctctgtctagctaatataatccaagtcaccaaacagtaccatttactactctaaccaaataatcaaatagtactgttaattaagacttgtaataattagaagacatactaattatgatcacttatccaaaatacttaataatt

SEQ ID NO: 3573 - DNA, 617 bp, Cannabis sativa
atttaagtaagatttaaatcaaagagtttaaaatgtgttaatctaatttatgtgtaattaaatttaaaaggttgctaaaaagtatcttaaataataataagatatcataatatataacttaaaaaataattaaatgacaatttaggtatttaatttttttctaataaagtatgtgataatttcttttactttgttgtaattcataactttttaaaatagattttagacaaaaagaaaatataatataactaacctaaaaatgagctcataattttaaaagaagataataaaagtgatactcatacatatatctgtctaaaattatataaaaaaattatgttattacttttttttaatgaaataaaatctcatgcacaatccaatgtattatatatatctaagtcatcctaatggggcgctgagatttttgactgagacatcagcaaactttataataataatatgaacaaatttttattttaatctatttttgtgtgtgtgtgaataatattaacttaggacaaaataaaaggcatcatcatttagtttccaatgcaacatcgatcatccaaaggtttatattaatatatatttgaagtcatgatttttcatttttt

SEQ ID NO: 3574 - DNA, 600 bp, Cannabis sativa
aaaaaaaatcatagaaaattacaaaggaaaaattaaagtaaaaacagagaaaaatgatggcataaaaaatgtcaaaatattattaaggtgctatatattcgtgcaagtatgtacctttgttatggattgggtaccttgatctgtcacattacagattctgtgcagcatgtcaaacagtccaacaatcgcagtcaagggttttgatttttttcactccggaaattcaaacaagagttttgacagagagtgtcaggtctcaaaattaatacggcaaagaaacctcacgagggtcaccacaaaggatgttttttttcttaaatggaaagagggaattgagacaaacgtcgtttgtacgaacattcgtcgaacagttggagtgcaaactcttcaacctttgcagttgtgcttctcaacagtgcgacaatggagactacaacaaacgaagttctgctactggggtctattgggtacattcgcccacatacaaacttcactcaattcccaatctttcaccatgaaaattaacaaaaacaccttaacatacctgatttttccgtgaaagaatatggcttcggctccaaaaacgacaacgaaaggaga

SEQ ID NO: 3575 - DNA, 991 bp, Cannabis sativa
aaaaaaaaaaaaaaaaagtgacaattcaatagaaaaaaaaaagaaaaatagaaagaaaaacataagtattaactataggcccgcaaacaaaaagttaaaacatactaataagaagaagatgacaagagaagaatggatatgtgttagtgttaccaaaaccttaaccaaatttggttaatttcttttcctttttccttttgtttttatatgtttaatttcttcattttggttttgtcaaaaaaaaaaaaaaaaaaaaacttcaaattggaaatttcagaaatcacagaagagaatatgaactttgttaaacataattaaaaagtatggtaaactcatttagatattttcatattcataaaaatcgaaaaaaccaaaaccaagtagaatataactaaattttctgcatcatcactaaatttgacggtcggtttcggttacaatttttttgacatgacggtcgattacaatttttgaaaaaaaatagaaaaagagcaatattagatcataaataatatataagaagaaattaaatagaagaaaagggctctaatataatatatattataagattctttaataacactaataatctaagcagctttggctatacaagctgagccatcactataagaaaaagacaaaacaacacctgagcttagatcttcttgatctgagaccctttgaaattgaaaccccatttcttgataatttgcattctgatcctccccaccttcagatctctgccttttcatggcttctcttctttgatcatgatccaccatccttcgtaaaaaaaacccaatattaatctcaaaaaaatcataataatgataataacaataatagttaaagaaaaagatagcaatttaatactgtttggaaaaactttggtgatgggtgatccctgaaatacagagaggaagtccataacttccatggagattaaatatggactgcatttttcctgtgattttatatatgtgtgtgtata

SEQ ID NO: 3576 - DNA, 2516 bp, Cannabis sativa
atgccttgaggtttccaatataaagtcatgtctcaatagttgtcagtactccatgtgttgcccaatctctaattaagagcattaacaatgcttgatgcttaatatggtgccaatagtccccatgtaatcctaaaataatattttattgtcactcgtatccacaacatttttaatacatttatttctatatattagtacaatgttgtcaccaatattatcccacactattcatttcctcatgtacaatttccaaaccaattgacatctggattttttttacaattctgtttcatttccgatgatgttcaatgcaatcaaaccaaatactagacgtgtgttttattaaagaactccctattcaataataaaatgaccagtactgcctagaggtttctaatatgaagtctcgtacgttccattagttattacaatactagtacttgttcccgaaatatttaaaaaataagaaagtacaatgaaattaatagtaagtcttcaacttttattcattttaaaaatagaaagacatcaaactactatttggtctggcaaaaaaaattaattttctgttcaaaactcagatctgactattttcgactttaaatctaacatcaacttacagataacatacattaatcatacaatttattcttaaatcaataaatctataaataaaaccatacatttcaaccctaaatcacacaaaatacaagaaaataaaatggagaacttatattcttggcgcagtggttgtgattcagagatcctaggtcttgggttggtagtcgtcggtgggttggtggtcttcgattggaggtgcgatggttggttttcgtgggttgatagggtcttcgtgtgcatgagaagaagagagcaagagagatgagggagagagagaaggggtgagttatgaaagagtatttttggatttaataaaaaaaaatgaaatatctaattaatttgatatatttagattcagtgtactaattttgtccaaatggatgaatagtaattcaaatttccctaaatataacatttattacaatctgttattcaatctctatttttgaaattacatgccggaatattttttttataatggtattctttatagttacagtattatgtctataaatttttgaacaattccaaataaattataatattgaaaataaaatttctgttatttcaatttaccacgtgtattcaaaacacttcaaataaattttcgacatgacaaacaactcaaaaattttaataaatttacagggatgatgttataactatagaataccgacgtaaaattttttatttgaaaagaaatattcggccatatatttttagacacagtggttgactgaaaatttgtaatacaagaagataacgatagcaattctatatatttattgatgaatgatatatttttgaccgaatgaatgatcaatttaatgtatttattcatttttgacaaatgataatgatccttttttaaaataatatgcataaattggaaaataaatctttgattaaatggatgcaatgaatatgtgttatcatagttattattttcaatctgccagctgatattgaacgttgaagttctggacaaaatcatttatgtgaaactgtcaatagtgccttagaaataaatgaattcaaatgataagttaatgctaaagaatatctccctaattaatataaggtgatcaataattaaagttggttgttcaagctcataaatggtcgatttcctatttggagtaatttaataaaaaatacagatggaaggtgaaataatattccagtattttaggaaaggttgtttaatgattaagtaataactgatttacactttcaaattaacaacaatgtgtaataattaattataatcacacattaaaagttgttggtttgttggtacaacacccaaacttccaagaacaaaataacgtataacaaagaaaattaaacaaacagaaaaattatcacaagatgaatagaggttcaaaacttttttctctctctcaactccctcaagtttggtttagttcactcatttttggcagtaactagctttacagactcaggcaaaactagaatgcgttctacactttactatgtacaaacacagagtatacaattcgagatgaaaccctttcaattcaactctctcttttgatgattttctctgtaaaagttcactttaaaagaaggagaaatgccttatataaaggctgccgaagatggcgtagaagattgtaatagaaataaccaaaaattaaaggaaaataatttaactaagtactagaattttagtgtcgatttgagagacgttgcttttttaaaaaatcagtactataaagacctccccaattctaaggtatcggttcataattgacacataatgacttttagtgtcggttagttagccgataaaacaataaccaagaccaaaaaaagttttaaaaaattatacatacacattgagtataagtgtcacttcataatcgagacta

SEQ ID NO: 3577 - DNA, 781 bp, Cannabis sativa
cttggaccatctgaggagagggaaactgatgccttaactgcctgggatgccccctctcttctctttaaagaactgcggtttggatatcatccgcttcattggtgggagagggcaccaaggaatcaaccctctctaaattggttggatgcattggcgaccccaaatgagaaggagattgagatggaacggtggtaacgggtgcgagaccacaatggaacccacttgagacaagtcgggggtgacccaaagggcatagaactctaaggccctcaactaactcttccttcaattaaagaaggatgtcccaaggatgagctagctgaaggccgtccaccaatgttctttttgagaaaattcttggtcctcgccgatagacccttaggcaaaggtctagagcgaatgggctccgactgatgtgctgttggcacggctaacttctcacccaaggagcaaccccccgaggactcacccgcagcacgagaccatcgacgccccgcaagaacatcattcgcaatatctgcagtagcctcttctaccgctgcatctccctcacgctcctgtgaaagagcatggttggacccagcgtcgtcctcagccacctcttccacctcacatggaatacaacctgtctgccttcagcttgtcacctgcccgaatcaacccacttttatgaggtgaggtaaggttagaaggtgatggcaaatcttcttgtcatagtctgccctgaaaaccttcagcaagccaaagaaatgcgcctcttgtgtaaagctggggggggggg

SEQ ID NO: 3578 - DNA, 1616 bp, Cannabis sativa
ctttattctcgtaaaataatatacactagctaacgttgaattacctttccaaaaacttgaaggattcaaattgtacttttgtactggaccagtgatgggcccggtaccttaatggcctccacgagaggccacatgtcataacatctactataacaatagtatacactcttatataaaaaaaaaattacaacttctctatataataaaaacaaaaaactcctgcaataagagcgtgtttggaagtcactatgtaattactagctaataactgtacaataagtatatttgaatataatgtagtaattacacaatataataatatttttttaataaataatatttaaaatataatttttttagtaattacacttaatttttataaggaacatgagaattgaagtgtaattgaaacagctaaaagtcaccaatggtgctatgtgttatatcgttattactacaatcaagtatcatatcatataatttaacataataatttttataaaatatcatttataatagtgctagacctcaataatattttgtacttccaaaatatgtatatttctctttccattattaattagtatggaccctatggtccttttggaaattcattgtggttaagaaatttcatcatcattcatcacaacaataaatgtatacaatttattaccttacaaacaaaagaaaaaaatcatcatcactaacgtcatttcttacacttcctttatatccatatataccgatgtaaaaccgacactttcattcttccatatagctaagtattttgtagctttgtcatttcattacaaattacatctacatataacgactcgcttcacgttataatgacacattttgatggtcgtcgtttccttgttttggcttaccccgcccaaggatgtctcaacccatctttaattttcgccgaaacactcattcgcgtcataccaaactcacaagtcacttttgtcacaagtctccatgccaaccgacgtcttaccaccaccaaacaatcatcattacctaatgataatggggcaaataacacctcaaatttatcgtttactccattttctgatggctttgacgacggtttcacaatagatgacattgaacaccaggtgctagagttcaaccgtcgcggttcccaagcagtttgggaaatcctcgaggccgcgcgcagagaaggtaatccatacacttgcttagtttacaactttattcttacttgggctgctgacgtggccgcggagcataaagttcccgcggccatgttttggttacaaccggcgacagtttttaatatttacgacaattattttcatgggtataaagaaatcattcgtgataatagtaaaaattcttccttttcgttatcattttcgggaattccatttcccatgagcaccaaagaccttccctcattcatggatgagtcaactgaaaaaagttcttatataagattctatcaagaaatatttgaaggtttagagaaagaaggtactaacactaagttggtattagcaaacacttttgatgaattggaacctgaggttataagagtaattaacaataagtttaatctaattggaatcggaccgttgattaaatct

SEQ ID NO: 3579 - DNA, 1283 bp, Cannabis sativa
ccaacaaacaaaaatataaaagagtagtgttaacaacaaacataaacataatagaaaaaaaaaagtgaaacactacacactcatagcctcgcatttatacaagtgtgaaggtagtcttggagaagcaattgcttgtaatgggcttttcatgtaagtcaccattcctgggttttcactcaagtcaatatcatctggcttcattccatcagatgggctccaacaaaaatgatgcaacaaatgacccaacattgaagtaaccaagttaataccaagttgggctcccgggcaaacccgacgacctgccccgaacggtagtagcctataatcatgacccttcatgtcaacatcctcttcaaggaacctttcgggccgaaactcaagcgggtctttccacaccgcggggtcacgagcaacagcccaaacgttgacatggacaattgtaccctttagaatatcatagccaccaatcttgacgttatcgttagctttgtgtggaagcatgagtggtgttggagggtgcaaacgcattgcttccttcactatactttgcaagtaatgcaagtttgagaaatcattttcattcataactcgctccacaccgataactcgatctagttcctcatgcgccttttgttgcactcttggattcttgattacctcagccatagcccactcaactgatatggctgtagtgtccattccagctgtgatcatatcctgtctcaaataaattacaatttattagaaatttgatatttttctctccattttttataatattattgcactacaaatccattccagattctacataataaaaatcatgttaattaattagttatgattataaatatttactttatgtttatagtatgaataaatattaaataatatataattatgttgttgcatttttttttcacaaattaagttgttgcattttaaattaatataaagttataataactaagtccactcatttattgatattgacaaatttggatatttgaggcctaagagataaattataatttttataattgtaactttaagccacgtggaggcaaggagggacatttccctctaaaaaataaatatttatatatttatatttcagtaaactacaacatgtataatagttagttatataatatgtatttttaattaaatatgatatttttattaagaagcgttagttttatttttatagttaagatacttacatgcataattgggagttaatgttcaaatcccaacaatagtgttttcgttttaaatattta

SEQ ID NO: 3580 - DNA, 658 bp, Cannabis sativa
tcgctctttcaaatgccgggcaaagaataccctttccaatttatgaacatgaagactagtgtggcctccatgtttgttcataccgttatttatggtttgtttcttattttgtttcttgttgttcttgatctacacctctatgcataacaatattaatttgtacaagatcgatcatagttaataaagttgtgaatcatcaatttcttttttagctttgattaattagttttttgtgttctatgtatgatcttattctttttgctattaattagttgggattatttctttacttcatgaggattgtattgtagctttttgtttcattataatggtaattaattactcctttactctgtttagagtactttctagtggaaaaatactccttgtaaaaaggttatatattgcaaaaattatctcttttttttctaattcaaaattccttgctatcatgcccttacatttattcatatcacaaaaattatcttctttttttcaacattcctctcatacccttaacttgattcatacttaaatctattcctattaattcaagtaaaatttctcatttcatatcaattttgtttgtttcagttgcttttatatcgatatgagagaaagatagtttggttacaagttgttataacttataaatgta

SEQ ID NO: 3581 - DNA, 1651 bp, Cannabis sativa
tatttttctccaaacatggcaatagcccctgcaccttttgcatcagcaagaggcattactttagtcttaagaagcgtagcatccccaatccatctattaatcaatccttcaatttcaatgagctcatcgtcgataagtggccggtggaagttgaaatcaaatctgagacgatcgaaagccaccaatgaacctgcttgtgatgtttcctgacctataactttcttcaatgcagcttgtagcaaatgagtagcagtgtgatgaacctacaaaatagtcaagttcagttagtttttaaactacaattgtgtccagtatgtgggaatggagaccaaatgagcctaaaacaatttgtgtcgaaactgactagcgacaatcatttattgcatttacctcatttgagctccaaaattatcttaaatgaactgatagaagaatttaagttagcacacgttacaaaaagatcacattttagacttcggtacttaagaatattggacagtaccttagcccgttgcctcagattggcatccactgttgcttccacttctttaccaacctctacaattccttctttgataacacccttatgaacaaatatgctgcccaatgatttttggacatctttgatctcgatcacagccttctgttggtttccagcttcggtaacatacaagaaaccattatctccaatttgaccacctgattcagcataaaatggagtcctgttcagcaaaacctcaacttcagtaccttcagcaacctgtattactggttttccattcaccataaggctttccactactgctcgggcagaaagggattcatatccaagaaactcagtatcaggaacattttctgtaagatctgcactattttcaacctcaagcttaacagtattgtgtgcagcttgagattgacgcctttgattttccatttcaacattaaagccagccatatcaatgcttacaccacgttcttcagccacttctgtggttatttccactggaaatccataagtatcatacaaaagaaatgcatttttaccagacaagcaaggtgctgttttgttttcttttgcacttaacaaagcatcagcaagcatttgttcaagcaacttctctcctctctctaatgtttgaacaaatcgaagctcttctcttttcaactccccaagtatgcgctgtgctctattctttacatctggatcgacatgtgtgcttaactctattactttttctgcaatttctggtaaaaacgctccctcaaagtttcccctaccatcgccgtctatgcctagcagccttccagtgcgaacagcccttcttatgagccgccgaactacataccctctaccaatatttgacgggacaaccccatctgatatgagatatacaactgcacgcatatgatcacctaatatctgaggtaaaataaaagcaaatattcgtgatgttcttacaaaagtgttatatttgttgaaagacaatattgataaatataacagtttctttgataatatcatactttaagattcatttttgaacgatcatcagcaagctcatatgacacatttgccagctccgatgccctctttataattggatagatcaagtcagtctcataattgtttgggacctgcatcagaaagatg

SEQ ID NO: 3582 - DNA, 1193 bp, Cannabis sativa
tggcctaaactcgaatctcaagacctggaaacagcctcatataaaacaaggtgagtatcgttttggaccctacgtttaacaaaagttaccgatcaaatcctttattttattaaatgataattttgatcatgtatttttcaaaatgaaacataacagtaacctgagttgaaaatggaacataacaatactctaagctagaggtgttatgtactatttttaaaaatacaggatccaattcgttatttatcaaaacagagggtatgatcagttgcttttacaaagatttattgttcgaaaagaataagaattcagtcaattttgagaaatcttaactaaacaataaaccaaaagctagtttcaactttgtaaaaaacaaatatgatcattcaagttataagatcaaaagaagaacatgaacaaggaaaatacccggctcagtagcaagatgccagacttgctttactgaagtaattaatctctcctgtggagcatgcaaaacaatacttacagagcctaccatgcagagaacacaaccaagaacaccaaagatatgcaatttttctgccaaaatgaaatgagcaagcactgcactgcatagtaaaaactttacataattactgaaatgaataaccagtgccatagcaatacagatactttaaaccgaaacgaatatacttgtaaaactaggcatacagaacgcgtaagaaactaatcgtttcttttggattagagagtgtcataccgaaatattgcatacctgaaaatgatactcaaagctcccaagggtgttacaagaattgctggagcatatgcataagcagcaaaattggctacctctccaacaatcactattaagaagagtaacttaaaattaaaacagaactagtaaaagattagatttggaatgacaatgggcaaattaaaaaattatactattaaacaagaccctacagttacatttccctgaatttaaacttctgtggttctaacttctaagaagcatgatgaaaagttatctaaaatgttatgtatgaagatacattgcttattccctctatgcccatttgaacttttatgtcattacttattgtttccaattccatcaatgcctaatttttctgaagtttaatattagcaccaaagcttggttgagtagaaaaaggagtgtatgaagtataagccatatttaggat

SEQ ID NO: 3583 - DNA, 1116 bp, Cannabis sativa
agtgttaattattttgcattaatatatgaacatgacacataacaacaatcagtaatgtttcacataaagtaacatcatgaattcaaaccaacaactttgaagagtggtaacagaatataaagggtgagcaacttccaagacaaaaataacttaagccaacaaactatggcataaagtagaatatgaattataaaatgttcgcgttatgcaatatacaatacttcacctcaaatacaaacatgttctccttgtaatttgcagcatggccagatgtttcccatagttgcatattatacatgtttggcgacaaaacctgcaagtgacgagcaaattaagcatgccaacttataaaatcagtctcatgacattataactcaaacattgattgtgacttgtgaacctcagagtatcccctctctctgtattgatttcgtataaagtccattaatttagtgtagacccgagttccaagtggaagaaagaaccaacttcctgggctaaaaattagaaaaataaaataaaatattactacagatgaaggataatctaataagataaaacaatgctattaactcgtaagatgtacctaagtgggtggcagaagaaaagttcctgttttgtacccaacagtctgtgatcatacttttttgcttcttccaagtgttggatatactcctgtaggaaaaattatcgttagaagaatattgggataagaaaaaaaactcacaaggactgatagactgcttatatatcaccttcaaacgcttctgatcaggatatgagattccataaactcgttgcaagctttctcgatctttattccccctccagtaggctgaagaagcctgtagttgtgaattcacaaatgaacacattcaaatgtcacacatcaatatatgtaagaaacaaagaaacaaaagaagtaaaaatatatagctcctgcttaacagcgcaaaacgatgcatcaccttcaaacatgccaatgccttcacaaaggatgtgttaggtatatgagggccacgacacaaatcaactaagggaccacatctatatactgtgatagttttgtctgccggcaaatcattgatgatctcaatctgaaaatattaatacaag

SEQ ID NO: 3584 - DNA, 970 bp, Cannabis sativa
ttgacatatgcaattttgcatctttattcacactagcttagtctttttatttttataatttgttcttatatttttgtgagaagcttagtcttttattattaatgcgtagcaagtcttttttatcacaaataattaaataaggagcgtattagtagtattaataaattaaaagtagtcacaagcagagcgtgagtgataaagaagaatgactacatatacctaatccatgttgtcattattttttaatttacatttatgaccctgcagtcagctcgaattgtaaccttagttgacttggtataggggtattatagacaaaccaatgtagtccaaaatccgatatataaattattcaattttaaataattatataataaaacctctcagctactcaaccgttaaaatctgtctatgtggaccaacaatccctatctctcttttggcgccgaaaccatttgaaatagaaaagttatccactacaattgcggcccacaaacatgaaatggactctctcctatagaccactagatcaaacctcccaacaaaatcttaaccgtttatcggtacatacaatggaagacaactgtacacctcaaccacacacaatcatttccctgtctccttgattccccaaatgcaaggcaggtatcgacactatagacattacatagtttgttggcccaattgcgtcaaagtgttgaacagtagcaaagcggtggggcccacaaaaacaatcgacatcgaatgttgagtcaacatgacacgtgtacgatcagatgaaaccttcatcataaacataaacccaaaaacattgatgtcacattttcttggatggtagccacaattaagagactcatgccctttgttaggatagtagtaggctgcaaaaaccactatttgtaaccttttattactttaccaaatataaataataatgggtgtccctcattaaaacgagtggtcctactaa

SEQ ID NO: 3585 - DNA, 1043 bp, Cannabis sativa
ctgttgataattgattttttttattaaacatagatttagatataataaatcaattttttaaaacagtaaaggaatatataatgtattaaaacctcagcttgaaactctttgtagccttgagccgatgactcagagagtatcttgactgccacttgattgttacttaagtagccatggaaaacagttccaaagcctccttttccaataattttctcaaagttgttggtaatacttatgatctcatcataagtacattcatgatttttgggctcaaaggctgacctaatttctttccttggcttgggaatagtattgtgtgtttcctccatccttactactgtttctgtacttactgttatcataataattaagaagctttgttaataacaattgatcataatattaacgatgattggtcaatatgtgacgagaatcatggtttcatcttagtggaacagtttatgagccaatatttttatatttaatccatataaaagaatgttaattaacaaataatttgtaaagattcacccacacttaattgtacaaacttattattataatatttattacacataattccaaatgaagttgtttatatttaaaaatttacattaaaattacacacattgtatgtaaaaaatatacatataaatatgttcattgctctaaaaaatatatatacttttatatgtatatttatatacctctttttctgcctttgataattctccatctgataaggaacgacaataagaggacaaatagcagggaggcaactaatgccataacaataggaactatcaactttttcttttttttgcatgaaagtgtggagcaaagatcggtgttaccagagacactagaataaagagtacaataaagatcgctgttagcaaatgtttgcggacatgttgtataaaagtaatttttctcaaatatgaactaaaggagagaaaaatgaccttagtaataataagccactgtcggattttctaatgaggtcgcttggaactgaaccagtaagtttgtttcctctcaag

SEQ ID NO: 3586 - DNA, 781 bp, Cannabis sativa
tcggtacgtagtaatagatgatatcataatcatacctcgccgtatccacatgcaaaatgcaatgctgttcttccctctgagtcttcctcatccttattggcaccagattctagggcttttttcagaccctacaacaagaaaattttgtaactccggatactgatctaaacatgtatagaacaaactaattatggtaattaaaaccgttctcgtgaacccaacaactaatacttgattaataacaatttgtatatttttatcaattcttttgcaactttactcaagtgataaaattttgtgaaaatttaagaggccaaatataatcgaaaaacaagggaaaccttggcaaaccactacaaatgacaatgcaaaaaagaatatcataggtgaaataccaagtccaagcttaactcctctagttttttcaataatcaagaaggatattggaatggcaaattttctccagataactactctaatttattctacttctttaaagatttcgtctagcagaaaaattacactctgatcacaacttccagttgatgcaaccttttttggtttctactttccatattatcaaaaaataccatttaatatacctcaacatcaccaacactagcagtgtgatgaacaattgattcatcatcatttcctgcctcttcagcttcttcagttccagccttctcagtggaagtggctgcatctcctgaaacagcaagacccatacccatagcttcacctagcttcttcagaacatcctgatcattccaatacctgc

SEQ ID NO: 3587 - DNA, 1297 bp, Cannabis sativa
gagtgaaaactgaagattaacacatttatgcatcaatctgtaactagaaaaggcagaaaagaaacatatattgcataagaaggtcaatcaatgatcctcatttcaaaatggtctaaaattcgattctgggttagagtgttcaagctacaatcatgttaaaaccaagtatgatctcaattcaatttgaattctaaaatattgtcgggtagtagaactaattttagattatattgcatcagaaagtataaaataatcaggctaagctactccttgattatcaaacaccaagaaagacaagaaagtataaagttgggacatcgcctaattatcaaacaccaatatataaagacaagaaagtaagctgaagaaattacaaaacatatatctgaaagctatcgggtatataacctgcagaaaaactgtaaaagctcccttgtcagtcaaaaagtacggaagctgacaccacacatgcctagaaaggtgagcaagcaaccaaattgtacacccacattaacagacagtcgactcaagattttacacatgtattcatccattactggtctgtaatctgtattaaagtaatatatatatcaagttaagaacgtctcaattagatgtcctttttttgccaaataactcaatttagacgtctcatcaccaatagtgagaactacaaaaaattcccaatagtaagaacaaatcaggctaagctactccttgattaaatagactgattatccagaccatttgttccttttagaagtgttacttgtttgttgttttaaaccttggtttagcaagtcaaattcctatttttccaaattgtaataatttttcccagatcatttaacagctttgtaagttcttctcaattgtgattgaaaaaataaaaaagaaaagaaggcaccgattacataatcatcaataatttctttaatgaaagtaaaggcgggaaatgagaactcacaccagtaagttggctgctaaatattcaacattgatgtgaatcatcctttcttatccactgattgaagtgtgccctctgaatcaccagccacaatctctacttcctcatccacttccgtatctcttgatccctcttcatcatcaagccttgctggttcagatccaatgcctggattacaagacacattacatgggttagttttttatttatttgttttgctggaaactacatgggttagttgatggttaaaaatatccgcaattagtttaccaaataactattcattacatggaaaagaaaatatacactacaactagaatattgatagag

SEQ ID NO: 3588 - DNA, 1223 bp, Cannabis sativa
aattatccactgacaaagctggtgttgacactgtcttccaaattggtgtccctggaagtggagatagaaactccatgttgttaaatggtgtaacagatcctgagacaggagaactaaagaccttattcacatcaaattcagcaaacatgttcaattgatcagcatcatcttgattgaaagcaggagatgtttttgcttgtatttcaaccccttcaaagaagctggcagccaaatctgttggatcttccatctcctcaagcccggagatagaaggcctattttctccgagaacctgaggaatttcttcaagggtgttattttggtcaacagaaaaggtttcttcagttgggttttcaagacttgtgtgaagagtatggaatgtcccaccatcagcatccatcagatcatttggaaaggcacaagtcaccatttctgaaacctcaagcccaaaagggtttgaggctgcatcttgaagcacgcaatttgcagataaagcctcatctccatttccagcataagtactatcagtagggccaacaaaaaaactgagatccatggaattaaatggttcattacagatccttttccgcaaagcatagtaacagctacgaacactgtccaattttctcttccctatggcacagttgttatcttttaaatttccaaacctattgagcttcgatggaagcactgaagcagaacgctcaaactcattcatttgagcagatgcttccgcagaaataattggatcataaaggagagtaaaccatcgatcttgcagctctcgaacagtaaattttcgagagaattgaactgcacccttagcaagtgactccaaagaagcaccagcctgcaaaaattataaagaaatataaatatataaatccaaatgaaaattgctagaacaaattcaggtgttccatgcaacaaatgatagtaattagtcaaaaaaaagtgattcaaatgaaaaagtaaacagctcagggacatgaaataacatccataacataaatacataagtgaatcaattaattgtgttagacatcaattttaataaacatgttagatctttccaaagaaatcacccagtcttccatatttatgtctctagtcttcttttagatagattaaaatgattcataaagttattcaaaaatgccatatcatacactcaagtttcctttccctgccctcgtgcagtaatcttttatggtgcctagttg

SEQ ID NO: 3589 - DNA, 965 bp, Cannabis sativa
atataagctcttatgtttctattctcattttgcaatctcttttaactttttgttttgttccaatataataattattcaataccgtaaaatatgggtggtaaaaaaaaatcatcaaagggaaaattggatggtgctaaataatatacattcaaatgaatattgaatccaatggaaatgaaagaaagatccgaatttgaaccgtatgaaagttgcccttacgcagataagattgtagtgagcccttgaaatgaaagacaagtttgtgatcaagtgttatgcgcctcaaatcaagcaagcaacattacttctttttaagagatatggtccacaaaagatccgaatcggattgaacggttattttatcctgtttaacaaggtttgaagtgctcaccaaaccaccgaacctcatttccgtatcatctgaaatggtcaaagagaagagtcagaaaatgtgcatcatattgcttctgcttttcaagattaataggcaacaacaaaaccagcagaattattaagtttgcctagtttaatttggtcatatcttaagcaaaactcatagatatgacatgcaccaaccagtcattaaattgcaagaaatcaatggtttctaaaatagggtgagcaatacatgtaagcatccatagtggacatgttagtaaaaatacgtactcagatcccactcgagtccagaagttgtagtcattccagacggcatcccaattggaatgagtccacaatgtgggccttcaactgaagactgaatgtgtatctcatgttggtgagttcttggaagaaggtgaatgaggcaatcatcagacaaaagaactatccgaatggttgaaaacctgtataaaacattaatgttccccatctcatgatcaaaccgtccaccaagtgctccagcaactagaatgcatagctgacatgataaagaagaaagtgattatgatgatattataataaac

SEQ ID NO: 3590 - DNA, 1540 bp, Cannabis sativa
ttgtcttactccattccaagtaattgggaccagtcaatttatgatccataattttggacatcataagaaccacatcacagaaaaccactgattttggatctaatttcatttctgccataacctcaaaagcaaatatcgaacaacaaagcaggaaacaaacaacaaaacacccaaacacatagaacagagaaataccaaactagaatagtgtagtgggacaaatgcaaatagtctagagaggagctgaaaaagagctagagaccaaccaccaccggagagatcgtctgacgcaccgacacataaggtgggtggaagcaaaaacgagaggcgcgtgaggcacacacgtaaggaatgcgacaacctgacttcggggtataggagatcggtgactgggcaagctttatgaattggcggtgagaacaaaagatcactctaaatagggttcccaaaaaagaactcttaaaacctaattgcaaaccccaatttgtgattcctaatcctaaaaatcagctctaatactatgtagaaaaaggtgaatcaattatatattttattcaatagaatagagcatgtatttttatatacaaaactaaatagcctaaatagaaaacttaagtaattacatttatttttaatttctacaactattatacagctaatatattctaacaaaacttaaacccacaaataagttctagtaagacatttgttaatatattttgaatagatcttgaccctattttttgatttgtttagatttgaaactctaaaatctgcaaaaatatgattttactcgatatccaactcgatgggacttagaaataatgatttttatgaagaaaaaaaaattgcacgataaaactcaatgcccaactctacaaggcttaatatcatgatttttataaagagaaaaaaaatacattttcactcgatagtgcttaaatgcaattcttgcaataggcttaatgtttcacttaggtgtccatttaaagtgatctattttttgaatttgggtatatttttcaggatctacgggtttaatatgtgtacatacacgttagataaatgtataccttgaaaacatgccaaaattcaaaacaataccctatttaggatgatcatagttttaaggtatacatttctcaaatcttaaatgtatacgtagcaaaatgatcacccccgagagatgtccaccttctcatagaaactcttgcatatttttcttccagcaaattgattgagagaaatagattttgctgcaatttggctcttaaatgattgagagcaaattggtaggggtaggcgtagaattatggctggcagcagtgctagccattttatgggcggtttaaattgggagaaacacgataatatttgagggtaaagagtctacaaaagaagaaatttgggaggagataaaattttaggtagcaacttgaaccttttaatcaagatattttgaaaagatctttctttcctatatttgtgtagagagtgcggaaacctattgtgctagttttgttttcagtcatctaatagg

SEQ ID NO: 3591 - DNA, 1193 bp, Cannabis sativa
agagtatttgtaaaagctgaaaatggaaggaaagaaacataggagtggtgattttaatggattagtgggcaagtggtgtgaaacaaagatgacctaaaagtttcagactaccctaccctaccctctctcaccatcacggtcaccaatcccaaccccaaccccagaccttcccttctcacggcctccaccgacgccggcctcctcttctccatttcctgttctcacactccaacaggtaggtattactactaaccaacattttctctcttttcttccataactcactcaatcaatattctctctgatttatgcgcttaaacattaataactgtcgttttgtgatccccaacactcgtaaaaatttgatttttattttagtttagtgagcttgagttgtgtttaagctgaaatggcaaaacctaattagaaactgtatggaattctgagatttgggtttggtagtttttgagatgaattaattaggtttaatttatgcagatttatttgttggatgttgcaacaccatttttacataatccaaccaaatcaatcgatgttcagccttagtagtagtcatggctgtcatcccacttcaaccattggctcttgctcaggctcagtctagacgtctttccacttgtcaccgtcatcctagcatacccattactgggttttgtgcttcatgcctcagagaacgcttggttggtattgaagcctctgttaacaacgacactcccactcgaaaccaagctggttctggtgctggtgctggtgctgcttcttcttctggatcagagcttcgtcgtagtaaatcatgcaatggacccaagtctgaggtctttgctaacccttctgaccctaccagacgtaggtcttgcgatgttagggcgcggaatagtttgtataacctctttaatcttgatgatgagaagaaaggtacagctggaaagtttgaggttgagttggggaatttaaggtttgagttgaaagaagaggacaggaatgggaatgagggtgagattagggtttctgagcgtggattgcttgatgaggaagatggttgtgagttaaggcctatgaaggagtttatagatctcgaatgcaagaagaagaagaaaggtacagggaaggatttgaaggacattgccgggacattttgggttgctgcgtctggtttgagcaagaagttgagg

SEQ ID NO: 3592 - DNA, 553 bp, Cannabis sativa
aaaatctttaatcaacatttattgcttttaatatttggtcttaaatataacatataagtttgcaattaatatacataagagagtgaaattaatatacttgtatatatacttatttaaaaaaactaattaaaggtgtctgtaagtgaaatttaatttcagtcttcttttactgcctcacaaacgtgcagagagtgctatcaagctgaacatgaaacctttgtaaatggtcttcagtgagaagtgtttgcattagtaacctgtcaatacatatgtatatttataatgaatattgttcaaatttatttatttattttttttttttgcaaaatattgttttatatagattgataataattattataagatttccaactaaaattctaaataaattaatcatacattaataaaaaaaagctgacagtatgttattatcaaaatttataaatttaaatacgttttagccttatttcaaactctaattgcccacatattaaaaaaaattatattgcaattgcattaaagaatactatgttgggcttctttgatcaatact

SEQ ID NO: 3593 - DNA, 1253 bp, Cannabis sativa
agaagaagaagaagaagttgttttggattcttcctatgttcttttgatgagaggtaattacgttaccactggtcccgaagcaagctcttgcttccacaaacgtacaatccaaaacatcttctccaatacatcaaagattctcttcccatctctgtccacaaatagttttctagaattctttgatcggcccaaagctcacatattatcttcttttcaagatttgctactccttgaagaaagactatttctattctgtgtcataaacccaataaccaagcaagtggttgaacttcctctctgtcccaaaacactgtacaatgactacacatgttttgttgaaggcattacatatagatgtggctttgtagctaataaccagggcaacttcaaggttgtgttaatcacttcagataatgctcctaatcgcgagtttcgcggatctatcttctgttctgagaccaaagaatggagttgttgtttcaaattactatttccattcagattatatgattggcatccaacacctattggatgcagcaatggagtcatatactggccatttgggggttcatcttttcaaggaatagcagcattcgacaccagtactactcaatgttgttcggttgtcatgccaccagagttcgacaccactttatggcgcaatgctgagtttggtgttcgtcttggagtagttcaagggggtcatttgcgtctgttgcagctgtttttagatgaagaggccgcggggggtctccatattctcagagcatgggatttagttcaatcttattcatcgccatcaccatggattatggttaaagatgttagattgaaatggggagcatatgaaaatatggcattgtttcccattgcaatccatccccaagatgaagatgttattttcttgaaaagagtactaatcaatgataaggattataatgctcttgctgctactgacaactttgagaatgataataacaatgttgatatctgtctgtacagatttgggagaagatgttatgaacatgtctgttactgtccattcgccgaaaacactcgaagtcctcgtgttttgccgctgcttgttcatggttggcctacaagaatgcctcctctggataccaagcatcctccaccaggttttagattatcaaattcatacattcatagtatcagatcgatatatcaatagtgtttaaactttatttaaatttatttgattaaagtattttgttgatgtttgtttcttagtt

SEQ ID NO: 3594 - DNA, 1192 bp, Cannabis sativa
tttgatattactttcactaatacagccaagtagaaaaactaaagaattaatggtgaaattgaagaatagagatttgtttagtatgtttgatggtaatttaattctgtatttattgattgtgtgtataaatgtgacagttaaaaaagagaaagtgaagttgtcgtttggagtaaaatgagaagggagattaatataagaaactctgtatacgacaagacaattacttcattgttttataatacaacagcatagcatggattaataatcatcaaaccctattcccttttccctagtcccacactccaacacacaattaataccaacactaatcaatttgcctctttcatcaaaaacgacactaaatataatgtaatatataaattgagctttgtcctattttcgttgccattgtataatatcatacatatattttccactcttatattcaacactaccttcaaaaatcaaaagtcatacttttccaaaagagaaaaagtatatataaataaacaattcgtcatttcaatgtcttatcaaatcctaatctctcctacgagttttctttgcttacacaaaagatacttactctaatttctatttaattaagaaaaatttggcttgataatgttgaaatattattattaaatggatttattttgcctgaagaatgaaatagtaataaacttcaataattaaaaatttaactctttttttctactttagaataccttagtgaagtgaatttttgaagtaagaacttcaattttttttcttaccaaaaaacaaatcaaatttcaaagacaactatgtaggatattttttattttaattctctatcgtaaagaacaatttaagggaatcgaaagcgacgcacaaacacatttcgtccacgtaagcaggacattccgggcctgctattcccgcggcccagcccactttaagcaaagaatatcaagagtgtctgctcaaatgggcccattgacaagtattcaccctcttagcaatcagccacctgtgggtcccacacctggtacgatttcgtacttgtacggattacgacgagttttattttctcttcttttatatgccgccacttactttaacggtcaagtacgtacatccgatttttttgggtatttatacggtgtattgcgtatttagttcaaagtatagggagataaacgtggtcaaa

SEQ ID NO: 3595 - DNA, 661 bp, Cannabis sativa
tgaaggtctattttgattgctatgtaaattgtgacgctccatgccttagcatgtctagatatgagcttgagaaggtatcctaagaaaagaaatattaaatgaaataatatattgtattttagtaaaacattatgtcttcttgtagctatatgggttatatgattagaattaaaaagttttgtcgtggacacaaaagagccttcatgggtaaaatctcagaacgaggtttagggaaaaatatttctatggcaagaaaaataaattattttaaggttgggaaatattgatcaagcctaaggaaaattatgaaaagaattttttagggtattttatgattaaatgcacaccttgagctagagtgttcacttaatacaaataaaaatgattttaggattatgtaaaaattattgtagtgtaacaaaagtttaatttttataccccaaataaatatttggtgattgatgaattatttcatcaagaactataggattgtgtagagaaaattccataaaagcaaaataccaaaaatgactcaagcataacttgtaattaagtggagaatcaaggaaggataaaatggccatttctcttccttgtcgaatgtagcatggaagcctaggataggggtcataggatgcttttcatttgttttttttttttt

SEQ ID NO: 3596 - DNA, 1208 bp, Cannabis sativa
taatagcccacaaatttttcaggataattaagttgtgggtttcatataatttaatttaataattatttataaggggtcactattaagtgatgttaaacaccattaatgagtaataataatggtataatatatatttagttttatatatacaagtgtagtagtagtactatagcaccctatacataaaaaaaaaaggaaaaagaaaaaagaagaagaagaagaagaagagatttttaattaaaagagaaagttttgtggttgaagaatctctatcagagagagagagaagaatttgtagaagcagggcacatgggagcaggaggccatgtgggagaagattcagacccactttttttgttttaatttaatttaatttaatttttatatatttgagcaacaaggaatataacatggatccaccccctattttgtaggggtaccctcttttatgagctctaatcttgtaataaagcatgtgaaggagctttgttgtagggcagcctaaaagagtcagaaccaaatttagtaggaccctccaatcctcatcatctatttccacccacacacacatataaattgttatgagaattgggtctctcagttcccttggatacacttgctctacaaaagtgaaagcaactaatgatttctccatcaatacataaatgacaacacatataccatccttccaaatactttccttttcaataaccctctctctctctctcctcatagtataagagaaagagagagaaagctcactttagggtaaggagagggatcagaggaaggatgatgccctagttgggagaaaaaaattgttcttttttagactgtttgtcagtacatgatccttcccaaccataatgttttttacccaccaactagttaaaattcgtacgttaaaagttatcttaatttttctcaagtaataatcttatatatactacgtagtacatgtacacacaacacataataattttagttctttttcgatttctaataatgaccaataattagattcctttattttcaatttctactatatgtaatatatatccccgcggtgttgaaaaacattttgaaggaatttgactttaattaacaatttttttttatgttcataaagtaatgatgattagtgtgacttagttataataaaaagaaatgtcaagtaattaaaataagaagttattagtaattaaaag

SEQ ID NO: 3597 - DNA, 2240 bp, Cannabis sativa
catggtacttagatactggtgcaacaaatcatttgacagttgatgcacaacaactcacaacaagtgcagattacaaaggcaaggccaaagtggttgtaggtaatggagcctctatccctattttacatgttggttctaatagcatttctacacatagtcccaataaatctttactgctcaaagatatacttcatgtccctagcataacccaaaatcttttgagcatttctcaatttactaaggataacaatgttgttcttcaatttgactctgtgtgttgtcttatcaagggcaagacaacaaagcaagttcttctaaggggttccctcagtaatggactctacaaacttgaagttcctactcaatccatagctgtccaagaaccacaccagcctagacataaaactgctcattgtaatacctcagttttcaattgtactacaacttctaatcctgtctttgataaaaatagaataagttctacatggcattgtaggctgggacacccagccaagcccaatcttgttcaagttttagctcaagtatgtcctcaaatcagatgtaaagaagttgatttctgcgatgcatgccaattaggcaaaatgcatcaatttactttcaaacctactgctaataagactgtttctccctttgaaatcatacacacagatatttggggtccctcattttacacatctagagatggctacaagtattatcttagttgtgtagatgatttcacaagatttgtttggatatatcctatgcaatctaaagctgaagtcacggttctttttacacatttccaaaatcttgttgaaagaatgtttgacaccaaaataaagagtgtgcaaactgatctcggtaagaaattttcccctctgtacaaacactttcatgagttaggaatccaagttagacaatcttgtgctcatactcatcaacaacaaggtcgtgttgaaagaaaacatcgacatgttgttgatatgggcctcactcttctagcacaagcacaaatgcccctacacttttggtgggaagcatatgcctctgctgcctatttaattaataggctcccaactcccattttaggcaatgtctccccctatgaaaagctatacaaccataaacctgattacaaccttcttaaagtttttggttgctcttgctttccacttctaacaccatacaacacacacaaagttgcctttcgatctagcaaatgcttattcttgggatacaatagcacacaaaaaggatataggtgtttacatcccaatggtcgtgtgtatgttgctagaagtgtcaagttcaatgaggccgaatttccttaccgtgagctgtttacacagaaatccaacacaacttccccacctgtcatcatcgatggcaataacttctccctgctcaattttaattcaagacagtttaacacttgtcctcaaaccagacaaaacaacgacaacccagctactacatctgagtccacttcacctccttaaacaatacagtccccaactaccactctcagtcctcaaaccagtcagcatacagagtctccattaccctatcctacatctattgaagactcacagtccagttccaatactatccccccagaacctgtcccacttcaaaatatcaatacccacagcatggtaactagatccaaagcaggggtgttcaaacccaagacatttatcactcaactcggcactgcattagaaccaacatctgtaaaacaggctcttgccaacccacattggaacaaggccatgaataatgagttttatgctcttaaaaataagaaaacatgggtccttgttccacctacacctgatatgaagattataactaacaagtggctgtttagagtgaaatataatgcagataatacaatcaataggtataaggctcggcttgtagctcgggggtttcaacaaacaccaagtgtcaattttttggagacttttagtcccgtggtaaagccctgcactattcgaattatattctctcttgcagctcaaaaagggtgggacattcagcaaatagacattattaatgcatttctaaatggagagttaaagaaagatgtattcatgcaccaaccacaaggatttgttgatcaagattatcccaatcatgtttgcaaattgacaaaagctatctacggcctaagacaggccccaagggcctggttcgacacactaaagagtacacttctgcaatgggatttcaaa

SEQ ID NO: 3598 - DNA, 2024 bp, Cannabis sativa
  modified_base (1470)..(1479): a, c, t, g, unknown or other
agccttgataataaaataattttgtatggcgttctactaagcataaattggttttgcagttgtggcgatggttctcttggtattcccagtcaaagaggtgacaattatgaatgtagaaatatgaagctacttcttaagcaacagcagagggtaatgattttcacttttctgtcattaatttgtttcatcattagaccatctccaatgcatataaaaaatttgctaaatttggcacaaaaaagagtaaatagcaatagcaaattgaggtaaaacgtattatcattaatgataatattaataaataaatatgatctatttcaaaagaataatgacaatttttctttaagatttcgtggttaagacatttgagtcctgttgctacaatcattgtgtgacctcgggcttgttctctattgctttgtaggtgttacttggacgatctgatgtctctggttggggagctttcttgaaggtaatattcaatttgcctaccacaaccgttgattttccttttctgcttttcatccaaaatttattttatttgtttatttatcttccagaatagtgttggtaagcacgaataccttggagagtacactggagagttgatatcacaccgggaagcggacaagcgtggcaagatctatgaccgggagaactcatcatttctcttcaatttgaacgatcaggtatgtgacacatgtcaatagtactcaatcctagtactttctcaagtatggtgaagttttttatgttttgtctcttcaattttgaatctgtttttgcagttcgttcttgatgcttatcgaaagggtgacaaattgaagtttgctaaccattctcctgatccaaattgctatgcaaaggtacatttttttcatggcaaaagtataaacaattagagagttccttcccacccaagagggtaggtttgtacccacaaaatctgaggttcatttcatggcaggttattatggttgctggtgatcatagagtgggcatatttgccaaggaaagaattggtgcaggggaagaactgttttacgattaccgttatgaaccagatagggctcctgcttgggctcgaaagccggaagcatctggttctaaaaaagatgagggcggcccttcaagtggtcgagctaagaagctggcttaatatataccacgatgatgatttatttcaatctttggattcacatttattttgttctttcttgtttggctattcttttttttacaggtacaatagtcattctcattgatttagaaggcgcattcttcatcatttggtaatgggagagagagagagagagagattagccattgcttctctcaattcgagaaaattgaaatttgtcattttacgattcatgtttccttcaaagccaattgtatttgctaacttcacacgttatcattttaatgaaacattttctaaccaaatttatctattattattattattannnnnnnnnntattattattattatattttaagaaaagcgtttatatataaataaaagcattagacctcaaggtcgttacaaaagagttgtttagggatagaggaattcggaatataaccaaacttttggtgggaaaatgtccacaaagtcacgttatggttatgggttgtaaaattacattttttactaatatgttcgaaagtacaatcaacaaaaaaaaagggagaggatctattattattcttgtctaattcaatattaacccacttatgatttttttaaaattcaattttcaatccagcctaatagtaaatctaggggtgttcataaaatattcaatccaatccgcgcgatctaatccaatttaattcaccaagtgcggatatctacacttgtacggattggattggattgaaaaattcaaaataatccacacttatgtggaggattgaatattaattgacatgtaaaagtaaacgatcaaatctacacatttataaaaaaattaaaaaattatctatacaattaaaatgtaaagtctaatacatataata

SEQ ID NO: 3599 - DNA, 946 bp, Cannabis sativa
gtgcggttagcaattaagttaaacctgcagacacattagttctaatgaattgagtactaggcttcatcactcctctctagtgcttgattaaaattcaaacacctctttcaattttaaaaccgattgacaataacttcaaacttggaccataactgttgctaaaattttctattgttaataaaagtagatcaacattgcatgtgtactataataagaatacttaaataaaaacagagcataagcaaaactgcataagcatgaaaggtaacatacttcaagttggaagtgagggcatctcaatttcttcgtccaatatcccattcgatatatctgaagtttgaaaagaatctttcctacctcgttccaaagaagttgcttcatatatccctacaaatttcaatcaaatttataagaatcacacagaattaataattataaaaagtaacaaagatgccatccacgctaaatactgaatccagcaagtgtgcatctcacagcgaagaaatgttgaaacactaagtggcagaagctattttaaaaattaaactataagcatttgagaaccattaagaacttttccatacaaacaaatacacctcacaaaagaaaagtgacacggagatgataagattgacacaactcacacaagatcattagcaagtaatgacaatacaaatgatatttaaacatggaaacataccaaagcccaaaattagacagcaaattagaaaccctgcaagagagaagtccatcttgtaaatgatctccatcacaattatgcatcctccagctaccattaaatgcctcggagaagagaataccatgtgtaatctacaaagaataagaaagtcatcaaagaaatgacaaagataaatgcaagacatttcattcgaattgtcaacaaagctcaattaaaaaaagagcactatattgtagaaatgggggg

SEQ ID NO: 3600 - DNA, 1886 bp, Cannabis sativa
acagaataagtcctaactctaagactcctcgctcaacgacgaccaggtttggtcctcccagatccgatcgagcaacaagctgaaggaggaggaagaagaggatgtggactcgcatttttacgagctacaagcccagatttatttttttaattactgcccttgttgattttttcttgaggtttgattttttgaagcttttaaatgcaggggtttaggatatgaagtggtgatggttgtgggaggtggtgtttgttgtgttgtggtagtgtaatggaatagaatttgttttatttagggaaaaaaagaaaaagaaaagaaaaagcagaagagaaagatagacattatcaagagagaagaaggagagataaggattttcgaaggagaagcagaaaaaaaaaagaaaaaaaaaagaaaaacaaaggagaaaaaaaaagaaaaaaggaaaagaataaaataaaataatatattttttataatctatttattttataattttaaattatttttttataatattttaataagtaatattacgtggaccactgaaaatttaccacgtgtacaagtgtctacacgtgtacagtctaatgtggcacttaattgagatttttggacgaaggtgtatagagtaaaacggaatgggagtttaggtagttttgccgccaaaattttggtttttgtggttaacttttataaactataaagttcgagtagtttagccgccaatatctctttaattaataatctgttcaatttcgaaaaaaaaaaaaaaattaataatcttgttgcatatactatttagttggaggttataaaatagagtggaaataaattatatttcattttttatttatttatgtcattctaatataataatttttctacaattctattttaaaatagaaaaaaacatcatttttccaatacaagattaaaaaaaattattaatctttttataaatattttgtatgaatgttaaaattaatttcatttaatttccatccttattctcattattatttttattcctaatcatttctacgccacgttaatgtttgttatccttttttaaccttgaattcttgtaagatgcatctgtgcaccacataataagacatcgaaaaagagttattacatgagtatgttgtaacagtgagcgaacgaagaaaaaacaaagaaacgtactcagcaataaaacttttgtgagtgaaagatatagtttattaccaattacttattggtcaaaacaaaaatctgcacagtaatagttttactagagaaattcatcatcagtacagccaaatagaactgaaaaaaatccaaacataagtttcaactttcaaggcatcaaatcatataaaaaagatatagatatatttatatgtatatgattaaaagtgattagttgcagtggttgatgatggagtggtgagtattttgtggatagcatcagcgtccatcctagccgattcttgcttgacccattgaaccaccttctccgcctctttagaagccttgtcttcttcctttaaggcctttttaagccttcgttcttgttctttcaccgaaaaagtgctcatatctgacaataagttctctttcttttcccactttgacgatctacttcctttaccattagatttctttgaggagaaacaaaaacagactgttactctttcatccattttggggttttggtttcaagattactattattaactataagctttcaaaatattctagctaagacatagttgtctattttgactttttttttgttagtatgaaattgtttattttgactagcaatacatactagttagtaggtaggggcaggtaccgtgataacagtttgaaaggaggaaagtgtttaataatgaatggaa

SEQ ID NO: 3601 - DNA, 1139 bp, Cannabis sativa
gctgatcaggtgtatgttccaaaacaatacgcttgagaggatgagggtcgaccataaatttatgctaaggagtttgtttccctcaacgagccacctctcgtgtacaatttcgatgaacataaggcccttgatcagctagtatatctcttctctgaaaatatcgacattgttgtggcccgagcatatctatacgaacatgagggtccaatcaaagttcactgcaaatactatgatgcttcacatgcctgggttctgattttagaaatgctgcaagaggatgctgaaatcccaatctcaattgacgggtgcatatatgttaaggaattagcaaacatgttccttccttggcctaaatacctaattgcaacatctgaggtaacttttgttataaattaattattaatgattagtggagtttgaatatcttaaatattcaaccatagcgaagtaggttctacgaatatatgtgctgcggtgggatggattaataagtgcattgcgatttaactggtcacgtaaatctggctacctgcgacttaaatgttctcgaaggttagggtcattttgacatctacgacatgtcgaccttgatcaaccttgaaggtgaggtgctttctaattgataactttgtaagttactcatgctaatttattcattgtaattaccgcaatggatgttattttctctttggcgtggaccttcccatgtacgggatcttaaagattggctttgcgtatagttttttcttgattcacttataacagtatttgagtctatccttcgagagtcagtctcttgcctgggctggcgttcaaatagataagacatataacttttgctaatcctttgtgagcctcacagtggtcgacgatgactcgagggtcaagttttctattgttctggtgggggcctcatagtcgtgtgagatggtttgggaacatagggccgcgtttgccttggttttggaccacttggattttgtggaatctctctatcaatgagaactttccttgtattcactggttgttattcctggagatgtgtagggttatttgtattgttctcttcgacataacatctggtgccctcttggtctttaatccatgaggccttcctcatggtcatcttgctaggggtt

SEQ ID NO: 3602 - DNA, 1165 bp, Cannabis sativa
tacgaagttctagagatacaaattaagtattattactacaaaatattaaatttaaatatttatttacatttaatttaaatatttatattgtaaatcgagagtcaattttgtagggaataattatgttctcttacataagaaaaacactataaacgacgtcgttggaataggcagaagaagtaaagaaggaaagatcgtggtccttgccttcttcgtcgcgttcatcacatcaacccagtcctcgcccaagggaaattggagatttgggttttgcagttgtgtagtgcaccatcttcttagtctactctactctactcagaactgagtgcggaggaccgtaccaaaaccagaatgggtgaagagagagaagacccccaaaagctcaagaggttagccgccgcttcctatgactacgagaacgattccagatgggacgattactggtccaacgtcctcattccaccacatatggcttctcgttccggtgtcattgatcacttcaagcgcaagttctacaagcgttacatcgtccgtactcttctttttctagtttatcaacatctttcccattttctcttttcttgctcatctcatctttatgttgtattctgtactgtttgatttcttggaatttggagtgaaacccatgaattttatctagggtttttgctgttttgagtaattggataattttgagaactggtcttttgtatttaagtatgttgatttattgaattctcttgtcccaagatgataaataatatgtgaattgatgagattttattggggatgctaaacttagtgtgtggatttcattttaggttgatcgtttctggagtcctggcaatttattagtatttattgtccagattagactttgtttaggctccaagtatagatttcgactgtcctttttctgcggttgttgctatgacaagtgaagaactgaatcgatatggggattctgattccgcctttattgcgatttgtgtttgatactctcaagattttacttctgataaaaaagaaagaaaaaaacagatattttactatctatttttggggatatttgagagtatatttctatcaattcctgtctttaatgtgtagatttcgaaagggaatagagttacaatgtatgaacgcaatgatacaaacataagat

SEQ ID NO: 3603 - DNA, 1239 bp, Cannabis sativa
tcctttaggtgcttttagtttcttgaagatagaaaaaagggtatgatcattattggagcttgattaattatgacgttttgatccatatggttttttaattttcattatgttttctgcttaaggaatgatatatatcgatcaatcaagtatacatacgaattctaaacatcaatattaaaatccaacacctagagatgacaagagtaaagtaatatatatattatagtaccatatattccacaaatatagtagagtaaagcaactaacctaacagcaaccaaaaaaaaaatcctaaagtaaaattttgtagctgatgttgtttgtgtgttaacttacctaaatactgtcagcataagtagcaatatttattagttgcctccttgacttatatattggagtccactcttagtatcataaaaggataaataatttccttctacagaagaaaaacacttattatgagtccttgattcaaccaagaggttaccattatatgatactcttcttgtggttggatgaagcttattggagacaatatgcgcacactttggttaacccaagactttcaagtccaaagagagatgtttagtccaagaatcatccacatcatatttcttcataacccatacttgaacacattttgatgaagttaatgagttagtcatcagaggtagacaaccatatacaagttaaaaatacttcgaatagaagtgtgtttatagtttaaagatgaatagggtttaatgagcttaaatttctcactacataaattaaaagtaactaccatataattaataatgtaaattgcctaatgaatagagccacttagaatcgatgaaaagagtctcaagctcatagtagaatcattatatgaggccataagtgagtggtggataatttacgtccacgcactataagaaatgtctcttttgctaacgcaattcattactataattatggtgatagagagggaagaatgtatggagttggagggagttttgtttaattggttgtgcggggttccaaaaataaatagaattatttaattgttgtaggaaacaaattacaccattatgactacccacaaaggaaataagaagaaaagtatcatccttcttattaggcgtgtgaatttatagagaaggagttagatgaaatatgattgaaattttccattatggtcatcatcgcagaaaatgaagaggttaggagatacttgatgtttgtggtgtgcattca

SEQ ID NO: 3604 - DNA, 1502 bp, Cannabis sativa
taattcatatgttggtattgcttgaaattagttgagaagcttacattatcaacaaaaacagtgccaaagtttccaacaatgttgataattccaaaaacaagaccaccagaactcaacattgttaggtatgatcctttgtaatttccagtaacaggaccacaagattggccatgatgagatattggctgctgacatattcttgatttgctagccaactctagtagacggctgtgtatgacactcgggctaccaagctcgctgctcgtcacgtatacaaggtagacaaatattaccaaaaccacatgaactgaaaccaaataacaaactacaggctaagagcaagacattgttataagaaaaagaatgaaagaatatcaaagaacagaaaaattggcaagaacaacaacaacaaaaatagaatttgagagcacctataactgaatgtatgtagctagccaagaaggtagctttcaatcctcctgctaaagtataaacaattactccaaggggtattaggaagctagcagcataaatgtttactcctgtgagtgcatttaccacagcagaaccgccgagaagcagcatggccgtgacaataatattcgtcataaaacagaaagtaagaaagacaatgtgtgctgcagttccccatctgaaaaagaaaatgttctcatgaaaattaattgtatgttatatattttggtttgagatcatcaatgctgcagcctgcatcacctaccgagcttttactatttcacaaacagtatgagcatgaggagcctttcttttgatttcaatagccattataccaaacaagagcacctatcagtgtaatcaaagatgtaaagtcacattgtgtaaaaggggttttccatattgaatatttttaagagtaaaattggtgtgaacatgcctgaattgtagccccactagcataccagaaaggtccactaactccatactgccaagctacatttgagctttgtaagattgttgctgcccaagtccactattgaaatcattcacaaaaaagtctctaaatgttgatatcaatcttagtatacaaaaaatatgtggtggatttaggtgatttcttacttgggatacaatcacactggcaataagtcctgttttaacatttctgcctgcagtgttgaaccattctgaagtgtgacgagaaccaacatatctcttctcaagccacacctaataattcaaaccaatacaacaaaaatcaaactatgtatttgcactttgtaacttattataaaacaaatctctcagattattaaagaaagggtaccagaaaagaagtgaagacagcaaagaaggcaccaaaaccaagaataattgagtagcccacaccttgattaagcacagctttgccttcaaagaaactattctgtctcacacagcttccatccccagaaacatggtagtatttctctgagaaaccaaatggtggacactgtaaatgggaggctgccattgagaaactcaga

SEQ ID NO: 3605 - DNA, 2126 bp, Cannabis sativa
  modified_base (153)..(156): a, c, t, g, unknown or other
taaaattattagtttatcaaagttttcaaactatgaatccaaccataaatggaaactcataatttaaacataaatagtgtatagtttcacttcaccatagagagattatttgtttgtgacaacgagacaaggaaggagagagagagagagagnnnnagagagagagagagttgagtgagtgaggatgtatggctccccatcttgactgagatagtgagtgagtgagtgagtgagtgtgtttggctcttcatcatcatcaagtctgtttctttttggtttcttttcttctgttttctgagttgttaatcctctggtctgttgttggattctgttgtcacctttcctggtcccgtttattttgttttcatcatccccaaacctttcttagttagctccttgtttttaactctgtggggtttgggttctcctgtttgctttgttcttttgtgagttggtgggtctgtctcttggccttttttgctcccggtagcttggttgtttgctgtttgtctctattgtgtggtgggctctgtggggtcgagtcttcgttactttgggttgtggggtggttcactgtttggtttcttggtgggtttgtcttttgttgtctgccatggagttaattaatgccaacaactctgccattaatgataacggtaaatgctattctcgtgtggaaactactataaagcttactccttgcacctcatctctccaggctttatcttccctttgccttgttggaagagttattgctcctatgattgttaatgaagccacggtactggatatggtagctaaaacatggaagttcaaggtgaatgtggctacgttgtatgggtccacgaacaaccagaattgctttgagtttggctttgatcgacctgaggaccgtgcctgggcccttgataatggaccgtggcgtgtccggggctattccttgattcttcaagcttggtcccccaggattgacttctcggatgtcctcgactcgatgataatatggatacaaatccacaacttaccccgggactacttctctgttaacaatggaagtattttgggggggaaagccggcaaggtcatcaaggtggagttggatgaagggaagccggcactgtggaaaaaatttcttagagttttgattaagatggaggtgaatcatcctttgttctcgggatgctatttcgagttggagaagggaggccatcgttggattcaattcaaatatgagagggtgggcattttttgctataactgcggtaagttggggcaccaacggaggggctgttcactttcttccccagtcacggtggccaatgatctcggtgttccttcccctatgtttggaccatggctctccacggaatccacctacctagatgtctttgcaggagcgaactctttctctccttccctttctgcttctcctcgacctggtcgtgatgggaagagaacggtggccttgacgacatccatggatgaacttggaagaaactcggtccggctgaacagaatggtgcgtgaatcgaaaaggccggtgatagcgactggtcgaaggtctgctaggggcaagctggcaactcagatggcgtgggcaccaaaactcaatactgtccctagtacgactggttttgctaaactgggtaataagggtggctttggagaagatgagaaggaaaagggttctctgaattttcccaaagttgttttgaatcatgttgactatccgttagccttggacaaagaggtgggtgatggacatgggcttcaagaggaagttattggaccggccttttcctctactgggccgatcccattgctacctatcaacaacagcaagtctattatcaatagtgggccgtgtgagagaaatgggccgtttgagaatcatgtggcccccccaccagctcgtgagccctcttctctctccaaaaagaagctgggcgagaaagctctttctcaggccgtgggccctctgcaggttagtgggccggttgctaaggatataagtttaatgtcaattaacactcataatggcaatttgggtgttgggccttctaagactatttcaaatgagagctctatttgtggccaagaggcaaatgttgaccatgatgaaagct

SEQ ID NO: 3606 - DNA, 1952 bp, Cannabis sativa
aactacctgattcactcatccaacatattctctcctttctttcaactaaggatgccgtttcgacttgcctagtttcaaatcgttggaagctcatgtggtattctgtctccgaactctctttttctgattttgattgggcaaattcgaaaaagttttacaattatgttaataattatttggaacgccgcaaaagaggcaactattttatcctagattcagccataactagttttaagcttcacatgaccaattcttatcaaagaagaatggctcgtgacctagataaatggttagctttcatagttgagaagaaagtgaaggaaataaatcttcgcgtgaacaagcagaggagttacaggggtgatattcactactactccttgcctaaaactctagctgtcaacgcaagatatgtaactacattgatattgaattcggtggagttggattctcgttactcgtttagctttccatctttgaaaacattgacattagcttgtgtcaggcttgtagataatgatgtagtagataagctattgatgggttccccttcccttgagaagttgcagttgcatttttgttgtttgtctactgatactcaattccgcatcagcatacaacatagtttaagcctcaagtttttggatattaaactcaccaaggatttggtggagcgaatcgcactcataaatcttgaatctttgtacctagcaagtgtttcctttgacaagataaaactctctgcatgcaaggcaattagaattctcaacttaacttgttgttggggtaaggaagagtcatcatcattagagtatctcatttctaaccttcctcttcttgagaaattgactttgtgcaagtggaagttagagcacattgagatctcgaatcagcacttggaaaatctctcaatacataactcttgtcacggtgtcatgaatgttgtaattaaatcaactccaaaattaacaacatttatttatgttggtgatgtcagatttaggatgtcaatggagtcttccaatttgttgtttggaatatttgtgattaaggggcaagagaactatgacatctattggtttatcaatttgatgaattttcttttgaatctcaactgttcttggagatgcatagacattcatgttaaatcagaggaggtatgtttattactggttttatttgattttttttgctgttatttcaagtttatattattaatatattaaatgtatatgtgacattaatatgttcctttaattctatacattaaggctcttatgtttcccgatatcttgaagagggtatgtcgttctcctttggtcaattggaaacatcttcgatttttcactgattgcaaacctgagagggaatcggacttgaaaaatgctctacaatggatttctcctacattatctataatgaaaaggcacctttcgaaaaggttttttaaatagtaatagaatgaagaatggagtgtttggtaagaaacattgatgaatcatttctcaagcttttgttggtgagaaataatggagtgtttcttggctcatttggaaaggtgatgaaaaatggtttgttaaatgttggatatttcttagctgtatgatacataagattctgaagtgattttctgctatttctttttttcattctatttttcttctgatattattagtaattgaaaaagggcatcctttaaagaaataggttagttcttctttgtataaactaatagaaagatacagaatctcactgtcaattatatcttaattactgatttgtattagctgtttaagtttatattatcattatttagtttgtatatatggaagaccaaccctgtgatctgtataaatgatgattagttcctgtgaatagaagatagtatgagttttatataaacaaggatgcattatgaggaattttgctgaaggagagagagagagagagag

SEQ ID NO: 3607 - DNA, 1613 bp, Cannabis sativa
tatatatatgtatatgattgtatttgtatttgtatttgcagagcaaaaggcctctgtggccagtttatacaggaaggagagacggaagagtgtccgtagcttcagaagcttcaagggacttgcctgctggatcatcaaatttcaccactctttctaaactctttgctagatttcgtcttgacgatactgatctcgttactttatctggtatattacttattacatgtcttaattaattctctctcctaatttattttcacatataatattttttgaaaaatttggagcaaaattatacatttttttttatatataagagatatcaatttataaaatcacataatcttataccattttcatactcctaaattttagttaaatatcacataccatgtatattaacatatttggtaattcttaaaacttcgattcttgtcaaaaaaaaattgataacatattttgtataatctcaaatctccctttaatttaattataactattaatactttagtgtatgagcattgttattaggcaccagtggtgcctagcaccttttcgacatgtcacgttgcgattgactagcgatactagctattatattaaactatatgaaactcgatatagttggaccaatagcgatattgacacataagaaagtgttaagcaccactggtgccctttagcatttctctttagtgtatagtattcgcaataaattaaagggataaataagaatgaaatgtaggctaattaaatcattaattatttgtataagaaaaaacaaatatttaattatatttgtttatctaactagaaagcaaaaaacatataattagaatatcaataatttcaactttgtttctcatattatttatttatcaaaatgtgtggaaatcgatatatttctttaatattgatttatgcaagtatctatgcatgtatgtaggtgctcacacaattggagtgacacattgcacattcatattccggaggctatacaacttcaccggcaaaggagacactgatccagcttttgacccagtgtttgcaaaggagctaaagaagaggtgcccaccacgggcatcaatccttccaatttcggtggatttggacagccacagcgctctctcattcgacagcaattactataatagtatttccaccaataaaggtgtgttgtcatctgacgccgctcttctcacaaacccagcctctgctgccctagtcgcaaagttcaaaaacttcaacaacttcatcgaagcttttgctaaatccatggtcaaaatgggctcccttaatgttcttactggtaaaaaaggagaaatcaggcagaattgtcgagtcatcaacaaataattaataatatagtacaaagtattatttacatattgttctatatatataattattaataataataacgtcaactactacgtatatacgtatgtatcttattattaacctataatttattaattatcttcattaataataacgttaatatatatatcgacgttaatttgttgaataatcttttatttaatttccacttgttgaatatagtcttttagctttcgatttggatttaataagatgttattaatatatgaata

SEQ ID NO: 3608 - DNA, 1515 bp, Cannabis sativa
ttacgactaataattgagacattatttttcactaaatttggaacttgaatatgactccactccacgaaacacgattagataaaggttcaaccaaataagtcataaaagctcgcatgcacatatgatacagttgaagaaatataatatgaacgtgttggcagggttaataccttttgtccatatactggttgagttggtcttgcattgtagaaggaaaagcttccagagccaaagatatggggcgttcaatttccacacacctatttctcaaaccttttacgatttcaagctccaactccttatcatcacgaatcggaacctgttctgcttcccctaaatacacaatccgagcgttcatcagcttatcccacaccttcttcttgtccttccccaccgccatcggttctccaatcgccgtcgcatcgtaaatccttgcattcataaccttctcctcctcttccttcttcttctccgcctccacctcaattttcggagccacttccgtcacattcgtttgcagctgtggctgcggcgtctgcgaattcggcagtgcatcctctccactcgccatcgccgattgcagaaaccacgctccgagcgccagagacggagcgagtagcacatgtcgtctcgagtacgcctcactccgggaagatccactggagaaattctcattttcaggttggttaaggcaacataaaaccggacgaatggtatgttgccgcagcttcacgccggaaaatcgaccagaaaatagggttgccgggacaaattctctgagattcctagaatttatattgtagagtggtctaccaaggtcgaagccactgtgagtgtggggttgtggcttcatttttcgcggcgaaacgtaggcgttctgtcagttaagcatgggtgaagtcaccgaacgaacgagaagaccgtttgcttttgagccatctgtctttcctaagcctcaaatattaggagtatttttatttttatttttggaaataatttacctattttattttctgtgtgtggtaggaaataaaatattaaacaaaaaaaaataatttctcatacacataaattgtggtcacacggtggcactttctggtctagaaattagatttgtttttattttttgtttattttcttcaggatcaatttcattttcgcttgatacttgtttattttttgccacatgggaaagtaaacaaaaatatacttatcagttattaattatttggaagattttgtattttgataattatctgccaaataagcaaaaacgaattgagtggtgggtgtcttttagaactagaactgatttgtggagttcttaatctgttgtgtttttcacatccactcgtggaattgggtgattataaaacagggaaataattagaaagagtacagaacttacgtggaattgactcatcgactcgtgtgaactgtgaaggattatctcatctcatccacagcataaaatatatctaagaaacgtgttaggtatattagggcatctccaac

SEQ ID NO: 3609 - DNA, 926 bp, Cannabis sativa
  modified_base (462)..(465): a, c, t, g, unknown or other
agtggtagatgaccattctctctccactactattctctgcttacctttttcaattatagcgcagaccgtcttattttaattggtaaggttcaacttggaaaatcttgtaaatagaaattcttattaaattttagaaaattattactgtgaatatacttgataatttttgttaagtttttaaaatctttgtttcattcatctttcttattattattatatttatatatgtcactgtgagagcattgtgttgtgcatttaaaaatggcagtaacgtcaaaagtttgtctgtattttctatttatatacatattagttatattccatttagaattttttaattacacccagttaaggactcagaatttttattttgtgagggtttatttatcattgaaaaatatttatacatatattataattacctttttttactattttagtctataattatcaaattaaaannnntacatttaattttttaaaaagtaatatttttattagtggggactatagcccccacactaatacaaatgagtccgtcactggttacacgtttgacaaaaacaattgtgttctaagatataattgaatgttgtttatattgctaatttgacaatgtacatagattaattgaaaattgaaataaataaagatagtttaggtttaccttatttctattgaaggttttaatgaacactttctattataaacttggcttcaactaataaattattatgagattgacatgaggaattctctattctcttactagtaaacaaatattaagagtatagttttggaattataggtagctaatatatatatatatatatatattgttggggtaaccgataaaggttaaaataacaaacgtaacaaaagttacacaaaaagtagagagttttctttcatctaagaaagttcat

SEQ ID NO: 3610 - DNA, 1093 bp, Cannabis sativa
gaagccccatacaataagaattcaatcatcatagcatttgaccccgcttcctgagggaggttgggattgaagagccattcaacgatttccttgcccgacttgatattcagctccaaagaacggaccgcccatttggaggagaaccaaactcgtctcgccacagggcaagtcaaaaaatatgctcgaagctatcactcccactcgccccacatgtagcgcaatcgcccaaatcgttgccgaaaatatcctgtaatttggagcttattgggatggcatcccagtacaacttccaaatgaacagttttactctctcatggaggagggacccccagagagctttgaacagcttaatatcaatcgagaaccgcctagagttaagcgcccaataagccgattggagtgaaaacaaaccattgccattagcagtccagatcaaagtatcgactgagttgtatttcaccaaatccgaagccaaaatttgggacgccatgggcggtctaaagtatctatggactgcctcatcatcccaatgatccgtagcaccattccataacagctggattggccatttagcacccaccagagggttcaaggactccttgccgacaatgaaatccttattgcagagccacctatcttcccagaaattcaccaaggaattttggccaaggatccacaccgagttctctcttaggaaatctctagagctccaaatccctttagccaccaacgaggccgagggtgttagtgaactgttaaggaagttacaatcagggaagtatttatccttcaacacacgaatccagagagcatcatgctccgtagccagcttccagcccagtttggcaattaaacattgattaatatctccaaatctgcgaagcccaattcccccacatcttttgggtttacaaatgttatcccaagccatcaaagataggaatcggcctccctccgtggatccagtccaccaaaagcgcctggaactcttatccaaggcattgatgattttggcagggagcttaaacaaccccatattgtaaatcggaacagcctggataacactagaaataagaaccgttcgagccgcctg

SEQ ID NO: 3611 - DNA, 1637 bp, Cannabis sativa
gtcttctccacatcttgtggagccatgcgaatcttgtggaatccagacttcaaatcgatcttagaaaagatggtggcaccatgaagctcgtcaagtaactcatctataaccaggattgggaatttttcagccactatttcgctgttaagagcgcgatagtccacagaaaagcgccaactgtcatccttctttttaacgagtaagacgggacttgagaaaggactcgtattggtctgtacaataccaagttgaaacatctttcgaaccatcttttcaatctcacccttctgagtttgggcgtagcggtatggcatgctcacgggagcgaaccggggataggcaaggaggcatctcaaaaactgctacatgcttggtcaaaagttgagctatgggctttggtagggaggctggatcaggctccacgacagtagacaactcatttaattggaaccagtaccatttggctcctttttccacttgtaagatcatagcctttaatgaggtgggagacttgcacaaatcagggtcgccttgtaatgtcacccaagttctcgccatttcaaacatcatgatcattgttttcgccttaacttgcatatttacgagtgtttctagccactttatgcccaaaataacatttgcccctccaagtttcagggcaagaaagttagtgtttacccttattgcccccaaattgagctcgacttgggcacaaataccttcgttcggaccttaccgcttgtacacaataggattccatagcaagtggtggctgtgatgggcaatcccacagtggtggcgacttccgttgacacaaaattatgggtgtctccaccgtcaatttagatcattacgggttgagatacgatatggctagcaactttcatcgtatgcattgttgaaatgccaactaaagaaatgagagaaagagtagcgagagtcttctgttgctattgtctcgccgaaatctggagaaagaggtggctgttcctctggtgagtcggactcgtcctcattggtggagagcaagatttggagtagcttttgctcacaatcatgactcgggtgaaacttctcacatctaaaacaaatatcctagatcggcgatcttggtattctgccttggacaatcgtttgtacaaggtgttggtggacggacggctgctgccgctcttggatgccgtagtgaccatggattcggttgaagaactctgtggttgctgctgcattctcgtgtgatatgttcgattagagaaagggttgggattggcacgtgtgggaatgagtgggctcaaggttgatttcatggtattgggctgtgggaaagggcccatattagttaactaatggccttcttcaatcctttgggttgtctccattatttgggtgaggcttttgggctgcaaaacatgtaatgtagccctaatctcttccttgaggcttccttgaggcctttgatgaaacttccttccaagagatggtctagtatgtctgatactcgagaagcaagaacttccccactagacacgatattctttcaccgttccggtttgaaccaccgacaaaaaattttcgagagagaacccgccggtatcgcacgaaaacgatgaaggaccatctgttttagcatcacccaa

SEQ ID NO: 3612 - DNA, 1122 bp, Cannabis sativa
tagtagtagtaaagacctgttacttccaaaatactcatcccccacaaaaactcagaaagaaatgtttaacagaatttgcaataccttacaccccaagctagaataattaacaagtatatataatcaaaaaaattataggacagttgtcgattatataatggtttggtttggttttgcttcccttttcttttttttttttttttaaacatattggttttgcttcctttactagtactattatatatcataattggtaacctctacttagacgccatatagtacttaaatttaagatcacacaataattgatatgaaggcacaaatgactcattctgtttttgcttcacacccttcctaacacactttctatacaacaagaagaaacatattccttcacaaacaacatggcttactataatttcatctcttgtgttgctattataattattcattacaccttgatattttcctcttcgatctctttttcctcaaaaaccaatcttggaaaaaaccacccatggaagatgttaacacacttgctggagattgtgttgtcatatcatgctgctgccaatgcttggttttgcaaatcatcatctttgttttgctcaagctgccttacaagttgattcgaaagacgaggaatttcgctaaaaagaagcttcaacagagaaagagatcagaagagaaggtgttgatgaacatggttggaagagagctaatgagaaagtacaaaaataatgaagttgtgggaattattggagagtccataaagatccaaactattgatcatcatcaaagtatgttatcttttgagggagtttataataatcattgttggggttgtatgaatgaagttgagaaggtaatggaagagttgtctaacaagggagagtttggctttggaagcttttggtgtaaggaagaagaatctgatgaattaatattcccaacatgtttggaaaagaaagaatttgtaaattaccacttaattgaaatggttggttctttaaattgttcatgattatacatttgtttgtttctactgttatatattcttcctttgatgattaatttaaatcatcttcttcatctgttagtacaataaggataagagctagt

SEQ ID NO: 3613 - DNA, 957 bp, Cannabis sativa
gtgtcctccttcattaggaattggccttggcagtcagacgcatgaggaggtgcatgtgggaggtttgagttatgcctttaatgtatattttgacatcttcaacattcaacacctcttccaaaacccattcaactcgtttgaaggtcttcctcatctgccctatggttttgatgagatggcctagtctaaatcttagatgaactaatgctctagcaagtacaacccgtacttggatgagttcaccccttcggactggacttggctatgtaactcctcagtggagggatgtgaataggctgttctcaaatacaacatatgggttattttacattatcattatctttattcacgttatctactactacttctttctaatgacctattaaccgcaacttttgttttgcaggcctctgtcttacatcaatatactcccaactctagctctcttggggagggagatctctctcctctttgacaagatttagacgacttggagaagtctaaccgtaggtgtaaagccctctaagaggaagtaaatcatctccaagctaaggtaactatagaaaaatcctctgtgtccagccttacccagtagctcaacgactcgctctccatctgttagaagtattttgtgtactcgcaagtttgagaggggaggcttaaagccaagattgataagctttagcatcacatttacaccatgagagcaaggaacaaggagcattcagaaggccagatttaacgtttgatatacacagactgggtacaaaatatttatgttgattacaacattcaaggttcctttgcggcacaaatggtagaagatttcaaggctaagtgtggcgaagcgactgtggtgtgctaagggaagcactggtgcgatgcaagcctgtcgagaaactacaactagcagactctccttctcgtggccatatttatgaagatccttaatacttt

SEQ ID NO: 3614 - DNA, 1336 bp, Cannabis sativa
gtcactgcaaagttgaatgtgactggactataatttataaagtattcttatatgtttgatgtatactgtaaaggatggttcagtgactaatttgtcagaaatgtttggaaattttgtttgtgatttatctactgaaccaatatcgataataagtattattatgcatttgacaaacatgtgtagaaacatatctgaactagacacatatacatcttttctaccaaaccttttcatttatgctgtattcttgcttttaactgtaatctgcaatatttacatgggaaaacattgtttgcatatgcaggaacatttcatctgataaatatggaacattttttatcttctcagttaaactcactctgtcaatgcaaatcattggcttttccgtgagattatcgtcatcactattatggattcagatctacaggttgggggtctcacatctagatactacgattccgagagaagctgactatgatgtacgaactagttttttgagtccagtcactcctgctgcagctaggcaatcttcaggttctgatgaggttttaggaggctcgatttatgatccagcttattactcatctcttttcgaagatggtgaagagaatagagtttcagttatggtaattcatctttaactcgtcttttatttcttttttaaaagaatattctttaatgctattaaatatgttttttttgacttagttaggctatgttttttttatatataaaatcacactaaacatagcatttatccaacataagtaatgtgggacaaacacacatgcacacaagtatttggtatgatatataggctatgtttggaagatggattttggtgaggaaagaaagaagtagagaaaatgtagaaaaatactataaaaaataataaattcttatatttggtatggaagaaaaattataatagaaaacactcaattcaaccaaaatttccatatcaaacttgaaaaattgatttatctttttgttcttcgcactatttttcttacctttttcttttttcactaaaattccgcttccaaacatagccttttgaatcccatgcctgaatttgttcagatgaataccttcaaattcaattggtcccccatgataaaagtttatgcatttttattcatttactttttttgttgtttaaaggatttaagaaagaaaaattaaccctttaagaatcaaggtaaactatttaccagtttataccatattgcttcaagcaacaatatggagttgttttttccatgcattgtgataaaatgaatttcattattagacttgtattattgaacatattttagatcaactagctcactct

SEQ ID NO: 3615 - DNA, 1395 bp, Cannabis sativa
tgatatatattaaacgggacaatagtattactatatgggcttataaggcccagcccattgattactgcgtgtgtcttctctttcattgcagaggcgcaagcaaagcaatatttagtatttacactatgtttggcaagaatgaaagaatgatggaaggatggagagtttaaagagaagagagagggctgatggatggaatggattgttactttttttttttcgttttttgatagttgtttggtgttagagaattttagtgctataaatatagtgtaaatgtattttttagtttatgtttataaaataaatgaactttaatagtagtgaatgattggatgagataagaatgtatttaaaatttaaatgtaatttttttttggggggtgaaaattcaaatgctattataaattgctaaattgtctattattataatatatattttatttttatgaaaggatatgcatgtaattttaaataaaatgatttttgtctttagtatagaatttcactttttggaagattgatttttgaggatttggaggatagcccttccctcaatcttccctttccctctcatttttctttttctcgccaaacaaatgattttggctctcctcccacactttccatccttccacatttccttctcaccaaacgtagtgttagcgcgtggattacactggccattaatcttctcagttcttaccatagcaagattcatggccagatgaatctggctatggtgagaactgagaagattactggtcagtaaagagaagaaataacaatgcagtcttcactttccttctctaatggcattagacccatcaaatttggagaaaacccaaaagccattatcactacccattcacttaaaagagctacgcttccctttactcagtgctcctctcttctctccactagatcatctctttcttgttcttcttctcgattcgattttagatatccatcggtgtcattcgtacagaaggatgagctgtgttgtaatctagtcccgagtacgacatttagaaagaaaaggagcttcgaattgtctccagttcgttgcggcatttcgtctagccataataacagcgccggtgcgaaacgaagtttaagggaatggtttgagcttatcggggaggccgtttcgacagcgtttccgttatgggtcgccttgggatgtttattagggcttttaaaaccgagttcctttaactgggttcggcctaaatggacagttgctggtttaatagtgactatgcttgggatgggcatgacactcactctcgatgatcttcgtggtgcgttggctatgcctaaggaattactagctggtttctttctccaatactctgtgagttctgttatgttttaaatagttagtgtcattta

SEQ ID NO: 3616 - DNA, 3242 bp, Cannabis sativa
ttaagcctactgtattaaattcacaaaacacgtcatctagagagacattgactactcgcgcgagtgtaaatgggaaacgcgtgaggtttaacagtcgaaactcgaaagtggaaacaaaagttttgggactttaataaatagcggactcagtcagtcagaacagaaaacgacatacccaggtttcaaaacgatcgcttttttgaagggaggggatcaccgtatcacgagaattataagtaaatgaagaaaagtaaaaatagtaagaaaataaatagaattaatgagaaagaaagattatatgatgatattttcgattaactatcgtagatctataaatgacaacatgtgatgggacccaacagcactaatcgtcaaccgcagttagatgagcaagtttccgggaaaattcaagactgcgagaaaataaaaacagagagagcttaccgatttaatcaactccaaattaagctcatctggcctaagaagcatgtcggcgctagggtttctgtagaacataaactcgcgttcgccatcggctttgagagtgacgaaggccaaggcggtacgtgcgccttgatcgaagttgattccttgggtggagacaccgttatctctcaagatcccggcgagcatgtgtccgaactcatcgtctccgagctttccaacgaaggcagctttaccacctagcctggtgacggcgatggcgacgttggccggagcgcctcctggggctttgagaaatccaggagcttcggctagagagacgccggagacggtgggaacaaagtcgatcagcatctcaccgaaactgacgatcagacccttgccattttctgaaacgccattgttagaggaagccattagaaatgaaattgttttagagagagagaacagtgagtgagagaagaagaatgatatatgagacgatggaaggagaccggttatgggtggtatttatagggaggctaatacgatctggtggagattattagggaaattatcatatatttttttttatgatttattttttagttaggttgtggacccacagtctcgaatctcattaacattaaattagatttttattttttattggataagattgaaaaaagaacagaagaaaaagaaataaaatcgcaactgtaaacgctttaatatttcagtaaaattggaaatttaaattcgaaaaattaacatttttttaaaagaaaaagtttctggtcattatggaattttcaaattagatattttttattgttatgtttctaatttttaaaatagtatttttaataatgataaaaggttatcctttgctttagcttgtattcgaattcttacgtgccaaactttcgagttcgatttagaataacgaataatagttaccaaataataaatatattttatttagggtaaccaatttatttaaaataaaaaatatatattttattagatattatcatctatttacttttaagtagataaattttaggtgtcaatggatttataaccattgaaatttgaaagcataatagttatttaaataaaaataaaaattactattatactttgtaatagtaattaaaaaaaattattttcgaaaggaatgaaaatgttagtatcaaaatattcaaatttaatttaaaatttaactaattctaaatatcaaaatttgaaaataatttttgataaaaaaataaacaaatttattattaattatatttagctttaactaactacaccaacatctaataatttgttatttttttttttatttttaaaaaatcatccaatacactaaaaaaaatcatccaataatttctcatatcattctattatatagccacagaatagataatataaacagtcacatataattaaatagttcatattagggaagaaaagaattcatcaaatgaccaagtaaaggatccatacatatctttcaagaaaaaaaaaaaatatctaaacatatttttccaaaaaaacaagaaataataataataaaaaaaaatccctacatacctttaaaaaaaaaaggaaatctaaacatattttctcaaaaaaacaagaaataaaaaaaaggaaatctatacatgtatgcaaacacgaatgaatattgcttaattattatggctatctcaccatatttccattcgtctttcaactatgttcaaactaattaccagcagttggtgagtttatagacatcccagcaacaatataaaatatataagtaattatatatggcataatataagggaaattcttatatatacttaaaaatatattcgttattaattttagacatttaacaaatttatattaaataatacttagtttaacttgtttttcctttatatctccttatattaataattgcatgttaaaaacataactcataactctttctaattcactcattgctcgctttttattaaaaaaaaagccacattaacgagtaacaaccacgagccgcaatggtagaaattccattaaagccacaaatcacgcacaatgattttacaaaactcgctacactcacaataaaagttaagtattttacacaataattttttaaatattttgaagaacatgttgctattttttttctttttgaagtggcaggatctagttatttcagtgagatctggatttttttatgttatatcgatggtttatcgatattttatcgatgataaagcataccaagattggggaagactcttatcgataatttttcaatggtatatcgatggtatctcgattgtatatcaatgatttctttcttgattccatggctatgtgatttttttttttttttttttgccttttttcattttcagtttcttatggtttctcgatgatttccatggttgtgtgattttttattttttattttttgtattttttttagtttcttattgatggtatatcaatggtttctcgataagttttatggcatcaaaaatacagatatgaaaattattgagaaactattgatatattatcgataagaaactgaaaaatgcaaaaaaataaaaaaaaaaaaacacaaaaaaattcacataatcatagaaataatcaagaaaccatcaaaaaattatcgataagagtctttcttaaccttagtacgcttactattgataaaacattgacatattatcaataaaccattgatataacgtaaaatttctagatctcattggaaaaactagatcccgtttcgcaaaaaaaaaaaaaaa

SEQ ID NO: 3617 - DNA, 1086 bp, Cannabis sativa
ataaccaatctgttgctgattttgaacttactaatattgatgaaagtattgatgaagatcaggaaccaaatcaacccttacccgaatcacaaatgcagcaaaacaatgagcctgaagttcctacccgtgtggtttcaacacatccaatgatgactagagctaaagcaggaatatttaaacccaaagtctacattggagagtcaaaatgggaagaaaagttgcaggagccgattaatattcaagaagctttagctcataaaggttggaacaatgctatgaatgaagaaattgttgccttaaagagaaataagacatggcacttggttcggaggacagctgatatgaacattgttggaaataaatgggtctacaaaatcaaattgaacgcggatgggtcagtccaaagattaaaagctcgccttgtagctaagggcttcaatcaaaggccaggaattgattttggagagacatttagtccatgttaaggcctctacagtcagaattattcttactattgcagtggctaagtcttgggatgttaggcagatggatatcaataatgccttcctaaatgggcagctagaggaggatgtttatatgacacaacctttgggttttgaggacaaagaaaggccagattatgtgtgtaaactcaccaaatcgttgtacgggctgagacaagctccaagagcttggtttgacaggttgagaagcacactacagacttagaaatttgaaagttcaaaggctgattcgtctcttttctactacataacagccacttacataatgtttgttctcatttacgtggacgacataatcgttacaggcaacaactcagagaaactgagaaactttactgcaagattaaatcaggtgtttgcccttaaggatcttggcttgctaaagtttttcttgggaatagaagttcaaagagatgatactggtatgtatctcacacaatccaaatatgtgtctgaactgttgaggaagaccaaaatgattcaccttaagccgtgtccaacaccaatgtcagtgggaaaaactttgtctataaacgatggtactctactcgacaatcctaca

SEQ ID NO: 3618 - DNA, 1856 bp, Cannabis sativa
atttagattctgaatcacacaaaacccatcaaagctttaacctttaccattttgtaattacataaatttggatgagctgctttgattttcattttattttttctgttgaaccagcaaggatgtgtttgctggattagctccactagaagctgtactatttgatgttgatggaactctatgtgattcagatccatttcactatcaggctttctatgaaatgcttcaagaggtcagagaattatgttttactagcttaatccataatggtttacacttgtatttatatcccaacttgacaatgttcatagttcaactcttgttttataagagaagttttcttttaatgaatttgaatctgtgaatcaaaatgaatttcacctggggttgggtgtgattaacaagaacctgatgtgtttagtgtttaccagataggatttaatggaggagttcccattactgaggattattatatcgaaaatattgctggcaaacacaatgatgatgtagctaggctactcttccctgatgattttgaacgcggtttaaagtttacagatgacaaggaagccatgtttcgccggtaaatttcattgctcacttacatagagtttccttttatgttcccgacgaagtattttctttaatgatcgatgaaacagacttgcagcagaaaaattgaagcctctaggtggtcttgaaaaagtgaagaaatgggttgaagatcgtggtctgaaacgcgctgctgttacaaacgctccaagaccaaatgctgaactcatgctcacaagtctcgggcttacagatttttttgatgttgtgataattgggaatgaatgtgaacatgccaaaccacacccagcaccttacttgaaggctctagaaatacttaaggcatctaaggatcacacttttatatttgaggtttgtattgtttttcatatcaataccctttttaggtagtttcaagtttaatccaagttctctttataggattctgcatctgggattaaagctggggtggctgctggtatgcctgttgttggtataaccatcagaaacccagaacatttacttctggaagccaaaccaaccttacttataaaagattatgctgacccgaaattgtgggaggtactcgaagagctcgataggaaaggaggtaattctaccaatgcagcttgaaatatcttttatcccagcacatcaaactgattaaataatttttttgaggagccttatatgatctcctctcccattattccttctcaaatcaatgataatgttataactagcttgattgattaggcaactatatttaatttctattatctgtttcattaaaatatgtgtacttgctacatttcaataagggtagttcttctaattgcatcttttaaagtgttttgtatgtatgtatgtatgtataacttatatgtatataaaaacacaatatgaaaatggcccatttcacaatattgattgaagtttaactccaatatgagtattttaaggactgaattagataatctgccattgtatgaactaattacaacatgtcaagtgctgcaaaaaggtttgaaggttgttcactttaaaagaagggttgtataaagaaagtattagagaaaagaaatattagaatatcagagaaagatgtttttgattgatgatttgttgaagattaaattctcatgtctctatctgaccttttttttttcccaatgttttgttcaattgtaaaaacccaccttctttgatgtatctttattggcttgaagccaatttcatagcaaggaattcatgttgtgcccttgaattcactttcacttttaagtgattcttcacaagatctatgt

SEQ ID NO: 3619 - DNA, 1266 bp, Cannabis sativa
agttttatcgactagtaaaaatataatttggtggccagaaagtttgagttgtatccatgaacagtgtagatattatctttgaataaattctcgtttttacttttttagagcgcttgctactcttgatatttggtggttgagagacttttctcctaaaaaaatagcccttgtaactactgatggtagaaagatttttctaaaatatatatatgtaaaaagaataagaaaattttacaatacacattttaaaagggatgcatcgatgcatccttatttgttttagtatttgaaataattttttagttaatttttgtttcccatgattatgtacgttatagttatttaaaacattctataaaattttgaggtattcaaaaaaaaaaattaatacgccgaaaatatgattcaaacagtctattacacgcgtgactattatatttatacgcatgtgaaataaattgcttgaacattactttttatattataaattattctgaattgtttaaaattttgtataatatcttaaataacttaatgtacacgaatataaaaaaatagattaattttttttggatgttgaaatagataaatggtacatcaatacatcttttttaagagggtgcattgtagaagcaaaaaaaaaacatttattttttttttaaagaaaagaaaagtaaaagattatgctgcaatgatgcaaaagtaattaaaataaaaggtgaaaaattctccactattttattccctagaatcacttaaattgacatctcactattccaagaataagaatacaatatacctatctcaagattagaatatacctatattagtgatcactatgtattatgcttattgaatacatgtcactctaacatgaatcgaatctattataatttttttttttaaaaaaatattaaaattaaaatttgtttaaataattctctaaagttaagcattttgtttttaaattctccaaatattaatccattaatctcttaaaaataattgtattttttaaaactaatcattacttaataatgccaaaaaagaaacaaaattatatacatttctcttgctcaatttgtttgttaaagggttctcactatttgttttaatgattttgtagggcaattcctctcattcaaacaaatattatgtagatgtgatgataatataagaatatttttttaaaaaaaataaaattacatttaaattacaaggatttcgattgtaacttagacattgagttatgattttttttttttt

SEQ ID NO: 3620 - DNA, 1055 bp, Cannabis sativa
tataggcctataaataaaaggtaggtaggtatattaattccatttacaccatcactactttatatgatataagatatataaaattcttcttctcgttcttttataaaaaaaatgacggattttagtaagcttaagatgactggaaataagatgtgtatgtggttatggagaggagatatgattgctagtgctaataatattaatattaatagcaggggtagtggtgatgtagtggtgacgaagaagaatatgatgaataattacagcaagcgcagcaataataatagcagaacattttttattggtgtcatattttggtttatatcttttgtcactggaactggttttgtaaagatttgtattacaatacaacatgaattaccaatattcatggggatgattctacccttgggtttcagcagtgttttactactcataagaattgtagagattaaaaggatcgtcaactattataattcgacacacaataatattaatagaatgggtggcattgcccatgcagagctggtttttaaaaatacatatgctcttctattggtttgtagtgtttggattgctgttgaattcaccaccaacatgtttttgaatgatccactattttcaacacaaatctctccctctgctccagtacatttttcctttgctattatttatatttatttgacttttgttttcttttatggaggtttgacggctttggagcttagttattattctgatgatgatgatgctgctattggagaaaccctagtttgatcattaattacctttacctacttaatttctttatttttctaatatttagttttttttttttagggataatatttagttacctattttactttattaattaatagtgttgcatgcacttaattatttttctagtccttatttaataatatcaaccaagttttaatatttgttgattgctcgatcaacaactctcttactttattttttcagtctgttttttttttcttttctaaatattctttttttcttttcttttctaaatggttgttggagatttt

SEQ ID NO: 3621 - DNA, 1809 bp, Cannabis sativa
cgtaatgactgccctgaccaaaggcttaatttgaccgagaaaactcgacatttgcttagcatccgcgcgcccatgcaactgggtgtcacctggggtgtgtggcagccctagttttcaattttcaaaaattcataactttctcaattttcatcaaaataaagatccgtgaaaagcaaacttgcataattttcctaaattttcaataaaaaaataaataaataattctagacataaactacaattattttatacaaaaaaactcgtaatttatcaatctttctttcaaataatgcataattcatttaacatgtaacatccaaatctcataaacatgtaaaaaacacaatcaaaattatttttttatcctgtttaacatgaatagtaaaagattaccatagctctgaagccacttgttagaaatcatattttaccaggatcttacttttattaaacaagtatattgattattactaatctaacatcctaaacatggaaccttaaaacaattcaaattaaacacatggaagattaaaaaatcttacaatagagtagcaaaaattatgactccttctgtttgaattctctaacacagtcttccacactatcttgagtatttccttgaaaagagtgggtaagtactcaatacatgtagcacacgaaaattagaaaaaagaagccaaaggaaaactgtttgtatatattataaaattatatctctctcaaaatattactttcctgactataatctatgatccctcaaaactgtatacaccctatatacatgtgtatataggtgtgtatacttgaggaaaagagaatgaggaattcgaaatttttctatagcttaatgaacttgtatctctagtttagagatgaaggaatgtgtatatataactaagagctataagggtctatttataataatattttagggttaggattaaggttagaatttaatggacttaaaaagatatgaaataacatttaatttcaagccttggccgaaccctatagaaaagcctaatgggttttaaattttccatttttagttaaacttatcttttcttaataataccattttttttattctaagcctttaaatgttaattttatctatttaatctaataaaataagaatttaattttttttattagttagaatatgtaaaatctcttaattaataaataaaccctcaatttcattctttttctcaaatttgcatttgcttagtaaaattcacaaataagacctagtctcatttagaatttatctaaaaccaattaattgaatctacaaggcaatgtagtctcagttagtgtggagaccatagacttatataatcaagctcccaataagtagttctagagtttaccaagtaaaaatctctatcttattaattttttctaattccactatagatttaaaattgcactcttaattatctagaacactttattctccaaaaatagacatgctattaattattaattatttcaatctaaataatcaatgatcttctatagattgtctacattgaatagagactaaaattaccttgttacccttcaatgtattttatccgtaaaatacttagtttcctatagataatattttgggaaactaatataattaccaaaataagagctcttctatttatgtttattagtcaagctctaagaaaatatcatttcacttctatctaattatagaagttatagattctatgtctatgattagcgctcccacttaaatatactaccctgctcccaagaggtaagtattaagccaaacctactggtaggcctcga

SEQ ID NO: 3622 - DNA, 1503 bp, Cannabis sativa
ttgcatgtggttctttgcatactatttttctactttacttcattgagaatattatgtatgtttatagttagctatatgaaagtaagatccagctatattttttgtagcttagttttaaaacaagctttgcccaactctgtttcagactgaaactctcttaaatagttcatggagtacaatgagaattatgtccattaaaattcctttcatatacataaaaaaaatgaaattacaaattttatgaatttttatattttttttttcgaaaaggttattttatgagaaaattaaaaaaaaaaattatagaaaaatctgataagggtaactagatactattatggtaaccagagtggtaactagttaccataaaaggtaactatgtatcttatatatataacaactacaactagtgattagctatagatcaagctactaacaaaaaagcaagccatattattaagtcttaagtataccgtacatataattattcttccaaataagatttaaaattggagtttattttgttactaaaagtcaatgtattatataacattattatttcaaacaatatatagaaacactccaaatatttttattcttttagatgtgttaatgtgtattttagtttagaagatgatcaattattattgatgccaaaacttaagcctaactccaatgctttggctactctgtacacacttgattaattaatttaccatacacattatgtatatatggtatatatacacacacacacataacatatctatatacttctcatcaaacaaaaaatcccaataacaataaaaaagaaaaaatccctttgtaaagatggctacaaaaaagtcatcatatgtactattagtggctctctttgtagtgtttatctcaattgagatggccattattgttggtggcgaaggtactgataatggtaatggtaatggaaacggtggaggtaacaatggaaatgacaacgggaacaacaatagcggaaataacaatggaaatggtaacggtaatggtaacagtggaaacaatggtaacaacggaaacaacaaaggcaacaacaacaatggaaagaacaacgatggcaatggtaatggaaataataatggtaacaacgctaaggcaaagaagccacccggttatgctgcttcaacacactatgacattctgacgccattagcttcgggaagggaacgtgcattttgtcaagctagggggaaatgtaaatcgaaaaccctaacatgtcctgccgaatgccccgagagaaaacctaagaagaacaacaagaaaaagggttgttatgttgattgcagcagcaaatgtgaagtcacttgcaagtgtaagcataaataaattaacatattttttcattaatttaatataatttaaaattaacataaatttctcaattggataattaacatttatttaccattggtaaattatttttttatacaaatattattttatatatattacataaataaataagta

SEQ ID NO: 3623 - DNA, 1737 bp, Cannabis sativa
aatggcaatggtgcctttgccgattgcttccataaagtcactattaccggattttgactttagtctttaattttttcaagactacaaaagatgcttttattttttgtcatgtggttactgcaatcactgtcaagataccaagtatctattccttcttctgttgcagcttagcagacatagaagagattactctcatcactttcctcttaaaaaaatagcttgaagggatttctttaatcgacaagtctttttagtatgcccaaattttttacaattttggcactagttttcctttaaactagcagtcttttttcttgtgtcttttttccattagcttttggtttttgactctgcagattgattttagactgaaaggcattttcaacttcactttcctatgcctttctcgtctacttttatatgcttcaagagagctcattcgttcagttggtgatagactttctaaatctttagtttcctctatcacagaaactattgaattatatttttttgtacaagaaattagtaatctttaatttattatttctttaattctagaatagtaatcttttacggtctcagtatccttcattgtctaactgagcgtagcttcactatttcttggaactcatcctgtagtgtgtcccattcttcttttgccgttgttgcacccataatccgtagaaagagattgtctgttatagcttgctgtaagtagtataatgtatagaatctttttattgattattctccaatgccttctcttgatcgtctaaaagagatgatatatcttctagaatagtgattctctcttcaacaattttccataaattttgtgataaaaaatgggtcctcattttgatggactaaatgtagttttctccatgaaaaattggaagaggtagaatagcggttggacaccaaactcatgttgatgagaggaaattattacacccagtaatatgatcgaatggagctttgataccactgatagtttgttaaattggatagagtaaaatagtttttatttgttttaggtgatagttttgtaatgtgtctagtgactagcgtggtatgatgaagataatagtatggtgatgacttgataattggttatgtatatagtagagaatggtttggcttaaaaaagaattgtatgagaaagtagtaagtttttagagatttttcttttctaaaaatgtgtaaaaaaatttagactaaagttttgtataaatgtgcagcacattctaataaagaaaagttattcaatggaataaagttgctcttggaaattaggtctcgacaatatctaccaaacaagataattttatatatcaagtgaattcataatgtgtatttggggacgcaaaccggtgggactacgaggcccctaccaacaatagttggtattggtcccaagttgtagatatgaagaacagtgcaaaatttagtttcaaagtctcacgacaggtaaatataatattagtcaaggctacaacgcactgtcaatttgaaaagagaaaataaaatggcaggggaaattattactaagcataaatttgtactgtggatggctgttttaaatagattacaaaccaaatagaggctttacagattgcacatttcagatgatctaagtttggtgtgtggaaatgcgagtgagagttctttgtatttattctttaaatgtaatatgagtgccaagtgtctagaggaagtgaagatttggctgggatg

SEQ ID NO: 3624 - DNA, 1275 bp, Cannabis sativa
gattgggggtgatttcaatgagatcttacgaagcaaggaaaaactgggaggtcaaccaaaaccggggtacttaattaataacttccgaaaagctcttgatggaagtaatcttagagaagttgattatgagggaagccgctacacttggtgtaatgggagacaaaacaatcttatctttgaaagattagatagagtttgtgggaatccggagtggtttattttattccctgaagccaaagtcactcaccttgatcgtgtcaattcggattattgccccatcctccttcaatgtttgcttaggaaccatggcaatgattatggggctagatggcactctcggtttcattttgagagtgcttgggctgaaaaagaaagttgctcggagattataacgaagacttggggggagggtggaagtagtaccacgacaagggacttgaagattaaactagccaagtgttgagttgctcttcaaaaatggaacaaggtcaagaagaaagagatgaatatgcggctcaaggaattctaagacaaaatagccatcctctccaggagtacaaacacaaatgactggcagcacttaaaataccttgagcggaaaaacaatgtcctcttagataaagaagagaaattttggaagcaacaaagtcgtgcactctggctaaaagaaagggatcgaaataccaaatactttcacagaaaggcaaacactcggaagaggaaaaacactatcttgggtctactagacagcaacgaaaattgggtttatgggaataaaatggtgggtcaagtagcatgtgattatttccagcagctttttgaagctaacccagcaggctaggaagagttggaggagttcaaacgaatagttccgaacaaaatatcgtgcgaaacaaatgagtacctcaaagtgccttttactaaggaagacgtttatagtgcaatgggagatattcacccccagaaggcaccgggaagtgatggaatgccggggctattttataggaactattggccgaggataggtgatgaagtgaccaaggtttgtttgggtattctaaatgataggaggccggttgatgatattaacgataccctgctttaccttatcccgaagattgagaagcctacccgaatgtcaaattttcagcctattagcttatgcaacgtggtttacaaaatagtggctaaatatctagcggggcgtatgaaacgcagcctttatcaagctatttcggaagagaaaagtgtctttgtggggggtaggttgatcca

SEQ ID NO: 3625 - DNA, 1700 bp, Cannabis sativa
  modified_base (621)..(622): a, c, t, g, unknown or other
gctcttagagtctattcagacagttagagttgtgtgcacttgtaaggaaatccagtattccacgacaaaacaaagcatgtggaaattaagtatgactttatcagagacaaagtgatactaggtcaagtgcaaatagaaacggtccccacagaggagaacccatcagaaatggtactaagattgtaactcttagtaaattcaatcattgtaggaattaagtaggagttgacacaggatggggtgataagggacctattcaagttaagaccctcaaagactaagtaagactatcctagacaactcatgtgaaaatttaagaggaaattgttgtgaaattcctatattgtccttacaacattatcaactaatcaatacaattacaataacataataaagacctgcaactgaatcaatcccaacagcttattatcgacctcaataaatactcttcactaagctaacaattatagactaaggtgacgtttagttgggaggaatgaaaacataagaatagaaatgaaatgaaataaaatttaaaatgcataaaatatattgataaaaatatcattaattttttttttcatgttacattggagtggtttttccttccatttcaaaatnnaatagtcattccactaaaatggtggaaagggcattccattggaatgatattccaatactttaaatgcaaccaaacaaaggaatgtaatgaaaattgtttcctttctatttcattacctccaaccaaacgccacctaagagtttcagaccagagatttcctaatcaaaatttctcaaattagagagagaaagagctcggagagtgaaacccagaaaaagtatagagagaaagttagagagagaattacgagacattgtaaagaaacaaatagagagtaagagagatcaagattaccttgctgacttctatagcctggaatctccacttatttcttgtaaccttttgatgattgatagtgcacgatcaagcatctctgagacgagcttgacagagacataaccctagaattttggagtaaactccgagatcaaatctctttgtttatcttatttgttttgcgtatctctaagtaaacctaatcaatctagatctaggttgtgtggttttgttctagctagttttgcaagactggaaaagagaagacaaagtaaacccaagtctagggttttagaagtggatcgaaagtgttctcaatccttcagtattggttttatgcggtcgttttgattcttttattggtattccacatagtttgtgaaaggtcttttctgaccttggtttagttagtgagatgcatttttagcttaaatttcctacactgtagaatcagagaatttatctatgcaaatctatgaggacacaatttcagagaatgaatcacaagactttgcgaaagttagcaagtcttgaattgaagcatattatatatagcgaggagattacagagttagttacaagaccttgaaaagaaaaaagaaataacagaaaagtaacagcaacaaaactaacaaccttgagctaacaactaactgttattaactgtcaaaactaactcagtacactgcttatcatacacttattagtttatttggaatctatttatgaattggtaatgtactcactttattttagttgtaaggatcaaatttatttgatccggcaaagacaaaggctgatg

SEQ ID NO: 3626 - DNA, 545 bp, Cannabis sativa
agcccaaggtacgtttaatgacatagcttggagttcaacaaacaccattttagcagcatgcgagctcgagaacaggaggagcaatgaagctgttgctatgcccccaccaccaacctgtgaacacatattaatggcagggggcaaagcaagtctaatgagaggttgctgcttcacatgtttcgattctttcgtagccgacgtagtgcagaagaaactggataaaaaattgtctgaatggttaagtttaactctttaaaatttgatggaatggggtgggtggggtgtcctttttggacattattatttttttcttctttggtggtttatacaataatttattaacttgtttatagaattaattccctcactcacattgaacatgaatatatccctattcttaatgggaccaagtcctgtaattgtttaggtaggatgaatgaattcttataccttttatttaaacttgttaaatatttcataacctaccttgtacacactattactgatcagaattctatcaatatgattctattgattcttctttt

SEQ ID NO: 3627 - DNA, 735 bp, Cannabis sativa
ttgggtcgggtagccaagcatcacctagaacacttatgttgttgccgtcccccacacacatctagttttgatgactaattgttgtgcctcccatatgctcctccatacaaagctaggattatttcctaaagaagcattgagaaacgatccttgtggatagtaccgggccttgaagactttggaaaccaaagagtccgttctagtaaagaggcgccaaccttgtttacccagaagagccaagttaaaatctctcaagtttctgaaacccatccaatgaattccgccattgttcttgtttgaggattttcaccaaaacttttccatcaattgctcaatctctctactgatctctaaaggtaacaaaaaaatgctcattgcgtagctagggagagtttgagcaactgttttaaccagaacttccttgccagcccgagagagaaacttgccttcccaaccttgaagtctcttgcgaacccggtctttaagaaagcccgattctgccattttgttccttcccatggtgctaggaagccccaaataagtgctattctcagtggcctgtctcatctgaagagcttgatccagaagacttcgggtaacctctaacgtatttgtactataaaagattgacgacttgcttaagttgacttgttggccagaagcagcttcgaatttggatagtagttcccgaactttcaaagcttcttgaagagtggctttacagtagaggtagct

SEQ ID NO: 3628 - DNA, 1305 bp, Cannabis sativa
actttagaattaacttgatttgttggttttccacttaaaaacttaaggagggtaatgagtttttctctctttaatggaatagttgaagcttccaaggatagatagtgggggacaatggtgagaaactagggcaaagtatttagtagaagtagtactctatatcacctatggtggatggaggccatatcctttttcttgatacgatattattatttcgaaaaataaatgagtggtagttaaacaattgatgtgagtgagaggctcacaaaacacaatatatagaatgtggaatgatatgtggttaggtaatgacagttaatattttatttttagtagaagaaaaatgcccaaacaaaataattagagatacacaaaataaaaagtagtactattattgatttatatgcaaggaagagtaatttgcacttaaatatgtttttatgtttctttctttcttttttttaatagaaaatttaatttttatacatttaacctttttgacttctttagaaatttttttttagactataaagtattttttttttacttttttataaaaattcatataacaactaacagagcaacttaaatcgcaatcaaaattcacatatcaactcacgtaaaaattactggagcaactcaaactataaattttaaaaaataaataatatataagataattttttttttatgtgtggataaaaatattattacttttaagaaagctttatctatataatgaaaaagtactattaaataagaagagtaatccaataattttcttttatttaaccgttttaaaatgaaaatcttattctaaaatagttgaagattgtgacaaatattcctttaaaaatagaattataattccaaaggaaaaagaagacacttttcttcaagtcaaaccaaataaatatggaactcttcaatggaatgacctttataaatggactctccattgcaaagttcatttttgtgaaccaaaggtggaaatttttttaagaaaaaaaaattcacttgggtatgtttattcttgtcattattggcttagcttttaaccttctttcaagattttgtccccatgagttgtgtagatcctaaatggcttagctttaaacttaaagcaatgaaaactttggaccatgtgtttttgtagtattccaagactaagacaccaaattgttacaaatgtctatagtatatgcattattgaaatatggtggtccaaaaaaaaaaaaacaaaaaccaaaacgtattgaatgtaaaattggggaacttttctgagacacaaattcttttaaggaa

SEQ ID NO: 3629 - DNA, 1188 bp, Cannabis sativa
ttttttttttttttttgtagggtttgtccgtcgttttagcagttcgtgcgtgagctttgagtttttactcctttcattctcggtatagttggccgacagttgagttgtctcttaactagtaaaagatttttgcgattttgtttctgtctaacttgtagggttttccttttcagttaatcatgaatggattttttaaaaaaaaaaaatcattgtaaatcttaatcgataggggaagcatagagcgtaattacagagatacccctgacggcgtcaattgtctataaaagacagaagtaacgcatacgtacgtacgctttggtgggatgaacagagacattattatcagtttctcctaattaaatacctttcttccaactttttcaccgtttctcattctctctctctcttccccacctaaaaactcactcctctttctgtttaatctcaccttcgttccataaatatttaccagttaccaaactcaactcactcacaataacatcaaaacaataggtctcaaagaaaaatctcatcacaccttgacttgacccttcatatatatatgcaccaagagacctaaaacggcatcgtttaaagtatatttctgggtatgatgcacgcgcgcggttcaatatatgtattgtagagatatatataggttaataatacattatattatgaaaaatattaatggtaaaattctatagtgtcaagtcagcaatgataatggtggttcttacagtgtctcttctggtgctgccgcttgttttgccggcgcctctgccacctccgccgttgatgctcttgttcattccggttctcttgctgcttcttttgattttcttagctttgtcgcctgtggcccagctgcctagtgctgtcgacacccgactttgattatattatattttatgaacaaattaaattctacctaatcgcatttctttgtaaatatgcatgcatcgatccttttcatttcttttttttattattataattttttattttcaccagtaatatttcttctttgttcctctttcttcttctgatatacccaatgcataaagggtaattgttaattatatgatgaaaatatgagaccttttctttgaatttgtatagagattaatatattaattattatagtacataaccaaaatctatgttttttctcgagtatgtagtggg

SEQ ID NO: 3630 - DNA, 1184 bp, Cannabis sativa
atatatatatatataggtactgaactttttacatgaaaagtagttaatccgatccagaagtgttaataagactttggggtcttcaagaaagacaagtgaagtagaagatggtgatgatgatgtttatgatgagaaaactgttacagccttaatgggagtgacttatattatttagtttttatattatctcacataatataatattagtttactaataatgatcactatcagtactactgtattccatttaataaacaaataaaaattagcccatcaccatctcccaatagtataataaatatatcaaacaagcaaggtccatgaggaagggtgtaggtatataataattaattaagactaatttaagtattattattaactataataattaaaggttaacattaaaccaaacgtagctaattaagcaaagcatgtgaaaggcacccacctagccctagaataaggctattacaatgagaagaagtactcctatacatgcggtttaaggggctatttttgttttggatataatattatattatgtcttcaaattacctttttctttggccaaagggaagaccctctcacatgtagggtttattttaattaattctaattcatatgaagcacacacatatatacatattatatagagttaagagaatactactattaaaatagttgtttatatatataaaaatatatattttttttttgaagattatgcaaagtgacaaatgaggtatccacgtgaaaatatgtcaattttataatttcgaatctttttaatatccatatatatataattttatttatcactagattgctttgttttttttagtcaaagttatgacatataattacttaatattactttttggtttttatagattaatcacagtaaatatcattgaagtcactacaagaaatttcacttttattagaacagctcgctattgcactggtaaaagtaatttttatcagcgcattttgcaaactgcgctggcaaaaattccagcgcacatttacaatggctaaaatataacttttattaccagtgcatttacgcgctgaaaaaagttatttttgccaacgtttttcattttgtgctggcaaaagtacttctaataccgacgttgacttgcagatccatttttccaacaaaaatatactgataaaagtga

SEQ ID NO: 3631 - DNA, 1261 bp, Cannabis sativa
tgggcttagagccacaggtgcagctttaaccctcttcccaaacgcttgggttgctcttgattcccttggagtttctcaaaagttgacctccgtttattccactttcgaaaggtaaatttttactgcctaataaagagcagactatggaactatggtatatttacacaaataagtttacatctgaaagttggtgcacttatattttcagttcacttatttgtgttacctacttttggccttctgtaccagaatatatgtaaccaataccattactggagaaattcaagaaatcccttcgtcgggagctattcggtaagcattgtaaactctctgttttataacttttgtgttccaacgaggatttcttaattaacatggctaattacgtatgtgaattattagtgctggaaatgaacccagaccagtacacaggaaagccttgctcaaggctctcgcagatgaacttccaattgattctattcgtttctcaagcaagatcactgccatagaaacccaagaacatgagggctcatctcttgctgttgttcacatggaagatgaaattatcatcaaagcaaaggtattgtgatcaaactcacctttgaccttcattcttttccatattttctcaaaacagctttcaaatttgtgagctgcttcaaatttgcaggttttgattggctgtgatggggtgcactcaatagtgggaagttggttgggactagctgaaccggttcattctgggcggtcagcggttcgaggaatggctgtgattcctcaaggccatggactaaaggaagaagtccagcagtttgttggtgcaggcaaaaggattggttttgttcccctgactaaaacagatgtttattggttcctaacttgtgcctctgctgataaaggttctacttttcaaccttaacttttatcttcatctccttcacgtgataaggggaaaatgtaattgtctaaatattataaagattgattatctaactgcaaaaattaatgtaagtgaagcaatgcctttctgaatttcatatttggcatgtgtcatatcagatgcctacttgggaggaaaccctgaagcaattaagagtgaagtgcttgaaaaatatgccaatgacttgcccgaactatatcaagacattatcaatcactctgatctttcaacattgacatgggcaccgttaatgttcaggaaaccatggaaggtagcatttggaaacttgtgcaagcaaaacatcacagtggccggcgatgc

SEQ ID NO: 3632 - DNA, 675 bp, Cannabis sativa
gttacactttctcaatttttgttaaaaagataaatgatggtcccctcaagctagctgatacaactgttacctaaaattattgctttatttatatctaccaatcaatgtctttcattctatcaagtgaagcatttaaacatatggctcctataaataggaatatgggatcacatgcatgtaaaagggataggttctttctctctcattggtattaactcaattcatctttcttatctgactcgtggactaaaactcattaatacctaatcatgtaaatatcatggtctatatattcccttttctaaatttatatttaccaaaaattttagtcaacaattacattaataatatatattaaatatatcaaatctttaatttaaatttgatgattaaaatgacatatcatgaataaagaaaagtacaaatgaatgaattaatattgttaaatttattgtttattactgcatattattgactttatgattgtggttctcattattctcacaagcagaagcgtttaataccttcaaacaatccaaagatgatcatagcaatttgcaatccaatcacaaggcccttcaaacaaatcttagctttagacatggcaccaatctcttttatgctttcagcataacccgtcgtgcacaaaaccgcgaagcacatgctgtttttgtc

SEQ ID NO: 3633 - DNA, 1257 bp, Cannabis sativa
tataagcaaagccatattgagattctttttttctcttcatcattaatcaatcactatgtcggattttttattttgttactcttttgggacttgatttaatgatccacatgttatgcaggtgaaagtttttatgcaagaaaattaccttgccaattggattcaggtatgaattcttctcacatttatttcattctgtggctgtcataaatttatccttagataattatggcgtttgggtttcaaaaataatcttgtcttctgtaatttataggcattgtttaattcattgcccctggaagattacaaaaatgggatattggtgttaggtggcgatggccgatactttaatcgtgaagctgcgcaggtttgttttactcgtttattaaatgctttaattttagtttaagctgtatgattttaatatgtatctttatgtttaagctgtatatgtttcatctgagtaattatgtggacttaaatgcagattattattaaaattgcagctgggaatggtgttggaaaaattttggttggcaagtaagtgatacaggtggatgagaactcataagacagtacaagtgtctttatgaagttgcaaagtcatcatttggactctctgcccaatttttatccaatttcaatatcaatcttttggatctcaatgaattaacgaggatttattatgaacgtagggaaggtattttgtcgactccagcagtgtctgccgtaatccggaagagaaaggtattttgtcgactccagcactttaattctctttttatttcagcatcttctcacatcataggaagttatcacttgtttttattgcacaggctaatggtggctttataatgagtgcaagccacaatcctggtggacctgaatatgactggggaattaaggtaagtttatttcatttcatttcatttttaaacatcttcatgatatagttatagatttgtattgaggtgatagtcatagaattttttttctaccaactacaaaatatctagtgttgtatatttagagaagggattttgattttatttaaatttaaatttcaagaaaatcatacagggcaactctaccctgttgctgcagtctcctaaatattatgttttctttccagttcaactacagtagtggtcaacctgcacctgaatccatcactgacaaaatttatggaaacacgctttctgtgagtatctggttttacatgaactcctttgaccatttatgcattgcttgtgtaacata

SEQ ID NO: 3634 - DNA, 1296 bp, Cannabis sativa
acacaatcatacaagtttggtgcaacaaaactaacttttcaaatttacaaaaacaacacaaaaaattttaattgggtgtgtttcctacaagcatgggtcatttttttatcacacgatttaagtggttatttattgcttgtaatcaaggtgttatgacataataatagcttaggcccacactaatggggtgtgggatatctttatcttgttcacaactctaacaattgcaccccttttgaagtcaaaagggcattcttttaaactcacaaccaatcaagacttataatccaaacacgcttttatttcatggtactccactttttatcaagacgtgattagcaccccaaattaaattaatcttgttctacacaaaagagaataaggaaaagtacaaatacaaagtagtctttaacaaattaacaaaatctctttatgtctctttctctctctctctcctagttgcaccaaccgtaaacaaacaaactcttgttccaaaacaaaacaaaaagagtaacaaacattctgctccattccactccattccttaaactctacgttgctttttcacaataactaaatatgacagtgaaagcattagcttccttgaaatccaagcttttaaaaccatgcaggaaactctttccaagcttcaaattcatcaaacttaagaaacccgtctttataagggctcttaattatcgtcatagaaacaacaaagccacaaagtcgccaagaaaaaggaaccgaattacttcattgctagcaacagctttcggttctagcaggaagacagaggagatgaaaagactagttcagctcaagagtttttctgacagagggtctggtgaaggaatactctttccttcgcctctcaccccggcttatctaaaggctaccaaggcagccggtaaaagggttgtttcgggtcttgatgaggacgtcgaagatgcttgcaggagtttcgagaactacttggtggagatgattgttgaagaacgaaaagtgaaggacttgatggacatagaagagcttctctattgctggaggaatcttaagtgtcctgtttttgttaatttggttagtagattttatggtgagctatgcaaggacttgttttctactgactcagatggagtttatggctcccaaaaactttgaaacacttaaccgtcttagttcttaattcaaactacacattttcctattcactaatagtatttcatcaagcttttgtatgtgctcacttttgttgtatgagaatgtgaacacacacaatatctacctaactttctccaa

SEQ ID NO: 3635 - DNA, 1316 bp, Cannabis sativa
gtgacaggagtagctcttgtcggaaccctagccggccaactcgtattcgggtggctcggggacaaactaggccgcaagaaagtttacggaatcaccctcatcatgatggtcatttgcgccatttgctctggcctctcgtttggctcgagctcacactccgtcatgggaaccttatgtttctttaggttttggctagggtttggcataggcggagattacccgctctccgccacaatcatgtctgaatacgccaataaaaagacccgcggcgctttcatagccgcggtgtttgcaatgcaaggagttggaataatcttcgcggggttagtttccatgattttttcgcgcatttttctagcggtgtatgccgctcctccctacaacgaagataaggtcttctccccactcttttcaactcaacccgaagccgattacttatggcgaatcgtgctaatgatcggagctttaccggcaatattgacatactattggcgtatgaagatgccggaaacaggaagatacacagcaatgatcgaagggaacgcaaagcaagccgcagccgatatgggacgagttttggagattgaaattcatgatgaacaagataagttggctcaatacaaggctgcaaatagctaccctttaatgtcaatggagtttttacgtcgtcatgggcttcatttattaggaacatcaacaacttggttcttactagacatagctttctacagccaaaacctaacacaaaaagacattttcccagctatccatttggtcaaatctgatactcatgtcaatgctcttagagaagtgtttgaaacagcacgtgccatgttcgttatagccttgtgtggaacctttcctggttattggttcacagttttcttaatcgaaaaactcggtcgtttcaaaatccaactcggagggttcttcatgatgtcagttttcatgttaattataggtctcaaatacgattatcttaaaagtcataatggaactttgtttgcagtgttgtacggtttgactttcttctttgccaattttggccccaacagcacgacctttgtcttgccagctgagctgtttcccacacgtgtgaggtccacgtgtcatgctatcagtgcagcttcgggtaaggctggtgctattattggtgcttttggtattcaaacctacactttggatggtgacactaagaaaattcgaaagacaatgtacattttggctgcaaccaacatgttgggatttctcttcacgtttttagtgtgtgagaccaaaggaaggtctttggaggagatttcgggtgaagatggcgg

SEQ ID NO: 3636 - DNA, 1673 bp, Cannabis sativa
gaatactaagaaaccatagccaaaattctctttctttctctaacgctaaggaagagtgataggcttttcgcgcaacaaaacaatttgaagggcataaattgtcttataagaaatgtttgaggttactagtgtttcttatttgattgtcttatgcaacaaaagaaggctttcaatagaacaggtgtgacttattggaagtacaagctagggagtctgtagattttctgacttaaaacatgccgtgactaatttaacagaagtttaaaaatattatgtttgttttctttgaaagatagtttttttttcttattattattgttctctatagaaaaaaaatgtaaatatgctgatccccaataattaattgatgttaatgggattttattacgataaactcctgtttctctttctaatcaattgatcatgatgaaagcctcatatctgctttggtctctacgactgttacaggctcaagaacttttaaccaccattgcagcattagaggtcacagtctcaaaacttgaacaagacacggtgtctttgcattttcaacttagtcaagaaagaaatgaacgaaggctagcagaatatcgtctcaagcatccatctcttcagttgacatctcctcgctgcactgatgtaatgaatttgtctatatcactaattacagtagctatttacttgttatctacagttttctgtgtccacattgataaatagatttgaccagctaatgattttaatgcctcaaaatggacagtttgcagtgataatacaggatttaaaatgcatgagtacttattagctaaaaattagatgtcatcttatacatcaaataattgaattatttgtaaatttttattgcatcattcagattttaccttctttgaggtgttcaaagcattcaaatcctgaacagagtcttgaagataactcatcccaagaattaggagatcaagaatcagaatatagtgctgaatcaacttctatgcagtcaggagtggaggtatctttctggtttttcttgtgtatgcactgtctttatcttaatgatatttgacaaccataattggttaggaactgatgtcacctataaaacactcttagaccatcatcacttgtgtagctcactaatccagtgactgttatatatgcaatcacttttttggcttctcaaacagtttaaatttgaatagagcttctcggctgcccactgtttttttgttttttgatcaagaaaagagatttcattaatcaagtaaacaaaattacacaaaaaccagccccaaaaccagcagcctcaagacaatttaaggctacattttacacaaaaattcaatgatagcctgtctttcctagtgcattttctcctatcaatgagcgaaattcttgcttttagcacctgtttaatcatcctatcaacatattcaatcgcaccctgttatattacaaatatgtggttattttcatgaactgtttagggtttggggtattataaaatgtcgtgtcataaacactgtgacagtgtttaaaccccctaataatttctgagtatgctgggataattagtttgacgctgctacttttacaaccattcccctattttgtggtgttgaataagccagattttgagccatatggtaatcaaattaaatataacaggagctgttgtt

SEQ ID NO: 3637 - DNA, 503 bp, Cannabis sativa
atgcctctaaatctattaaattgtttcctggattcttttgtctggtaaaaactccaactaactatttacagtaattgctacaaaggcatcagtattttccaacacaccaaatggcgtatcttacgattaattaataatatttatataatgtcaacggatacttaattatactaattacataataccatataaagtatgataaatattattaatatcttttaacatttatttttaaatataaaactgatcaattttattccacggctaattaaatacaaatgtagctgatgcattattgatatactgttccatgtacaatttaaattaaatttaaaaacatcgggattgttgaccggattttaagtccgcgatcgagttttgggtttgtggattttgggtccaaaaaatagatttggactcggacccgcgataaagtcgggttggcgggttgatcaggtcaagaggttgacccggtcaactcggttattttttttttaaaaaaa

SEQ ID NO: 3638 - DNA, 1331 bp, Cannabis sativa
gactgatcgttaccgttattagtgttaaacaaaaacacctctcttttctcctcaacaagcttaagaatcttctcgaagatggacacgtggcagggaatcttcaacactccctcttgctggaaaccaaactcttcttccgcttcccttagaagaatcccaaacgcctggtggctcagatactctgttggaattataaatctcttcatctctttcccaacgcaaaccgcaagaaaccctttcggaacgacgtcgttcgatgaagccatagaaacgtcttgaaacgacagcgttctcttcatcaacagcttaatgctttttccgccgcttcccccagctgacgtggcagtagtaatggttgcagcactcgtattagttgtagaagaagcagtatttgtagaagaattagtagtagtatttgagttttttgaagcattggccatctttttccacttttttaggatctgttgaagcctaacaatgtctctgattttgttagacttggattttgttgaatccatatcgaatacgaattatatgagagaaaaggaaaaaagaagaacaaccagaacaacaaacacactaactaatgtcgtttttctaatttttgtgtcgtttttctacttgacttgtatatatatatattaagctataatatgaggctatgactctctctggaggatgtgtatagctgtgagggaataatgcaaagtgcaactcaactgggtgtgggtattgggatttaaaggaagatgaagaaggtggtgcagtgatttttataataatatatattatttttgttgtattatatatatgtgaagagttgtttaatgatattatatttgttagggtaaggggggggtacgttccgttggtgcaactacaactgctaataataaggaatcagatgaagatgaaccccatgatcaagggttctgattgtttaatcatcaaatattatatttaatcaattaataatttttttagagcccctgactgacttatcttggtttctgtgtttttttatatttattttattgctctaaatgattccttaatagtttactcttttgaagtaaagattgctcccatttcaaaaaaaattaaataaaaaagtaaagatattgtaaacagtgactttttttttcttcttcatttttcaagggttagttacaaccgtaaacttggactactcactaatccactatacaggtcaaagaaaatttactactgaatttctatttttatgctttttccttttttttcttttttttttttaaataaaggacaaatttctgtttatttttaactaaaaattctattttttttttttt

SEQ ID NO: 3639 - DNA, 852 bp, Cannabis sativa
ttattttttttttatattgtttagtaaataacggaataggacagattatgggtggcatggcatctgtgattcgccaaagatcgtacaaaaatattaggttttaagtgttacaatataaacctatggaggacatgttaaataactctccttaaaatttgtggattatgattatatgtttaacttttatcaattattttaaataattgttaaaaaaaattatgtataatctaattcggttatggaacttaatgttatcagtcattgtcgtcttaatgtaggcttatgtaattttctccaatattatctattaatatacaaagttttttttttaaaaaaaaaataattataactaataaaaatttatgaaaaaaataaaaataatagcacgaaaaagattaatttatattggtatagtcttctccactattatatatttgttaataaataaataagaagaaaaacttaaaaaaaaaaaaaaaaaaaaagataagtgttaactcagaattttgttacaataaatgagacatttttatgaattaaatagaataatttcaataaaacttttgaaaaataatcaataatataataataaaaacaagatatttacgtaattttataattaaatttacatagtacacgaatcttccttatttttgatgttttgtttacagaatacataataaaaaaaaatacaaagaatcaaaaatgaatttctttcaaagtaattacttaatcgaaaatcggctcttctctacatagtgattaacccccttatttatacttatttataggatttctctcatagtagtaatttcttttagatttattttaataattattcatgaaacgcga

SEQ ID NO: 3640 - DNA, 939 bp, Cannabis sativa
tagtcatgagttgtaaatttctcattaaataattaaattttacaaaataataataaaagaagatagtaaggatgctatttttgggcattgcattctttttaacttcaattgtaagcatctattatatcaaaaatatgttcatgtcatctattaaacattctctaatcctttatatgagtatgattgtaatttttgtccactttcatcattatagactttgttagtatcttaaatgtgttcaaagaaaatttaaaaataactgatattatacatttctatttaaacctaataatttaaaatttacttagaaccttgaagatcttcaaagattttgttttcgatatccctagaggaaaattatggaagttttgattttttgtttttctcaaaggttctatattaattagtgcataattagaaagaaaaaaaaagtaaattacataatgaacttttttattatcattttgaaaaaaatgactaatgcatcctttttccatatctaaatattttttttttttgagataatatctaaataattttaatattagttttttacatgatatataaattgtaatactttaactcatcctataaatttttgacaatattccattttttatattgcaatatacattgtaattttttaaaatttcttataaatttttgaaaaatttaaaataatttaatgtattgaatgagtatgtaaaacaattcattaattttaatataggaatactttataaatgaatatcatatacaataagtaataaatgaaaacataaaacttcttttaaaacaataaaaaggcaaaactataaaatcataaaacataccttgtaaaaacaattaaataataattaatgaagaaaccaaaaagtaaacaagttctggcctacaaattttcatttaacatattaaaattaatttaaattaatatcc

SEQ ID NO: 3641 - DNA, 871 bp, Cannabis sativa
acttaccatctaacagttcataaatcagaacaaaattattacgaattgcatcttcgtcaaaagccccaccaaaatatgatttgaacaacgcaaccgcctacagacaaaaagtaacaaaattagttaccgataagttgattacaggaaagtgaccttgggtaaaggataaaacgattagagtatatcaacctcaacaacaaacttgaacgcacaagctacatttgcattgctgctgacaacaatcacaatgtaaacgttgcttattctcatgtagaagaaagaacatccccctatttgtcgtacaggacatgtaccaagttctttagtttgcattatatgcgttcgaaaagcatccaccatatttcccctgaaagattgaaatgataaattatgaaaagtgccacataagtacatagaataatgaatttaaacctcataaaaattatagccaacaagtgacatacacagttggcccttagttagtccaagttggggctcaatcccatgatcccttatacccacacacccaaccactcaagacagtctcaaatggcttagccgacaacaaaatggcaagcaatgaaccggaagagagaacaaaaccacagtacagtaacagcaaactaaacagaactctcattctaccttgtgttcaaatagtatgtcatgggtatagtaatactaaaactttcttcactctgtagaagtcagtgaccactgtttttctttttatgtatagaaacagttagtagttactgtgtgttgaattatcccaactgaaatgtgatacgtatatgagaccccttccctctcaagacaggcttcaccagaactttgagactcaactcattaccagatctcttacacccaa

SEQ ID NO: 3642 - DNA, 861 bp, Cannabis sativa
gttcagaacagtagtcaaaaacaataaaagttgtgcatactagttggaaagcttatgtcaaaatcattccttgatctaaaacatgatgcatagctttcccataataaagtttactcattcatttgacttgtacgtgcacagtgaaaaatggaatcaaaccatgcttccttacttcactaccctcttgtctactaatactgtgtttaatatgattcaatgtaattcatcagcaaggattacctgtcagttttttactatataaaacactgttgcccatttaggcagctttgaatgaataaaaacgagtatagggtatggcgtaagcttcattactcactaaccttagctaatcacgagttaaagcatagagcagataagggggaccagcaaacgaaagtacttacacaacataataaggttgagtcaacaaagtcgaaaacagggtagacactagagtagttttttatcaggttcctacagtaaatggaactagcaaacactctcgatcataggagtcttagttgctaaaatttatttaccattttagggagctttgccctgtttactatatattaagcaggatgccaaaatatggctctcaatgctagtgtccagcaaagcaaggtagaaatattatttacacatggtaaatctaaagaagttcccattcagattcacaagaatcacgccgtggtaatatattcgtccctgcattcatcgttgctgttaaagcctctcgagattcttgactcaatcttttgtcatcctcatactgcaaggcaagctttttatactcctgctttcttgatgacctcattctagaatatagagcttcacgaattttcttctgaaaccgaacaa

SEQ ID NO: 3643 - DNA, 1208 bp, Cannabis sativa
tgtttctagtagggaggatatcagagaagagtttctagcaaaaatgtttcaaccggggggtagattctggatttccacagattctcccattgcttctttggctctttgaaccagtgtagttgatttaactagtacgcgtttttcaccgaaaaacctcccaagtttgcagccttctagaaggtgacatctgtaccttcaatcaaagctttgaccttagaatgcttcaacaatctcctcaccaaagcaatcccttatcaatttttcgttctaaatgcgagtccctggtagaaataggtccttaaccttccacaaaggttggttgtgtttgaattgaaagttctctttaatatcttccagtcctctccaagggatccaaggtcagtcccatatttcacatgaaccatcagttatcaaaatacctactccattcagacaaatcttcctcgcttcgaggaggcttttccaacatcttgaatcattttcattttttccataacccagaagtcgctgttgtggcaatacttgtccgtgacgatcttcacccaaaccttatcatcatccttcatgagcatcaaaaatagtttcgataagaggaccatgttcatgtccttgaacctagagaaaccaagccctccgcgcctcttaggttggcagatttcactccaacttctcagggcacaataacgtctcttctctgtgtttccaacccaccagaatttagcaaccacacgatctaactcatcgcacagtgtactagggacctgagtcgttgacatgaaatagttaggtatactttggagaaccgagcttaccaaggtagtcctcccagcttgagataattgtttagctttgcacccctccaatttcccaagaattttttccttcaataattgataatcctcccttttttttgcagtgaagaagaaagggttgctgagatatttctctttaggatttaaattattgacactgaggatccccttaatctcatcacggcagcctcgacttaggggaaaaacccaacccactttttgatttacttatcctttgacccgaccatagctcatacttgtggagacatttcagtaaagttcctgcatttttagcatttgcttggctaaagaaaatagagtcatccacatagagaagatgagtaatcgacataacatttcgtgaaacacgaacaccatctaaatcaccatccttat

SEQ ID NO: 3644 - DNA, 528 bp, Cannabis sativa
aaaaaaagaaaccgaaaaaatactaagcattattgttaatatattttcagaaatcatcaaaataataaaagaaaaacaaaacgacacccagctcccaccgtacgatactctttctttatttctcttgtattttctattcgcatcaagaaaagaacaatacttatcgtagctttcactcgcttcttccattgcctttcatattactgagctccgcggaggaagaggaagagcgattcagatggtgaggataatacccatggcatcttcaatcagaccttctctctcttcatttagattctctgctgcttcttctcgctcccgcctttctctttcttcccttaatccttctccgaccctctcttttcttcatctcgcaagtggtaaatctccccttttttaatttcggattctgatttggtcatttctctattaattttcttttcttgttgaattttgattaatctttctttgtgttacacacattggtttgttataatcaaatgagcactgttatggattattctttag

SEQ ID NO: 3645 - DNA, 1238 bp, Cannabis sativa
cagaattggtgttcttgtccacaaaaaaatcacttaacgtctgcagacatgtcatttcaccaattagtggcgtctcttttaagaaggggggagtgtggagatgtcgcaagttgattaaattctttatcttctttggcaatctagtaagtctagcacaaccttccaacaaaagtgtctgcaaattatacaaattgcaaactgtatctggcaactcttcaatttcagtgaaagataaatccaagtactttagatacttcaaatccccaattgaattaggcaacttggttatgtagtgttcagaaagagacagcactctcaagcatgttactgcagttgacaataagattagcaagttctccacaggcaccggaatttgcttcttatttgaggaccggattccatgagaattcgagagtggtaatgcaaaaaacgtatgcaaacccttagctttggataacccttctaatttccaagctcttcccatgtatgacacatgacggatcttgcgcttacagtcaaaaaagttggaatcatcttccaccgaacaaaactcatccgagataaaagtagctaaatcatgcattacattatgcaagcgaaaactggattcatttgaattgtattgttgaaaaagtgaccatgataatagaaattcaaaatacatctctccaactttttccatcctatttccatcttcaatttcaggtagaagaccttctgccatccataacaagattaccttctcttttacgaattcaaaatctttgggaaatgcagcaaaataagcaaaacacctcttcagttgtgaaggcagatacaaataacttaaccacaaagctggaaaaatatcacttctttcaaagtcccatataaagctttttgatacttcctcccagacctcatcttgttttccacgtaaaatactgccaattgactttagtgctaacggaagaccggtacacttctcaacaattcttgttccaatatcttgaagatgtgagttgacatcaacttgggcagattttgctagcaacacccaaccttgctctatggacattagctgctgttcataaattgactgagtgttcataattgatgcaacagaaatattccgtgttgtaacaataatcttgcttccattaaaccccgatttgaaagaattgtttaagaaatcccacctcttaggatccttatcccaaacatcatccaaaacaaagagaaacttcttgttatccaga

SEQ ID NO: 3646 - DNA, 1785 bp, Cannabis sativa
gtgtctgcaatttcatctcctttaacgacgaccaccgaatcaccccatccccaactcttagcccacattccaactccaattctctccaccaaatctgcattgatcttttggtccccatgttgaggccatagcaacataggcacaccatgccatatagcttcagtgagtgaattccaaccacaatgacttaaaaaccaaccaactgcagggtggcttagaacttcctcttggttcaaccaattctttactaccattcccttttccttcactctctccatcaactcttctccaattaagtctactaattcagtttcatcgtctcgatcaactttcttatccttaaccacccacaaaaaccgtttaccgctcttcactaaaccatcagccaacgccttgatttgctctcttgatatggctgttctacttccaaagctgacatacaacacagactcagctggctgatcatcaagccatgccaaagattggttcctctcgaacttaattggaggaagcggcccaatggcgatcactggcggtaagctattaaacgctttcagcgactcgccttctatactttcatacgtgtttaccagaattccacttgattctttcattttcttaccacactcggtgaaataaatcttcatagcgttattggcgtcatcaagaagtggtgggggaatccacgatttgggtattggttcaaaccccgaaatttcgataaagtcttttgctttcgggtcatcaagggcgtggaaggataagaaaagacttaacatcttggctgatgatgtgaagaatatgtagttaggaagttgaagagagttagttatgggaataacggttgaggccaagctcatgtctgtgataagagcagaaagtggtggagagagtgaagagaggagaggcaaaagaaggtgagaagagcggcgaatcacttcgaaacggttgtaaaaagggtcttgggattttgatgaaggctcatcatcaagtggaggaaggggtagatgaagttgttttctagtgacttgaggaaaactagtgaacaattcagataaactctctgattctgaaattgatagggtgggatgtggagtgatgacagtgatttttacgttgtgtgatgttagtaaaggtatgagacgaataaagggtgttaaatggcccataccagcacttggaagaagagctatatgagggtttagattagaggttgacattttagagatttgatgagtgagtgatattgcttatgagttcatctatatataatataatgttgagaacatagttgtcttttggggaagtttacaaaagatgcattggtgatttggatttttttgttttaagttattattagttttaagttgtcaagtgaagaacggctcttttgattgggacaacttgagaggtgagtgagtgagtcaacaaactacacaaatatgttgtgcttgaagaccaagtaagttgaaccaatcaaataaaaaggagatttattaaaataaattggtcacttatcattaaaataaactttaaccacgatttgtgtggtgtagtggcaggttttgtatggtgtagtagtgtaaggatgtcttttattaatatcgtttcttatttaggtcaaagatttgaatctcactacagttcctcaaaaaagaaattatatttagttttttaagaggctaacttactgggatggtgttaatcttaatggaatgaaaactctcgaggtgtatacaaataactcaattaaggaaggatgagctataagacttttataactga

SEQ ID NO: 3647 - DNA, 1291 bp, Cannabis sativa
tatttggtggcaaccttggataccatggctgggttatgagcaatttcgggatttaatggaaagtatcagatccaaggcacctagtcttagatgtgttgctaacttgatgtatcgcagaagcaggtgtaggaatattggctatctgcgttttctttttggtgttgatttgggtgaccgaattgctgggattcaaattgtcaagagtgatgaggctggcatgctgatttggaaagattctacctctggtatatatagtgtcaaaggagcttattgggctgatcaaaaggctagatttggggagtgcaagcctatctggaaatggatttgggattcgaaaattcacccaagagtgagtatgatgatttggcgttcttgtttaaaaatcattcctacaggtgataaattcagttctcgtaatctatgtcttgtgtgtctctcggccccagaaactcctatacatttgtttgctcaatgctcttttgcttctgcgatttggttttctggccctctaccggttagaattggcacaattcctggggattgtatcaacactctcttaagcaatctatgttctactctggatcgcactttgagaactaggatgcttgtatatgcgggtgtgatcatggaaagcatttggaagcataggaaccatatttttcactccacgggatctcagcagagtgtagatgcggttcgacaggaggttggtaggagatttttagagttggatcctgatgttgatcatgtggttcaaccggcccctctgaatttcaattcgttgcaactccctcgattatccaccaaacattgtcttctggtggatggttccttccttgaggggagttatggttgtgctatggtgtcgctgtctagatgttcttccgagtggtgggcctatgtttcttctggctcttgcaactcggcgttggaagcaaaaatgcttgcggttatccagggactccattgggctctccaaaaccagttggacgatctgtctatagtctccgactccaaagtcttggttgatgctttgcgagcgaggagatctccgaagtggatctcggctgccacttttactgttattttgaatttacttttctccttttcttgttgccattgtttttgttaaaagagacattgttgggtttgttgactttttggctaagtccactcgtcgtgataatagtgtttggcaggttgttgaaggggagggattaccccctgtgaatcccaagcttttctggttttaatcaatgaacctgaggttctttcaaaaagaaaaaaaaaa

SEQ ID NO: 3648 - DNA, 2729 bp, Cannabis sativa
aaaaaaaaaattattttgttgctgagaatatactagtacttgactataatagcaatttctagctttatgctcgtaaagcaattgtgtttattcaacaacttatattcagtgtaaaaatcccactcccaaacaccccaaataatccataatcctttttccccaagacactcaaatcaacaaaaccctaaaattaaggatatattatcaaatatactaacctgattcaacccttgaacgagttacttcaactaaacaacaacaataaataaaacgagtatataaaactcatatggctgtttagttagcagtgtcatattttccgaaccaacaaaattccagcattttacagaacacgcttcaattattgaaaatgtataccaggaataaacacaatacatagagctatatatatcaagtgagagagagagtacgagttttctgaggatgcgatcgtagtgagagaaggggtgagcgaaggagacgaaaatgacgacattcgaagagtgaggagagagagagcgcttgaggaagtgatgaaggagaaaagcagcggtggtctctactgagtcgtggaggagtagaagacagccggcgatggacccaacggcttcatccagtaaagtcgacggagttccatgttccattctagctgtttatccccataagaacggtctttctttaatataaataaataaaaaaaaaaaaaaaaccaccacacaattatacacatttgtatcaaaaatggcgactaatacattaccctgaagtagttaaaaatggctgaaatgatgattgcgaagctttgaagctgacgaagactccaaccagtggtggtagagatggcggctaagctttcaaacagagttagggcagatttggggttagaggagaaatagagagggtgtgaaatgggaggggtataattggtatagtgattaaaaaagagggtataaaaaactcaaagaatctaaaacagcggaaaaaaatgagagacaccaacttaaaaaagtataggatctaattttttcttggttttaaaaatctaattttcagctcctcaaatttcacaaaatttctaaccaactttctaatttagaaatgaaattggtaaaccacaatcaactcctaaataggaaaaaaaaaattattgattgaatttgcctatatgtagatattgaattaaacagataatattgataagcaagcttttttaatcatcaaacttagatttctaattcttcaaccgcggagatacgtatctcaaattgcacgatagagttctcttgtaattgttcgattggttgagtcaagaaaacagccacaattaatcaaggaaaatttataattttggaacacaagaagaccaatcaagagcatcatgatcagccattaatttcgaaaactggtcgtcaaaacaaaaatatagataacaacaatcaagaacttcgaaaatcaaaaggtgaaactcaaaacataatttaatttaggagttcaaggagtttaaaacacattgaagtgttgcactgttttttgtctctgcattttaaatgtgatttaacctaattattattattgtttaggctcttaattttaatttcaatgaatttaagcagttgaagtgaaggccaaaatccaacgaggcaggattagaaacattagtaattggaagaaaaggagtcgaagacatcgagaaacctgaaaattcaaccatgattcctttctatgatgagaatttgtacatgcttaatatgaaaaatgatctcgaactaaaggtgagagatgtcaaccaattctttacatatttttatttgtaattgagtttctgtataaacatatggttaattatattgcccatttgctttagtattaagattttcagtttcattgataaatgagatgtgatttctttaggctgcggaaacaattccctcaccagaaggattgagtgctgcaaaccttgggcttattcctccattctctactacaaaacaattggctactgctgttgagtaagttattattcttggtatcttataattgtcactaaattttttatttattttcttccaactaacatttaagattccggttgtagtaagattgtgtaagaagatttatttgttaaccacctttgagtttatagtccacccttaaacaagacaagaccttctaccttggcctcacgaaactaggatggatggaaaaattagaaaagatgacatgtatgatggatggagagcatattagttctcttttgtgttttgtgttgtttggtaagggtttttctgacggtaaaatttataatggagatgacataaaattctttcatcaataaaatcctaatgctatcttatgtgggaatctttaatgtcttattataattacaccattttttttaaaaaaaattaatattaaaataatatatttatgagtaaacttttatatttgtatttattaaaaggtaaaataatttaataaaataatataataataagaatatttgttaaagtaaattttaattgtgtaattgaaatagaaaaaaattagtgctattcttatatttttagtgttaatttagcactaaatttaacaatagtattagagttggcttaggagaacatagaaaaattaagtatagaagatatttatatctattattttttttaattttctatttttgtataatagaaatttatatattcggaaatctcctctcttcttgtcaaata

SEQ ID NO: 3649 - DNA, 910 bp, Cannabis sativa
acattccatttccaaaatagggtaagtattaatacgtactaaaaaaatataatattgagtattcattatactaatctcctacatataatttcttataaaggttgctaactgatgatgtgatttaatgtgtataaaggaaaaggaaaggctgaagaatctagctttaagagatcatagagtgcagaaaccagcagaagctgcaaaaagagcaagttatacaattaagccttctactattagtagagaaattcaatctaattataaacaagctttaaacacaggcaaagatcctcaggctactcaggtagtaagattcttacaataactttaatataataatttaattaattaattattgaattattaattaccctttttcatttttggatcagatactaataaggtttccaaatggggaaagaggagagcagaggttttcaagcatagaaaaagtgcagtcaatttatagattcatagactcactgaggttgcctgagattggaaactacagattggtctcaaagctttccaagaaaaatttatggagttgaccaaatgggacagactcttaaggatgctggtttgcatctagggcaacccttttccttaaaactctttaacactaacttatgattagtataatcatcctcaattatatatagcccaagaataattacatatatactcaatgtatcaaatgcataaaaagatgtagcaaaagcacaaaaacatgtgtttgtgtcatggacattaatagatttgattagaaaaaagatgatataattaaatccttctaacacaaatctttgtgtatctgttatgtttttgtatgcatttgatatatagtgtagttaaatacaccatgcttatatttaatagatttggaattttttgttgaaataattataaa

SEQ ID NO: 3650 - DNA, 2201 bp, Cannabis sativa
atataaccaaccgtatacatggaaataagaaggaaccagatattgtattgcttaatcagacaagcctgtgtaatcatctgacacccatatattgcatcactgcatcacctaatcaagtaagaccgtgccaaaatctagcacccatgcatcgcatcgcctaatcagacaagtctgtgccctatcctggcaccaatatattgcatcacctaatcaggtgagcctgtgccatagcctgacactcatgtattacatcgcctaatcaaataagcatgtgccctatcctggcactaatatattgtatcacctaattaggtgagctcgtgccatagcctggcacacatgtatcgtattgcctaatcaaacgagcatatgccctatcctggcactaatatattgtatcacctaatcaggtaagcccgtgccatagcctagcacacatgtatcgtattgcttaatatgacttatcacggtcatctcacaagaacaacctgaataccgctcctcggtatctgtttatcacatttcctaatcaggcaagctcatgccatagcctggcatccgtatatcacatcacctaatcaagtgagcccgtatatcacattgcctaatcaggcaagcccatgccatagcctggcatccatatattgtatcacctaattaagtgagcccgtatatcacatttcctaattaggcaagcccatgccatagcctggcatccatatatcgtatcacctaattaggtgagcccgtatatcatattgcctaatcaggcaagcccattccatagcttggcatccatgtatcgtatcacctaattaggtgagtccgtatatcacattgcctaattaggcaattccaagccatagtctggcatctatatatcacatcacctaattaggtgagcccgtatatcacattgcctaatcaggcaatcgataatcaagaaacctttcatgttatatggtacattatacttttcttacaattaatctaaattcacgtattttggccaacccaagtggaggaacattcccaatgatttgggtcctatgtcacaacaatggtaaaccaataagtatgtatccaaaatactgcttaatatttgcaaaagacaacctagggttttctaccaaatcccatgctataaatacactaaaataaaacttatattttgactctaaaatatacaccatattgtagagctcattgcaatctttgaaacggtatatagaacgtccaagatggacacccgagtgaaaagttatgaccaaaattctattaagttatattttttttagataaaggctattatattaaaacaagagttataatacaatagacattagtggaggtggaagttcccttaaccataaacaatcaatatccactgaaagagcatacttagcaaaagaatgagcaacaatatttgtaaatctcttgacatgagaaatctacactccaaggaaattggacactaataataaaatatcagccaacaagcaatgaaagtttgagaatgaagcacaatgagatttcaatccttcaatgactacaagagaatttgattctatatagtcaacaggtagttgtaggtctttcatccattgtaggctatgcatcagggccaatgcttccataacttctagtttaaaacaacctgggaaaggtcttgacattgtagcgatggtatcacctctactgtttcgtaatatagcaccaaaatcaaaagtttgcattactgtgttaacagcggcatcagtgtttaacttcagcctacccaaaggtaggttcaaccacttcggtgttggttgaattgattgagaatgggcctgttgatgtgtgagtttagagtccataggcttacgtactgaatggaactcattcaagtatgatgtggtcttgaatagcagcaacttagttggatgtggttttgtaccatgacgttccttatatcttttcgtccaaagactccataaaatgcaagcaaattgttccatttgtaaatcagaccatattgtagagacatgaatcaggagctctttgagcgaaatgtgactacaaaggaggttatcaatggagaaatttgataacttttgaaatttcctgggccgtttgcaaaagaaaaaagcatgtataatagtctctttctctctatgatataaataacaaagagcaggatcacttatgtgtcttgtatgcag

SEQ ID NO: 3651 - DNA, 1087 bp, Cannabis sativa
ccagggtggtctgctactaggaccgtcggttctgggccagagttcattgttcatgtccagtttcttccccctcaaaggtctcctaatgctggatatattttcgtccatgggatttattttgtacttcttcctcattggagtgcataccaatccatctgtattaaagaaaatcaacaagattagtcttcttattggaatttctacagtgttgatcccatatgcaatgaatcaggcattctctgttctcttaccacgcatacttagtatgaatcccgacgaaaccaacattcttccagtggtaggacatgctgaatcattagtagcgctcccgacaattgctaacctccttgtcgagctcaagatcatgaaatcggagattggtagggtggcaatgtgttcttctgcagtaagcagcttgttctctttcatcatatcaaccatctttgatacaataaaccaggatcacgatgagaatcaacaagtagtaccgagacttggttctgttattgtttttgtaactttcattgtttacatggtccgccctttaattttatggctgttgaagcatagaccggtacaagcttcattgaacacaaaccacttcatcattgtagttgtgttggttttgatgactggatttttcggccaggctattggtttgcacactcactttggccctctcattctcgggatcaccataccagcagggccgccaatagggcctgggcttgaggagaagctccacatgtttacctactggatttttttgccaatcttcttcctcaaaaatggtttaataataaacatctttcaaattaagccaaggtctcatatgattgtacagttaatggccatagtaggtgcacttggaaagttcataggagcctacttcacctcccgtcgaggctgcaatatgccaattgctgatgctatcacgcttggccttctcatgaccaaccaaggcctccttgagctaggcctgttcaagatgttgaggagaaaaaaggtatgctttacaccttttcttaatatcatttgacacttatatttccttggaatattttctcaaattttctaacagtgctaa

SEQ ID NO: 3652 - DNA, 1135 bp, Cannabis sativa
taggtatataatgcaatttcctccaaacaacaaatccctctatgggtgtgggctaggatggttagagaaccaaaggcccaagatctacaatagacctcaaataaatagcaataatcctagttgttacaaataactatgagaaaatattaaaagttacaagtgtctactgtctaccatcttctaatatattatattattattattataattaagtattaaataaatattattaattaattataaagcatcacttttaagtggtacgaaacatcactgataccttataacagtactctataatatgcaaacatccaaagggtagtgactagtgagcctaaaggtgtgaatgttcttttgggtctatattgatccatattgatacacatgttaaaattactttacctcttctaattaggaatcaatatttttgggaaggtggatgtacaacccacaacgatgagattatatattttgaacaataaaaatgtgttcgttatagttacactattgtttttgtaatttttcgaaaaattttaaataaattttaatacttataatagagttttcaatgtgccaatttaccattggtgttataaaaaaattctctttttttttttttgcacaataacttatttaaatttttataaattttacatgttgtaactataacaaataccagcataataaaataatattcttgcatatgttttaagatgaaaagttgagcacaaagctttaagacaaaaaaaaaaaaaaattattggactctcgtaaaagaaatatgtgatatttttaaaagatactaaaaaactatttgcattttttaaaaagtaaaaataaatttagggcttctagattgggtggtcttaagtgcgtgcctaacctgctttaactcagatccaaccgaattgagcacgatgttaaaataagagattgtaattttagcacttctctccatttaacataataatacatgcatgtgtgaccgattagtaaaacattttcatatgattttcttgaaaagaaactttttttttttatctattttctaagcaattataaatcccactaattaaggcataaattatgaaaaacgaccacaacaaacaaattgctaagagacatagattatgta

SEQ ID NO: 3653 - DNA, 1817 bp, Cannabis sativa
taagcacacattctccaatagtcatttcactgaccacaaagaaaatcacaaattaagaccgttgtaaattcatttttactacgtttaaaattctttaaatattgtactcgtacggaaagtctcattataatcatcatggaagtaatgcctttattaatatatggagattttaatagaaatatattattttgttaaatataattcttaaaaatggtattattaaatatacacattgcttgtgtggcattgcgctttaaaattgcaaaattagagaggagtgacacaagatgtcacctttcggctagaaattctctcaatgaaagagaagtattggagagaaatgttttgggatgacacttctcgttcatgatgtcacatgggctgtggtatagctctcccaacatcccattatagttcacatttaataaaactaattaattttcgagtaaagtgtatcatcttgacttgtgagccaattttgagcttgataacttcaaaatagagctatgactatgggacaaacttagatccgccttgaaattattttttcaatgcaagttgaaccaagtcgtttggataaaattgagagagttatgcgtgttttactgaagggtagtatgtactttttagctctaaatctaacctgtgctatgtcatcatgattcgtaacacctcattatggcccaggtcagtcgtgcatgctcctggatacctaggggtgtgttttgccttattttttatggtgagtcatattttggaggtcttgggaccccaaaatctcatttcaacgtctgaaaccctaacatgagacctgtgccatctttttgtatcaaaagatggcagcggtcggctagggcatgtgggaagcccttgatggtatttctcgcttgccattttttgggacataaagatggcaatggtcggctatggggttacacacccattggtgacttttctcacttatatttgataccttgatgttggaaattattagtgaatatggttaggtgttagttagttatgcaagctgtgtgtgtaggatggagtttgttactcttcacagctggccaattagttttctaacaatcttccttttcatgccttgtattttcacttaattcatataaatacaattcattattcagagctgagcaacaattcactcaagctcatttcatctcttttatgttctcaacatggtatcagaactttggttccaatttcttgtcctttctttgttcatcgtggttcttgaagcttttaacaatagcgtcctcctttgctgctcctcgatctgaaggctcgacttccgctactactgttcttcctctagtcgtagtagagcatgtgattccacaaaacctagtccctctcaatctacgtatcgatcgcacaaattatgtctactggcgatctcaagtgctgtccaccgctcgtgctcatcgacttgaaggatttcttactagctctcttcctcaagctcttgcaacaattcctgatcctcttgatgccacgagatcagtgccaaatcttaccttcgatgactggatgcgtctagatcaattcctcatgatctggttattcaattcaatctcaaaagccatgctagaacatgaaacttgatgcacctcctctgttgaactctggaatgtgttgatacaactcctttccaacatatctcgagcaagaattattcaaatccaaggcatgcttcagtcgacaaagaaaggatctacacaaatcgatgaatacattctcaagatgcaatgcctagctgatgctctacttgtagtaggacatcaaattagtgatgatga

SEQ ID NO: 3654 - DNA, 1222 bp, Cannabis sativa
ataagcacatatatacaacaaaaacaaatgatgaagccaaagactaagtcaatcatgttttggtatatagcttcatttcactagagtaaaatatataaatgttattttttatttagatttaagactactaattcatgcacatcatagtaatgcaagttacaatatgtataatgtgtaatttttgatatttacttaaaatatataaaaaagtatgtcatggaatatatatacactaatagtatgcttaccatatttttatgttttgtcaaacatgtatcttcactcaaaatatagactcaaataatttattttttaaagtagctagactcaaatatttatatgttttttctttcaaaaaaaaaatatttatatgtttatatatatttactatcaaaattttggctcaatctataatcgttactctttataaaaataataaataaataataaaattttatttaatttttttttatttgattagatatcaaaatatttaaatgtcatttaaaaagaataattattctattttctttttaaatttttttttaattaagataaattaattgttacagaagaactaataaaatacggacaagtatcactccaaaccaactctcctactgcactagtaatagaagtagtcagtgcataggcaacgccattcgcaaaacgtgaaataatattacaagaactgccaccgacaacaactataaataataaagaaatacaaaattatatttcaatagcattacaagaaccacaaacgacaacaacagctaataaagaaaaatcatttcaaagcaagataattttttttatgtattttaaattgtgttttattctattcttattcttatatttttattcctttcaatcaaacgcatgtttataagtaattaaaagtagtattttttttattttttttatttttgttgatatatataatatttttatactattagaattattaattgtattgatttttattgattatattcaaagtgaatatttggtttaattgatataatatttttaaatggtcaatatttttttttttatcaattttatttaattcagctgtccaaattacacattttaattaattgtcaaaatattatgacaattatttatagcaaatattttgatagaatgtctcacatatacaaatatagagtatcagtctcaaaactcgcaactctttcaatttctatcaaatcaccat

SEQ ID NO: 3655 - DNA, 972 bp, Cannabis sativa
aatgaaaagaaaaaatataatgaccccaagaaaaattgtgggtatacgtgtatggtctgatttttgtgtatctcttctgaattgtccattttggtgtggaagacatctattcataagtgtttggtttccgctccattaagtagctttttgttacctttctaatgttttctggttacggagagcttttagaagtctagtggagtttctttaaggtggttgggacattgtattgttagtatataccctagacaagtgacagtttaaggtggttgcagattttaacaactacacattcatttctttaactagcttctttttaattctagtatctttctaaaggtataaatgaactttgataccaaatcaacatatgactacaaaaaactggcaatgaaaacatccagagtgttgttcagacgaaatctttcattcgaaaaatgtggtttccttgttgatatcatgtcctaatcgtttcaaatgctctcttttcgtattatttccactaatatttgtattctgactgtgtttcacaggagtaccttggtactgctaaaagatttggtcttaatccagtatctcttgcaattggttcgatttctctctatactcaatacactgtttttggcatttttcttttaattgtaactgataaattttattacagaaaatcattcactaaacaatatttctcgcgactttatttttgatgttgcagcttttgtcttaagacaccctcttgttgctagtgtcatttttggagctactaagtcatggcagcttgaagagattctaaatgcatgccaggttgagctcacaaatgaaataattgatgacataaacaaaactcataaaagattccctaatccctgcccctagtctatattcatgctgctccactgatttgctaggtagagttaaaaaaactaatttatgttatcttgctttgtaaatcttgagaattgagatgaaaac

SEQ ID NO: 3656 - DNA, 1233 bp, Cannabis sativa
ctacaatgcatgcatgggagacaaattacatgtatatattaccttaataatgagattagcaccaacgaagtatttggccaagacaatgacggtggcgctatccacagtaccgtacaccttggccgtatcaccgtggctaataacgggtctgtccgtttgggaagaaccaattaatgtaacgaagtgttgagtgaagtcgatcttcaccttctcattgtactcacctggtccaatctcgatgatcacccttttcgtgttgtccgccggtaccgttttaacggcctcagatatggttttgaagtctccactaccgtcttttctaactttaatggtcctagctgcttcttcagccttcaccagctctgggtccagcgtcgattttctctccgagaatggctttatgtttgcgttaaaccatttgtttatgtctgccttgttttccggtaccggcacattgtcgtccgccgataccaccaccaccacggcggcgatgatgagtaacgatactgataaggctgatgagactgagagtagagccattcttttcttgtttaattattattactactggtgatattaatgtatatttctatttggttcacattgataagaaaatatatatatagtagtgattttgtcgttgagatttggtgtggtttttctgggggttgggaaattcttaccaatatattattcttattatctacctcatcaactaatttgatgtggtaagaaagaagggaaaataaggatgtgaggacataaatggtgtgtgtgtgattttatgtgttggaaaaaaatgacattggataagtatggacatgcgtataatgagcctattgtaccggaaaggaatgggagagatttcccataacgatccgtgttttaagtttcaacccacaccaaaaaagagaaaaaataaaataaataaataaataaatgaaatgatagaaacctaactctttattacttactaattatcgatcttgctatatactacgtactttttttaatataatttcattaactaaccagcctgtgttgactctttaatttcaactgtttgtttaattaagatgacgtgtcaatttatggtaggtggtttgagaactataaccaactacatattgaatttaaatctcgtctcaaattttggtgtctagtcaaataaagaataacactgctggactagcctttaaaaaaattatattatttaatatatctacatgtaca

SEQ ID NO: 3657 - DNA, 733 bp, Cannabis sativa
taaccaacttggcctacattttacgtatccttttttaaccaaaatttacacaaattactttttttacttttttttttttatatatatttttatggatttgttttttaattttatatgtattagagttagtcttatataattaatgtgtaaaaataaattgtcatatataaaatgaataagttactcacttttttttattgtcaattagttttgagatagaacctcattaatcttagctctctttcattctaaattctaacaatatatttacaaattttgtttttttactaatttttccaaagaaaaaaaaatatattattttcccctaataatgaaagcaacattattttcatataatagttacgtaaaaacaacataccgaaaataatagtccatatatttgtgaaaaaacaattaaaattcataaatataaatataaaaaaaataaatctataaaaatgtaattttttttgttgtattggtgtatttataaaacaacttctattaattatgtctcatatatttaaatctaataactaatgtgaaaaactagattaactactcataagtaatcaagcatttacttaatcaaatattaaacacttaaaaatgtttattaataacactttatgtaatggggagaagtcgatatatatttataggaccacaactgatgatatgaaaagtgctttactcagttggaattggcagctaatgctatagttgctctctt

SEQ ID NO: 3658 - DNA, 1334 bp, Cannabis sativa
cgcttgagggtacgcgccggctcctctcctgctgccccagagcccaaatcggcggagtccccaaattcggacgagttgggctgggtcgaagagggtggctggagttgactactggacaacggaggaggaggcggcccctggtgggtatgggctcgaggtgggcttccaccgttgttggcggcggcgacgacggcagcggcggtattggagtttctgatatcaaaggccaaagcgagatcaggggtgattagggtttgagataaaggcatgagttcctctggggaagggagctcctctgcccatctgttgaaccaattggagtcgtcttctctcattgtatgtcaaatctcaaccctgctcactcacccaattcccttctctctcctctctctcttataggattatcagtacagtttgtcttatgggacaactatagagaagagaagagaaaagaaaatcaaaaaggcaaagataagaagaaaaacaacaaaatgttttttgttctttcgtactttgttgggttgaatatggaaatcatccggtagtacttacaattttctctccctagaatttggtggaaggagggggatgagagaattaatggtggcggtggtggtggtggtggcgatggtggaattagggaagaggattgttggagggtatggaggttgtgaagagaggttcgaggtggatcttgttttttttcttccttttcagcttttattatgagtactgtttgctgatgcttttcttatgatttttatgggaactgaatatagatagagagagaaagagaaagagagagatttctcaatttttgcattttctttcatttttttttttaaaaaaactaaaatttaatttaattattttccgggatttgagggtcttatacttgagagagtgagtgttgcaagatctattagattcttatttaactcacggtttcaggtagagcgttggttaccacgcgccactgctgtaggtggactatacaggaatgtcttttcgatcaggtggttcgtttatttctatttccctttaccaaaatatccaaggggaccccatagcatacaggacgacggtgcgtgaagtatacgcgcggctcattagagttatgagatgacaattgtggaaatgaatgtgtccttatggtcattacaaggtagatgaatgggttgtacgggtaagattaggattaggagagagagtgtgtgtgtgcaaagtttgatcactttgtgagagttcttttaagttggtgatgaggaatcaactaagtcagtgttttgctgtgaagataactttaatttatccttttcattaccatgtacttt

SEQ ID NO: 3659 - DNA, 779 bp, Cannabis sativa
agtttctcgcttgatgtcttgtttgagtgacggggtccctgtttgctaaggtactaacttggctttcttgttgataagttgtactgccacgtggttctcattttggccacataagcactgccacgtcacgtaggcaaaatcaggataacaataagaattatctacgtttcatgaacgattacgagaataaaattccaagagaataactgtcattctaaaaaagcatataaataaggaaagatctcccaaaatgagtgatgactaaattaaggattatagagaacaatttgaatattgtaccttgtattttgtaacaactcatcgaatcccagtactaatatggactcgtgaactatgaaatttggtgaagattttggcaactttttcttgcttttttaatcttggccaaaaatggcatatgacttaggaattttttttattattattttgatgaaatatgggtgtttgaagctaggttttgttgttttggcttttatttcatgaaatttggtgtagaaacaggtcgattttgaaactttggtctaagttgtttttgagtgttgaacgaacaacaagaacgagagaaattttgattttccctccctttttttattttaattctcaataaaatgagaaaaacgtgtttgtggagataaaatggtatgtacctttgagaaaattatttgaattggcactaatacccctacatccttgaattgaaactcaggtatggtttactcaaacccacctcgagattgagttagagatccccccccccc

SEQ ID NO: 3660 - DNA, 1212 bp, Cannabis sativa
tcaacaattctctttaacaatattagccaagtacctttggaagtaaaaagtgaaaaccaaatatatttgaataaacatacataacaaagaaaatatgatcaaaagtcataaggaggtaggtgctgaataaaaagtaagaaaagtaagaaagaaaataaaattgtaaataagggtaatataatacactctttctttaaaaagattttttggtaaatttttttatctatttcggtatgaagagttttctagtccaaacttttttagtaatcgtttatgttgtaattatttgggattatctataaattttcaaaaaatttcaaataatttataatactttaaataagattcaaaacttcaaacaattgcttacttagctcataagaaaaaataatcgcatgcaacaaaatattaaaatttattttcaacacggtagattatttataatttttttaaaaatttacaaataattttaaatatctataacttacacaatcataaaaataaaaaaataaaaaaataaaaaaactcttctcgatgctaaaacatatcaaaaatctaccaaaacacccctttaacgagtgtaattccctactgattttctcaataaaatgttataaaactaataactgtgtattcataatcaagtttgcttttcagtaaatcagaactcaaattttctcaaccaactacttcctctttcatttcttgatcaaatcaaacatcatattagaaatgtctttgacaggtatttagttgctttaaatacaataattatcttaattattaagcaagagagtgaatcaattaatacttttaatacagttacaaagtcagaacatttattgaatcattattattgtcaccttccttcttctgacatataagattcagggcccagtgacaagctggtgcccatgacctgagctaagcctaacaccacccatgtgttcatgtcaatttatatactaaaaaaatacaaatgaaaacaccatcaacacttaaattgaatttttcattatgttaaaacatatgaaaattacagacaaaagggcaaactaaaaatgaaaacaattccaaataagcattgttaacattatacccatgtcattgcttgtgagatgtgattcgatattgaattgtactaattacgatatcatttatttcttacttgataccttaaggtacccttttaacaactctagttttgaatag

SEQ ID NO: 3661 - DNA, 1033 bp, Cannabis sativa
ttttttttttttttttgaaaggcactatatatcagtcttattattattattataaagaacaaaaggaaaaattgcaataagctacaaatttgtagcatgctaatgaatgtactaagattgtacctgacaatgactagagatcatccctaagcctgaccctattaaaaatgtttttctcatatagttgaggtattgaccacaagcatcaaaccttctctctcccttttaaatgttggtatcaatgcttctcgtctgaatttctgacccaaattttcactatctcgggaatgcttagaccagccctcacaccacctttaaccacttaggctagctcaagtggccataggaaggtgtgtatattggaagtcttgggttcgagtcccaaattatacattgtgtaatatataaacgcttaaattaaaaaaaaaacccacaccaccttttttatttcttttaatttttttttaagtggctgctggttggtttccaacctatcattatgatatatttcatttgttttatttttccgacgtggtcgttacaataagtaggcaagctatacattaggttgacaataaaataacgaagtccactaacatagtaaagtatttatatgtgtttcagttcccattatttatactttaaaagaaaagtctttaatgtggaatatgttaagggtagaaagtccaataaagaggacaattaataaacaggtgccaattccattgagatggcatggcatgtgaaaaaagagtaagatgaagtggtgtggtgtggtggtagtactgaagtagtagtagtagaagtagggtaagagtgtggtgtgagtgtctgcattgagtacagttcactgtcgcactgaattaagctatgtctacaagctatggttgggggattcctctctttttcatgtagcaaaacaagacaaccaaaggttaaaagatccagtttcttgttttcttatgcacagaacacagccacgtgtactgactcaccttcaatggcatgtagtcgtctctctctctctctctct

SEQ ID NO: 3662 - DNA, 536 bp, Cannabis sativa
tttttttttttttttgagataaccacaattgattatacattgtttagatagtaatctctctctttcacactttctctcacataaacgaaaaaaaaatgagtgggcctacttgtaaaataatatcatttgttctatctctcccatttttctttccttctggagatgcccccaagaacacaaatcaaaaataaaatcttcaagttttaaaagatagagaagatgtcttcataaaaaatttaagaaaaaaaaaaaagaaagaattaagaagatgaggtattttttctattcattatttgagtttctcaactagaaagtttaaaccatgaaatttgagatctttggttatgttttgaatccaaatttaaattttaaattatttccacttaaaacattcactggaaaatattttttcttaaaattaagtaagctttttttttttttctaattagtgacttcacaaaagaataataacaagaaaaatgtctacatatgcatcaataatgtccagatcacttatttcagaaaaaaaaaaaaaa

SEQ ID NO: 3663 - DNA, 1113 bp, Cannabis sativa
aagtcaattttcattgcaggatgatcagcacacgattcacatatgcactcatttttgagttagtgacatttttttttatctgctctctaaatacaatgctacaagatcaaaacgtttatatttgtataccaaaacttactagcttccagatctggtataggaaaataaacagaactttaaaagaatctgcattttatacataatgaacttgcaaaaccaactcgaaagatgcaaaaatttcatgagagaagaaattgaaatagtcaggagatactactgataatgactgactacaaagccaagtgtttccgtctctagttcatacgagcatttcattctgatatacatttactactttagaacataataataataatactgtaatgataaccaaagtttagaaatctgttataaaaaatattaaaaaacaaaatgtacaaaacatcccattccaatatccacacctgaatcaacataaattagatttttgttgtttcgaatatctttctccaagataccctagccactaacgctaacccaacgattgtagaatacattgaagtaaaatcaattatttaaagctcaatttttttattttcagtaatcctagccccatgttaacaacaagcagttagtgtaaggttgcacaaagttggtacttgggagtcaaaaggcagcacttaaatagtttcacgttcatcaatgggaagatattagaaaacaacttttcaaaaataaacaaaatccatgttttccactggcaacggataacaaaattctcaagcaagtttcccaaaacaacaagaacaataaatatggttcaaaagataatattccactccaatatcaatgagtacctccagtgtgacggttcaaaagtacgaaagaaaatttgcgttcgatttgtatcaatacttttctctacccacgatgcccatgtgtctagtgctgttctgtaggcggtaggaattgacattccaagctttaggaaatttcccacctgaaaatagcaaccactgtccagaatagaagctaatagtcaatataaatgacaattatggctacataaatcaacaactaagcttaagcatgctagatggaagtaattagtaa

SEQ ID NO: 3664 - DNA, 827 bp, Cannabis sativa
gattagattagattaaatgggtctgtgtgtgtgtgggggggggtattggggttgttttcatttcgtgaagtgcgttggcaaagtgtgagaaagagagtgtgaaacggaccttacgtaccctttgaacaaccctcctcctctattctctctattctcttttcaatctaattttgccacttttccgttatttgttttctcaactcttttccttttgcttaatttgtgtgtgttcctaacccaatttactaaaactcttttttttttattaaaagaaaaaaaaaaaaaaaaggaaattaagaagagagagtaaaaacttattttttttagtgataaatttgagaaaaaaaaataacaactaaatatacaacacaaattatcccattccaactagatgagtgctataaatatagataccatttatttgatcagtggttaaaaactaaagaaagattaataggttataggactaattcacagttactgttctattgggtatccgtttgactcattaatctaataagctaatatatatatacagacatatatatatatataaaagccaaaccccacatagtcctcctctcctcttgcttcctctctacccttcaatcttctctctctctttcttttatggtttctctgacttgtggcctgtacggagagagatcaaccatggaagctgcacctcatgatcaagaggaagtcatgatgaccgccaccactgcagcctccaaagatcaacaagccctagtcgttaagggaaagcgaacaaaacgccaaaggccacagtcacccctcccttttgccgccgccatacccactaagaa

SEQ ID NO: 3665 - DNA, 798 bp, Cannabis sativa
tgacaacctaacaagaacaccctcttcccagcccaaactacaagttttgacaagccctcgacacaaataagaaataaataggaagaaagtgggcaaccttgtcttaaattgtgagttgaaacaacatggcccccagaagtaccattaatgatgaaagaaaactgaggacttttaatacttctaagaataaattcgcgccaaactgcatagaaccccatagcctccatcatagagttcaagaaagaccactctaccctatcataagtcttactcatatccaacttaacactcatccacaatttatcaccattattatgcttcttcatagaatagagagtctcaaatttcatgatggtattatcaaaaaactaatcgtccaggcacaaaggcacttcgagtcttagaaataactaaatgaatggttgctttgaactagaaagccaaggccttagtaatcactttgacattgcaaagactaatcaaacgatactcaaaaatcttggatggatgagtaactttaggaatgagaaccacatttgtcttttttaaatttcccatctcaacaccattattaagaacattcacacacaacaccaccacaaaattctttactgtctcccaattagactggtaaacactagcatgaaaaccatcaaggcatggcgccttggtaccaacaaagaacatttgaggtgtgtctatatttgggtgaaaatgatacactgtcagttattgtttctgctcatttgttttgtgcggagttagaaaaattgttgagagtgctaagagcccacaagc

SEQ ID NO: 3666 - DNA, 1589 bp, Cannabis sativa
tttttttttttttttggaaagagaagattatgtaatttttatttacatgggttgggtttgctttttttttttttttaatttatcatatatatatatataatataagagaaggtgagaaaaaattgacagcactgcaaactataatgtattattaaaatattatcaattatattcattttcatcaagttatttaaaggctcatattttataatatttttgattaaaagaaggagtagcaaacaaatataaataccctaaacttagttggcctattccgaaattcaacattttatttttctaattttacatttacaattaaataattagtatttttgctctttaaataatttgaacattttgccctttaaactttttgattgaataattagtatacggtttgttaataatactcctcgaaatattacttttacagtaacgtaatctttctatcacattttattcaattttattgtgaaacaaatgaagtgattgatggtaattaataaatagatgcaaattaaatatattcaccatttttacgttattgaataatagaataaaagacttttacttgtttataataatttatatttttagttttagttttttaatcattaaagtaaaaaatagtaaaagttatttaatttgcatcaatttatcaattactatttatcgcatctttcgttttacaataaaattaaatataatataatagaatgaccatgttaattgtaaaaattatatttcgatgagtattattaacgagctcttatactataggagcacaaattgttagtgtaaaagtttatgagaaaaaaatactacaaattattctttataatttgatacacacaactaatgcataaatttatacatatttaaaaaaaaaaaaatattcaatagtaaattacattaatttcatgttaaagtgaagataattacacaattctagtacaaataatatgaggtaaattttaatcatcattgttcaaaattcatggaacaatatacacatacatattatgtattgactcaacacatattttagggttataatttgtgacttgaaagaaataaaaaagtttaatgaagattgtaaagtatagttggaacaatattagtaatagtagaagtagtgagattccaagtctgaagaaagttggtgatgaagacaaataagctataaacatataatatataatagaattatatatatatattaatagagagattcttatctctttaaccaagccatttcatgccaacaaaaggcggtgcttccactcagttttgtctcttttacaacaatattaacatatgtattcattttggtcttttacactataaaagaataatatgtattttttttgctaaaaggggtactcaagaataatttaatttacacaaaattcagcaaagaattattaatagtgattgtactatacatagataaaaagtgattgtgcatgggaatttgattctctaaaattctaaatggcttttttgattttgtgtagtgaattttacttggttacaaagttttgcataaacatatataaaagaataattttgctccctatactataatc

SEQ ID NO: 3667 - DNA, 2198 bp, Cannabis sativa
ttaggaaatacctgcaacttgccacttaattccactagttggatatcatctttgaactcaatgttccagactgaacgccagctaccattgctatacattgtgtcaataagacttgcatcaatttcaaagttgaaactggtaaactaaaaggtgagttgaaatccaaaagtcctacataaaccacaacaacacaaatgtagtatgaaatatctcagtagtttttatgatttagttaatatcacaccagaagttctgtggactgtgtctagcagcggatatcaccaccacaagttcaaaatcagatcctggaccctccaaatcttttccactcccacagtaaactgagcagacaccttttggataagcttcactgatatatttcagaatttctgcgtcaagagcacacctgccaaataatagtatcaagcaccaataactaacagaaaactcttggtttgctgagtaaaatatgggagtgaagcttataaagcattaccgatattcctcaatatatggggagggaagttcctcatccattgcaggtctaacctctgtacaaacctgaatcaatttagcacattatgatagctttactaacacaaaagctgtagggcaacggaaactaaaatgacataatatcacaatagataaagtcttccactcttaaacttcatattgattcttctttgttatgtttatgctgcaatttctaacctaattttcaaacaaaaagttttaatagcagaacttacttgttttacatgatcaatgatagcaacttgagcagttctaggatcaaggaactcatttttaacgagctctccgaatgacgtaatgatcacctacatacgcaataggtcaaataagtggagatcaataccaaaaagattcactacattagaatttatatcaaattggaaagaaaaaaaaaaaagaaaaacctgccacagtttaggaatagaaatccaaaagcataaatgccaaacttttaacgttaaagattttctaaaactctcaaaatggggggaatactctcccactgcaacaaccaattggggtccaactcgaattcattatctcggtaattttaggtaggccattacattcgtttaaagaagtacaaaccattctcatctacttcattgatagcaataactacgttcaaaaccctcggcaaaaaagaaaaatcaccataaacaaaaagttgaaatttttcttagacattcaagtgtttctaagtacaattgaatcagattagaatatgaccaagtttcaccgcatcgccataactgaatttagaaacaaaaacgagttaatagagatgacgtaaaagtcgcgagattcatacgtctccggttcgatcaggcagttcgagggaaatcatgtgggatttgttgtagaccgggaacgactctgatgctgcctcctcgtacagttcatcgtcatccaatatcgcttttacatctgccacagaacaaaacccgcacgaaaacagaaagaggagaaattcaaaatgtgtatctcgtagtattattcatcaaatcattccacaaagtaaatacatttgagagtgaattgtttagagaaaattgacctttcgcaacgtattggatttcaccaggaggtgagttgaggaggaaccatttggctatatctttcttttgcgtctcgtttagctctgattcttctacgtccgccatgttttctcaaactcttggtcgtttgagcactctgatttgaacagaggagaggagaggagagagagagggagcaatgtaatatccgctctgttgtgaaatatttaaagcatcgcagccgttaaaactagtgggacccacttactgtcagtgaaccctccggaaatcaccgtaggggattttgttcttgccgtaactgatctgtaaaggtaaattggaatgattttgattggtggcccggtggtttacgtggaatttcgagtcaattcttcggatgatcttgaccgtttgtttcttggaccaaatcctaaatcttaattcactcgagattattagtattattattaggagttttttttttattattattaaattattgtattaataaataggatgaaacgaaaggaaggtagtataacaatacttcgattaaatattggtaaaatgttcagcactttcttttattttattaagaacgtaagttacgcctcgtctttttca

SEQ ID NO: 3668 - DNA, 973 bp, Cannabis sativa
gcataaaggaaaaagctaattaaaaagcaagtcgaaaaatgtttggagaaaaagaaagagaagaactatagagcaaaaaagattcgtgttactaaagccctgacttaagaacataataatcactttattaaataaacttaataattgattgtgttggatatatcatagttttgagtcatgtagctatagctatattagttttgagatagtagttgtagtagtagttctaccctttgtctatattacattttcataatatctcttcaaaaagatatatatatatatatatatatcaaaagtatagagattaggatggaaggagatagaagtagtgtggtagtggaactttatgccttttcttaaaaaaaataaagaaaaagaaaaatagaaagactagttatttttttcttcttcaaagtttgggaattgggagtagtttagagagacaaagagatctgataaagagatttggtccaagttgattgaaagagtaatgttggatagaatcatatgggatgtttgtttttgcaatataagccaattaaaagtatcaaatgtcaaaagtccacttcagtacactactactgctcataataattattaatttttttaattgtggggttagagttgggttcaaaagaaatcgtctaaaaatgacttttattatatatatatatatcctcccactctcctaattattaattatttaagattaagattatgcttttatttatctgagcaggttagttcttttttggggattcaaattcgttttaaacaaattatattacatcaatatgccactatcatagccatgagggtctcccacattagcttcttcttttacattgtcggccattttcttagggtcccactaaataattacatgatatatgcatatatatatatattgctagctagcttcttaggtgtataattgtaatagcctatagcctatatacacatatatata

SEQ ID NO: 3669 - DNA, 2762 bp, Cannabis sativa
agagagagagagagagaaaggctgaatttttggatttgaggagagaggggcattttggggttcagactaaaaaattagcatagttaaaaaaatttaagagggtggtataattaaacaccatgtgtattttttaagcataaaatatcaaatttcccataaaaataggatagaataacaatcttatgcgattttttctttcatatatttttaaagtagtatcaacctataaactcaaccaaataacgtctatttactccataattgtaagtggatttcttttaagagtttctcacaaaaatcactttttctataaaaagtactacataatcttttaggttaggcttgtcttttcttttcctttaaaaattttgaaattccttattttaataataccaaataatcaattaattaaatacaaaataataaagttcgtactgaaacaaatattttgtagctacaaactaagattatgtaactacagaccaacaaactagtaaataattgaagtacaaaaaaataaaaacacaaaagattttttatacgaagtattaataatccttgcaaagtgctactagtccaccagatgacgcataaaggtaagattcattagtaatgtgttgacttaaaaaatagtcaattaacacagagtcaagtaaatgataatgaaacaataatagatgataacgaagacaacgataataacatcaacaaatttttttatagaggttcaacctcaatttctacgttaataacttactctccttttagttgtattttctttagttctacaatcaagatcacaagaaaagttcaattgagtttcgtgagagcaaagagaattaaaaatatttctatatagttttctacttacaaatgaagttttgaaccctctctaaggaggttgaaggctcatatttatagtgaaaaaagaatcaatcagcaccccaatcaacatccttaatttctgggattggataagatcacatgtttgggatcttcaacattaaaatgaagatcttggtttggacttcaaatcttgggaaggcgaagagcacaggtgtatgctgcccagggtgtacctgtgctcttagaagcccttgggggtggagcgggagcataggtgtatgccaccgatgatatacttgtgctcggatcacctcggggagagcacatgtgtgtgccgcccaaggtatacttgtgctcccagaacagtgttttgttatcttatttccttcttgtgaagcgtgtcttgtctttcgagtaaaccctacacgcaatagttgttctgcggggttataagtgtactttagataacaattccttagtagcctaatggcaagccacccaagtgtattttttggggggaatcttcaagatgtttaaatgcttagcttaattctcgtgcttgatcttctatcagaaggtttcagattgtggaatgcaaaagataacttgatatcagaaaatgaaaccccaaaatctcccagggaacaaagtcattgatgagaacactaaggctaaagaaacaagtcaagttctagttggcccgatgacaaaggcgtgatccaagaaattcaaagaggaactcaacaaattagtcaataaaattctaaaataagaggagaccttggtcaacactgaaggagaacaatttaagttagttgggggacaatttaaagtgccttaaccgcggggcagtgtgtaatagcgtaggagactattttaattggtttaaggcataagcctttggtttttacaaagacattttactatgcctggtctgtggggcactacaatagatataagccctttgattttatttgcttgttttctcatgcatgataagattttatttcattttacttatttgttatacaattttaagggcttttgttttaggctgtttaaaggctttcggttctaacggccaaatcctcaaaccttagactttataaacttttaattgctctactggtctaggctattaaaacccttttggtattcacaaatttaagttaattaaataccccgacaacttaaatgcattgttaactcggtctcggaccatcgagtggtggcaaaggttagcgccttttgattgtctgaagtatttaactatttaaatagagtggtatacgacagatgtttgatagggatggttttctcgtgggtggtcaggctttcgcgttctaagtgtttcatgatgactgctctacacaaagctgggctttgggaaaagtggctgagggtattactgatttcagggattgtcctttgtttaagaaatgggctgaaactgtggtaacatttaggtgactttgccttgcctaaaattcatcaaatagagtctttttccactagggtcgtatataaactggggggcaggctgcacacactatggattttaggtagtaccctttaattaaggtagggctagaaacacataggagttcagacaaggcatccctgtttattccttgccaaaaatccaatagattaaacttaggaaacatgctgacattttgagaacgaaactaggcgagtttccttgggaaatttggctgaaaacgtatctcatttcaaggtttgcactatttttttgatcttgagaagggatttagaggagtctttcccttttggaaatttggctttaaacgcatctaatttcacgattgaatgcaaattaaattaaaaaatttgacatagataaataaaataaacaaacaagacacactgtaagcttaagagagcatacacaacta

SEQ ID NO: 3670 - DNA, 1366 bp, Cannabis sativa
ttttttttttttttttgaataaggcaaaaatcccggttaatttagttgaaaagtaaaatataattttgagtttgacaattatgttttattccaatatccctatctatttagcaagaaatgaagtactttttttttactttattttcaaatgaatgaagtgaagtccttttttctttttttctttttttttttaaaggatgaaagtcacgaagtaatttgatcagtctagaaattatatccttatcatatcaaatttgttttcgtagatacctaattttatatctatactcgttcatttcagcagtcaatagtagaattttaaccattatttttaaggtaaaaaaaggcatagattaattttaactttaataggtggcactatagcttaaaaataattcaatgcaagtatgtatatcattcattcaatagcacgagaaaaatgttagtgtatcgctaatgttttgtactatttaaaatcgtatattattagtataaacagcctaaaataactaaggaacaaacgtgtagctggagcaagccacaatatcatagctctatcttaagataaggccatctttgctaaactatgagctaatatggtattgtgatctctcttaccatgagtattaaacgaataatagtaagacttacaaatattattctttaataaagattatataaatattaatagagaccaataacaatcagagtagctcttacaattattataaatattattctttataaacaatctaaatgacctaaacgaaatatcctaaccaccaccattaaatatatagtggctgttggggatttctcaaaattcaacaccaagattatataatattttaaattaatggacagtgggcggtgtacttgaatccttgttgataaatcgggttagctagggttgtctattgtaatcaatggacaaggcattccatatgtatgtatagtagtcattctatttcattatattgccaatagagacaatcaatcatttcctttctttcaaacacagctcctatatttaattgagaaacgagttaaaaggcactagtgatgtttagtactctcttatgtgttaatatcgctattaatctaactaagtaccgagttccatataatttactataataacttttaagaagtatcattaaccaatcacaagactatatctagaggtactaaacagtactaatacccaataacaatcctctatttaattatgttttaccattttatattttagtaaaatgaaagagaatgactactatgcattaggaccaaacattttgatcgagtttgatcttgatctgactagctcaacttgaaaattttaaaaaacctgttctctttaggcggg

SEQ ID NO: 3671 - DNA, 770 bp, Cannabis sativa
gtttccaaatgttgaacctttattttgttttatttttggttatttatattatatatataagaatttactgccaaaaatgcagactttgaatttaaggagaagattttggagcttctgaattaattcaggaccaaagtagacgccaaagatgagtggatttcaagagtcgtaatttatgatgcaatggtttatttaatttgtatttttttagtatgactctaagaattcatttggaattaaattcagtctaaatttttcaataaataaatagatagtaaatacagataaaaatgggtgaaaaagataagataattatttgggaaattgaggcagaagaaagaagtaatatactaacatggtacgagacaggtcatagttgacctaagccaccacattaaggtgcaaaaaataaattgaaatacttttaatcaatcatacgcaaattatgccaatgtctaatgtatataatattaaataataataataataatcaatcaaaaatttcacccactaatcttgatttaattttattccattcatgtaatgatatgaaattgaatcacatatttttcacttatagttcatgaatgataatcctaataaatgtgtagtgttgactattatagtaagatgatttataataagatctttttcaaagaagatacaaatttgtgatttattgttaaaatataatttatttttgtaaaaagtttgttatgtcaaaaattgatctaacttcgtcaggtaatataacaaaaattaatttaaat

SEQ ID NO: 3672 - DNA, 1840 bp, Cannabis sativa
tgttctttcacatatcttttaagactaatcacaaagttctcaggtaatgtagtggttgatgatgctgtatcaatgattgcatcaaatcctgtatcaccacctttatttacaaaaatatagtgtgcaaaaactatatggtctacatgtactctataattaccaccttcattaatcttaagaggtgtccactttcctaacatttctataccataaccatggtcaccattgccaatgcgtaattggctaaaactattttgtgtatttgtcaagtctcctatacaataagaaaatgatgatcctaagttatataggaaagaatttctttcatatctaaaaccaaacataccattaaatttactagtgccagaatattctactttatgtgcacaaccgaatagtttttcagttactatctccactccaccatcacttgttggcaaagtgaaagactccgtaccatatattccacttgcattgagtccacttccataatttgtgcgaaaaccacatggatatgggtcatctggatcttcacaagaaaaagggcacaaataatcaccacacaaaactcttttataactggctgaaagattttggtcgaataactgcggtgtaggacaattattgcatggagcgcaagaaatccatatcaatttacttccagtatcaaaaattactagttgtggaacaggtggtatgccaatagtaaggttgatgaaaactaagtattcatcgctcgggaaaaggtcagttaggatatcgcgatcgcctggataaactttagtttgtatagaggtatcgattgaatgggaatgaattaggttgaaactagtataagatttttgtaatcttctggatataactggtgaagagaaatgtaaaatattgaaaagtaagcaaaaagttaagaaaaatgttacttccattgtgaaaattgtatatgatatattcaattatgataataaatgtattttcacttgaaaaaaatgacatgtatttatatatggtgttgaattataagtagttgatgagtaagttttacattcatttgaaattgtaatagtttggttacctaacaacttgagtactaacctatacgtgactaattaacataggtaattactagtttgctttataaaggaggagtttggatgttattataagtagtaattaggttttacacacatttgaagtgtacatatatatagtgtgatactaaagccagttgaatgatgtaggtaaaatcttgtttttggtttatttctaaattaaagtgatataaactaaataaaaaatatatttaaattatcagagattggctttcgaggccttctcacagccttcctttgtgacagaattttgaatgttttggtcatggttgctgtttttgtgcagcttattgttgtattttttggctgttttgaataaggatccttttcttgttaagaaaaaaatctttaaaattttgtgacataaataactaatatgttggttttctttaacagtttaattacctaaaaaagaacattaaataattagaaaaatcaagaaaaagctaaataatactaaaattaaaaaaggacaatgacattcttaaagatgaagaagagaatgtaaatactgtttttgtgattataatttttataaaatatttttttaaaaaaaaaacattattaataattatttatattaaacatatgagtacatttgacatattttaacttaattagtatctcttggggcaaagaacttctcctgtcaggtattcgcagatcagttggtgatggtaccacaatctccatcttcaatgatactttgggttccagggtatggtaaactt

SEQ ID NO: 3673 - DNA, 932 bp, Cannabis sativa
gtttaccgggcccaccaacaccgacgacggaagcaggagtgggcctggcgtggacaacgacgagcttgaaaggatgatttgggccgaaaccaacaaaataacggtccaaagtccactctaaggcataaaagctaagcttgctatcgtataggcccataaccataactggtttttccttactcaccataactactggtttttctttctcaactctcaacagttttattaccaacagaaatattctgttattaccgaacatttctgttggtatttatagttttgaattaggacattatgtacggtggatatggccacttacttaatggtatgttaatggacggtgatgatgatttttggtggggttgattgaatgcactgcgattatggtggtgtggtggtccactcaattggtcctaatggcttctctgactcggtctaatctctaacaatggtggggaattgtacggctccacttatgatgtgattagaaaatagtgatacatattttgttgaggcatatatagtggttggagactataaagctgatccttaaaattgttgtatcaatatatcattaattaaaactttttttttagataattgatcataactttttggcatccaagcatttagagtaaacccattaaagaactagtggatgaagtgttttgtttatttatcccaaagtagagtcaatgaaaatcattaagggattggacgttaaatttattgtactaagtgaaatattaaaatttgtaaaatacttaaataaaacaattataatagtggtttatggttgcaaaatatagtcgacgatcattttactaagaaaaataaaagattattttgccaaaagctcaacttggactacttattatatttaatttgatttgtaatctgtattcaaaaactacaaattaaatcaaggatta

SEQ ID NO: 3674 - DNA, 1413 bp, Cannabis sativa
actaccatattatttggaaattatatttggttgcccttaaattcaccttgtgtttagctttgaatttgaaggtagttagcagttggtctattataactctcttatgaagaaaaaaagggaaaaattgttggctaattccttttattagctcaaactggaaatcttgaaaaagaagtaaaacaaatattcttggtgggaaaaaactttactttctctttttcatttgaagaaatttaattgttgatatgtcaggtggagctgtttaaacatcctcatatgctgcttttgcaaataagaaactccatctttaagcttccggggggtcggttaagacctggagaatcaggtaaatcatatggcgactggctttggtatgttcaaaatcttaattaggatttactaacataaatgtttgactctcttcagagattaatggattgcaacgcaagttgtctaggaagctgtcggggaacgaaaatagtgatggtacagaatgggaggtataacaccataattttttcttttacacatatcatattaatgtttcttattatctcaaaaactgaatacaattgtcaatttgtcatgtcatgtttaggttggagaattccttggaaagtggtggaggccggactttgaaacattactctatccatacttgtcacataatattaaaaagcctaaggtacttaattgctcttctcagtcatgtattttgcttcaagttctgatcagtgttagcaaaagctcttatatatgtttctctttgtataggaatgcacaaaactttaccttgtaaagttgcctgaaagtcgagagtttattgtaccgaaaaatctcaaattgcttgcggttcctttgtgccagattcatgaaaatcacaaggtaaccaaccaaacaaactacttttactatgcttctaagctcatgagatctaatttgctcttcttatcctaatttctaaatattcaagttaagtacttgtgtttcgtgtgcatggtactaactcatgtcatatgtcttctttatttcttttgatgttcttgctgttgtgttatgtagacatatggacagataatatcaggggtcccacaattgttatccaaattctccttcaacattatggaaacttaataactaagacacttttttcaagaaaaaaaactaagacacagagacgtatatatatgtgtgtgtttgtgtctgttgtatgatattgagtgagcgagtgagtttttaccttatataccttggtttcagcctttcagggaatctttgattatacatgtaaatttctttatgggaaaacgacaagtgagttgtattattttgtaagtttttttttttttttttccttttggaacaatttattttgtactattgtactccattaataataaagatttttttttt

SEQ ID NO: 3675 - DNA, 1307 bp, Cannabis sativa
atgttcgtagcttatgtttattctgaaaaatctttggtttttctttgttactatggggtgaaggaagcacctgttcccgaggtttgtgaagcttttaaagtggccagaggcatggtgcaagcattacaagagaatgctggtaggtttgcatctatggtcactgtattttgtgagaggcttggatggcaggatcttgaaggtctggttggcaagtttcaaaatcgtgtttcatttggagtgagagcagagattgtcgagctcactactattccgtatgttaaggttgttactcctctctttctgactttcttctacccttttttcggtgtgaaatttgctactaagagtacttctcactgtcatttgccttttcactgttgcccatatttttatttggcttttagggttctcgagctagagctctttacaaagctggcttgcgtacacctttgtcaattgctgaagcatctgttgctgagattgtcaaagctcttttcgaaaagtcttcatgggctggacaaggtaatgattggaaacccttattgctcagagttttttatattagttagcataagttaagaacccttgtgtatttggtcatatataggtccacttctttacgtctcccttattcagctgaaaaaaaaatgaaattcaattgttctaaaccagtgtaagactaaaaattttgttttgactttttacatgtctttaaaaatatctttgtaggagtgcagaaattgttactggggtttatttcatttttcttaatctttggtttcatgatcctcatattaagaagtttactattatcttataacgttcagctcaaagacggatacagctgggagtggcaaagaagatcaagaatggagcacgcaagatggttcttgaaaaggctgaagaggcaagagttgctgccttcgcagctttcaaatcactcggactcaatgttccacagtttccaggacaatcattgtcaactgctgcgggcaattcctatgagcaaggtggtgctgcatcttctggtaatgatacgggcaatagcgctgttaatgtcgagcaagtggaacgtgcagctcagccatctgttcaagaaaccgtccattctgagaaagttgtgtctgcaagtgaagagaagataacaaagacactaaatacgagtgttgtggcttttgaggtaaattcaaatgctgtcgtgcctcggaagtttggtctcgatgaatctacagtcttaactgaacaacctgtcacccttcaaactgagcatgaagctactgtttctcattccaaagatgataatttga

SEQ ID NO: 3676 - DNA, 1395 bp, Cannabis sativa
cgagtattgacctggatcagttagccatcccagtggtagcatatccaagtcgggccatgacttcccaagcaatccctttgctcctaccatattagaggttgaaaagtccctgatagcgaacaggatgaataatgttacaggctaatcactaaactttagttctttccttggaagaagaaaccgaatgggaaagagataactctgctctgaaatcaagttttgaacaggaaaactcgtcacctggtaacatcaaaatgggatgcaacatctcgccatgtatcccaatcatccccagttatccgatacatgtttaccaatccactcacagccttggccatggcaggtgtcacactggttccaggagacaaagaatacagtataggacgatcaagttccttcagaacctgcacaagcaaatgaatagaaaatattggtagtgatgacattactaaagacaaagaatactaaagcaggctagcttacctctgaaacaaagcttatttcattcacatccaaatcatcaccaaatacacagtcatgtttcactgaatgaaaaagagaagtaaatatcaagataagtttaagtgatgctaattaattatgtcatagttctgtatgtatatcatttcagtgaaaccaataatgaagataagtttcattcatcagaaggtcaaattaccgaaatcaacaccccactcggcatactgttcatataatgacctgaggaaggcccttccggcccctgacttggtattcacactcatgaaaccatgtgacatccatgcacaagccctttccttgatacctatatcttttgcagtccatttttttccaccttcttcataggtgattccctgaaattaatagaaagtgaaagctcaagcattgttaccgctttccaaagagtttacggttgctccacaaaccaaatgatttggtgttgtgttagctaatgattcttacaacagataaactacaatgaataatggatcattgacccattgcagtacaattcagactaaaggtaagagtttttaccttggttgtgtccaagataggagtatttgcatttacagcctgtgtactaattcccctcatgacatgaattccaaacttcaaacccatgctatgtactttcttagctacttcactgaacccttttccccctttggaagaaggccacctaactggatcagggatcattctaccccatttgtcaattacatcaaatccaagtgagtctacataagcccccggtacctttcttctataccaaagataatccacaaccacatactgcattcattgcaagggaaaatgaaagcactgtcaaaataaatatctctcactctcttacagacaaaacaaatataaacaaataatcaatataggtaa

SEQ ID NO: 3677 - DNA, 665 bp, Cannabis sativa
ttttagtgtttttcttttattaaaggctggaacatggaaggtctcttcaagcttcaaggccacactggtggccccttacagttgaaaacacatttatagttccttgaacctttaaaactctctggttctaaagctggtgagctcattaattggccggttcctaatctactcatttctcatttaagaatttttttttgttattattattcatttcattttctttagagaagaaaaaaaaacagccaatgaaaatgaatagttaacatcatgatatataaatatagatataactcagagattgttggatttgtgttatattatttagataatactgtataatgttagattcattagtacaaattacttttggtatcaattttaaattgaaacttatactatatagtgttagctcatagttacgacatttattttactaacataaaatcagaattttggtgctggttttgaatcgacactaatgagttttagtgtcgttcaccaatacttaaagtacacattctatttttacgtttagtattagtttagaaatgacactagtgggttggttgtcctcattagtgttggttaggaatcgacgcttcagaagtgtttttagattatattttttttcattactttataattgacgcttaaaatatttttag

SEQ ID NO: 3678 - DNA, 1523 bp, Cannabis sativa
tgctgcagaacatagatagaatggaaataattatcaagaattcggaagtttcaaatctaagttcagtagctgtttgagacgctaaacttggccaattgattgtcatcatttttgttttatactcaaacagcagttttaaaatagttgatgtggatgcggctctctgatgtagaaagtagtagacattgcataatgttttttggttttgatgtcatcatcaattcgttgtccattgaaatgatgatgctgtccttttaagatttttttactcgggatttggtgttttaactgtcctacatgtttacgtaaatccattacaagatagcacactagttctaatagctggtccgattccagaattataaactttcggaatgtcatccaagtttttgttcttgtttcttcttttttctttctttctcattttaagtttatctttgcttaactacttgagttggtttccttactttatcgtattcatacagtttttgttccttctatttgtggtttcttatgaaggaccaacattttgcatttattttcttctttcgatcaactattttagaaatcactgccttttgattttcaattttttttttcttttataggttacatctttagcagtcggtgttagaaactctcctctagacgaaaacagcagagtgatctttgaacctcatatcatgactcatgaggtatgttttatactttatacattttgcttcttcgttttttgtttgtttatttgtatcctctggtgctacttccttatgcatatatttattgctactatgggagataagttttgtatgaatattggttgtatcattttgaaatcactaattcaacccgttcaagagtgtatgaagttaaaaaatgatttttcattgatttatcagtgggtagggtcattgatattgatagtatatcgaaaataaggaatgttgtagtcacaagagggttaagtcaaggcggtgaggttcatagtttgcttccttgaggttgggttcaattctatactgatatttactgagcaattgctggagttttgtgactcaaggagtgtagttaaggatttggcaagaggattgatattgagaaaaaagaaaaagaaaaaaaatattttgctgcgcaagtgaggaatagaaaatataaagcggtgcaaggttgaaagtggagagaggatcctaactcctaagatagttgaagtgagttaatgttttctttagtaattccattatgaactggagttgcattgagttgaggaatcttagtatgaaaaagcaataagaaaaggagaagagatatggaaatataatcactaatgaagaatacctataaagcttcgaagcggggtgtaaggaactaaaactgacacatacagatatagatggactggtacttgcttttgagccatatagccagtataatattatcccattacttgataaagtctaaattctaatagccattaattgtcctggaaatgtcatacctttccttttcatgtccttaatatctct

SEQ ID NO: 3679 - DNA, 1649 bp, Cannabis sativa
  modified_base (423)..(429): a, c, t, g, unknown or other
tatatatgtatatatattgtgatgatcatacctatctagaccaaatatatatatgtatagatatataatgatgatatatgtatggttcttgatccattatggtcccaaccgaccaatctatgaagtacacgtgagagtgttaacactgtatatgatgatgatttatatatatatataaactttttaatgggtcctatccatttatatatatatatacaatattaattaatcaaagatgtttattatgcttttccttgttgccattcctgcatatactaacacttttttttttattattattatggcttctttgcttgcctatgcaataaaataatagcaatctatctgaattattgccctttgcaaattcattcattcattcattcttagtgttatatatgatcaattattattattattatnnnnnnnattattattattattgttattatcccagttgcccaaacctataaccctaccatactataaatatataaaaaaaattcatatttgttatgcatatatataccttttattttttcttagtgttttggttttgagctttgagtggcttaaatgatgaccaaaaacttcaatcccacaagggattataatgggttatttcataaatactcaaaaataataaaaagtttacatttttacaaatttacagcttttttcataaaaatataaaatattaattttatgttattttcacattgctactacatagaaataagcatgtgaaaaaacagaatttataaaaaggtaaacaaaaatagtataaaaaaagtcaaattttaaatagattgtgtaaattttctaatgtaatatttaagaacaaagaagaaagatgagatcttgatcttgatggtatatatatgtagatgaaatatagaattatatatatgtgtttatatgaatatggctaatagaggaagtaatttaccaaaataaattttgaggacagagaagccattttcaatgattgatgaaagtgtaatatgctatcacctctttcattcaaagcaataaaggactttattactttggttaaagctaaagggcatttttgtcaaaaataaaaaaataaagaaacaaagcatcaaactttactctttttttttcctcttctccctctaatctaaactttaaatttctgttatccaacggcctttttcattttcattataatttttaacttcaaaacattttctcattcttctttcttgctttttctttaaagaaagacttgttggctctccacaccattttctcttcttttcccagcaaaaattttcaatcttgttcaatctcatcttcttctcacatagaaaagaaaagagaaaagagaaaaagcttcaaccttgtatttcaagactctttttttttttcctctttagtaagatgtttgattccttaacacccttatacacacttgaagtttctcatattccactactcactttctttcactttcccggaaaatccattcttgcccaaatgcttaaatcctttcctctttccttagattgcttcaaaatccaattttcttaagccaaaacacaaaaaaaatacaaacatggtctttttctttgtctatacactttactctcttctactcattactacttcttcttcttcttctt

SEQ ID NO: 3680 - DNA, 861 bp, Cannabis sativa
ataccatatttagcgatgagcatcgcaaagaaatgcttcgttatatgtattatcatcaggtacataaatactaatgagacaattattaatgtataattttattggaaaaatactacttataccacttattagagaaattgtagcttgaatttcttatatgactgtatataatagttatagcacttcacctatttagaaagaaaaaataataataatataggttgtgttataacacttttttaatttgtttttttatttaaattataaaagtaaaaacatttttcaaaatcatgttttattttcactttttacttttttaattgagaatcaaaattttgaaaacaaaaataagtcactttcaaaataaatttaaacagttcctttttttcttaatcaatattttggactccgactctaacctaaacttttcaaactgtaccctggacacggacctggactcagaccccagagcgcgaccctaaccctagacctttgaccctgaccccaaccccaccgaactctgactcggacccttactctgacgcgaatctacatcgaaaactagaccccggacccagaaccccgaacccgaacccaggtgccgaaccccaaacccttgactagaacccaggacccgaacctgaaccccaaccccggaccccatatccaaactttggatcccaaacctcgcacccggaactagactctgactcaaactcgaaacccaacctgatccaaaccttagctcggaaaatcgaccccaacgccagacctggacctgatcctagtcccacggccccaaacctggaccctagaccccgaccccatccctagctaacttggaccctggaccccgacccc

SEQ ID NO: 3681 - DNA, 1184 bp, Cannabis sativa
gttagatgctgggctacatactccgggggacttgcgaatgacgctaccactgcctccggatacagaggaacttgacgcggctgttgattgtttattctcaagacaacattcctccaatttcacatcagccatatccttctacacttatctccaaaacccaaaatcctataaataaataaaacgcatatatactcatactaacaaaccacatacacaaatcttaacagcaaacgaattataagaacaagacctcaaaaagaaaaaagaacacagctttctctgaattcccaaacccagataacaacaacagaaaaagagtaggacccagatcttagtatcagttattagatcgattaaggtagaacaaaatcaaaatcacatccaataaacaaagaattaaagggtttatgatcacgaagcacgagagcccactcagtagttcatataaattaaaggtacttccgtgccaagaaaacgaagaaacgttatagaaaacagtgaaactgattcaattcaaacaaaattctgaattttccaggtgaagaaaaaaaaaagtacctgttccggtgaaggtgtggcgggaatcgaactgaagctcatcccttcaaaccagaaatttcaaacccaatacgaaacccttccctgaaacattaagacgaagaagaagaagaagatgaagaaggaaagaagaaaaaatctactctgtttcgaaaaattctcgcccgttgaaactaagagagagaaagacgaagggagaagtaaaaggaaagattattatatttaatatttatatatataacgaatatataatcaccgacgtctccgttaattaccgttaccgattccttttttggttttgtggcatttcggaaaccctataagttagcggacgttaaatatgaaaagtttgatgggggagacaaaagtttaaacctcaaacggcactcttatatggtccacttcgttaaatgtcgaacatgttttgagccttggatgccaggccatcgcttcccgggcttttctaaaccgttcgatttattgtaaatgctcgtgatttatacctctgaaacagaaagctccgccttaactaattcaactagtgggcagttaacaataaatattaaagttcgtcccttcacctcaacggctaggattgaaatttgttcatgctctacgattaatcg

SEQ ID NO: 3682 - DNA, 1229 bp, Cannabis sativa
aaaaaaaaaagaaataccttgaataaacaatcatgcggatacaaatccatcatgttaggatcaatgtagtctttcatgtttgccatactcaccgagtcgggtgcattctttagagctcctaacatctgaaatttcaacaaatattagaaagatttactaaataaaattgagggtggtaatgaaaataaatacttaatttcaggaagatagtcgagaatgtttgcagtacttacaatggataccagagaacgcctttcaggatttttattgctcatgccttctgttcgaatagtggcctcttttccagatataatctcaaaaagaacaactccaaaagcataaacatcacttttagccgtagcacgaccatcacttaaatatctgcacgtaaaatgataaattaagcaatttgaactacttttgaagaacttgttaattacaaaaatcgcgagaactatgagcaaattaacttactctggagctagataaccaaatgtaccaacaacttttgttgttgtggcttccccttcatttgttatccctacaagttttgccaacccaaaatctgaaatctaaatacagagagaagaaatgttcagcgcgatccacacaacttcaatatcctaaaaacgctatcaatgagttccagaaagttagaacctttgctctaaaggtgccatcaagcaaaatgttgcttgttttgatatcccggtgaacataatgtgttttagtgtgttcatgtatgtactcaagacctctagcagcatcaagtgcaatctgaactctcataatccaggacagagatgtatgacctgtaattaattgttcaaggggttgatacaataaactattgttggctcaatcaaatacatagagaagtttgaattttcatgaatcaaaatgacaagtaattttgacaggaaatgcaaacattcagcaagctgagatagagatttcgtgtaaattttttataattattctattatcatttttttaagatctccctaaataagtaaaattctccaccaacttcttcagaaactttcaataaacaagtgcgattgtttcaaattttaatgaaattttgaagcatcttattttatcttacccatttacaagatttggaaatatattttctcctgaaagtaaactatccaatcatttacttctcttcttcaactttttagaagtaaaaggaaaaagttatgcaatacgagccctactcgcta

SEQ ID NO: 3683 - DNA, 1175 bp, Cannabis sativa
ttgcacttactacaacccatcggattagcccatatcatggagacggcccaaagaattgatgaaggtacccattacttcaacactggccaaactgtgagaaccaacaaacccaacatgagccacataaccccaatcagacaaagtcctcaacagttcactacccgctccattacagccggtcccatttctaccataccatccccaaccccggcgacggccacgggaaaaccaccaaccatgcgccggatgtcggaaactgagtaccaagagaagagagcgaagggcctgtgttttaaatgtgacaagaaataccatcgcgggcatgaatgcgagcagagattactacaagtgttactcttcgcggatgaggatgaacccctacctgcagtggaatcgccaccactttctccagcaggtgatgacattgaagggaccaaagaaaccttggcgactctttccctaaactccctggtgggaatatcatcggctcacaccatgaaattggccgggaagattggtcagcaaaccgtggcagtcttaatcgacagtggggcgacccataacttcatctctcgggaaatcgtggaagctacaggtataccaattactcaaactaatggttatggcattcttttgggtacgggagatcgggttaaggctgagggggtgtgctcacaagtgactttagagctcggggctcttcgtgtggtgaccgattttttgccattagagttgggaggggctgatgttatattaggggtgaaatggctcgagactttgggtaatatgcaagttaactggaggacaatggtgatgaagttcgaacgggatggcacttgggtcactttgcaaggggacccgagcctttgtaaatctcaaatctctcttaaggcaatggttcataccgtggaacaaaccggctacgggttttggattcctcttgggtcacttaactctcaagaacagaatcatgagatagtgccaagggaattggaaggattacttgagaaatatgagcccgtgtttcacatgcctccggggctgcctcctaagcgaactcaagagcaccgaatcaccttgaaggaaggggtaggaccgatctcagtccgtccctaccggtatgcccaaactcagaaagatgaaattgagaaaatggttcgtgacatgctccaatc

SEQ ID NO: 3684 - DNA, 1048 bp, Cannabis sativa
tgcattacacaagtgcgttgactaaaattggtaaggggtgctaattaaataaagagaaatgctggtacattggtatttagcactctactacgtgtcaatattgttattggttcaactaagtatccggtctcatatagtttaatataataattgttaaagaatatcgttaaccaatcgcaagacgactacgtgtagaaagtactaggcaccaataggcgcaataggaataatgttcttaaatagagtatatttattaatgaatttttacctgcatgttaaatgcaaccatttgagctccgtgcatccatgctagcataggattataattagaagaatcgaaacgcgtaccctttgggtacactctcaaaaaattcctctgagtaaacctaattaattaacccataattaattatactcaataaatatatacaaatatattaagtcaaatttttttataattttaattacctgacaatatcagctccgtgatgctttattgcattctcaagctcttgctcgctcaagctaagccgtttgatcttaacagaagagttaagatcagccaaccaagtgtttagttcacctttgggtttccctgcatggatagcaattagctgcttgtactcaggaacaacattttcttcttcatcgtagtcttgatcatcatcatatgtatcatcgtcctcatcgttctgattatgatcaccattattattattattatagtaactggtgtcatcttcatctttttcattatcatcatcatcatatgatggtttgtagtttttctttgatttagtactactaccaccactatccacttgatgttgatgatgatgagattcatgatactctggtggcttagtggaaatcataacccttttcttcaacgctgcaggcgacgggaattcctctatataatctgatgctgggcaatacagcatggctccgaacgtcgatgtcaccatctaaaaaacatgattgaataatattataagatatcatgctaaaaacacaaatgatcatgttataagatgaggatatatta

SEQ ID NO: 3685 - DNA, 1290 bp, Cannabis sativa
ttgagccttttctcgggaacccaacagccaatgtgataaaaatacaaaaaaaaatggcatttttaaaaaattaaaattcatttgagctcagaaatgacattcgggctcagccctataacatccgaacccgaccacgcccaacccgcgcatacccgacccgaaacccgccatacccgaccacctgaaaaccgagtttggttatgcatttccaaaacccgaacccgactacccgaaaacccaaaaatctgacccgtgtgcagccctaatcggaagtttacgatgacatagtcgtgagtcaagactcctgataccatgtagagaaatagagcaaggcagagagagacagagagatggcaaaagctgaattataattgataggacaaagcctttatatacagagtacaaagataataaactaagagaataactaccttaactaccacaacagaattaactaaaaactaactatatcgaaaataacaaaagttaattaatactgtttacactcttatgcctgtcacgaacaggatacaaggaatatcaatggttaagtgaaagaggaattgaaatccgcaaggagggatttcttaagcaaaatggtggccatttgcttcaagaaaaaagctcatataatggaagccaagagaaagcaaagaggagcttcaaagagcaaccaataaccataaacaaataaccaatgttgttttcttagtcaagcacggtatggagcagtctataaagggatgttacccgatggttacaccatagttgctgtgaacaagtcaaaagcaatggatggaaatcagattcaacaattcatcaacgaaatcctcattctatcatagattaaccacggaaacatagtgaaactactcgctattgtttagaagctgggacactcatatcacatccaaaacaaacagcatgaaccaaagttttcgtgggagaacagattaagcattgcatgtaatgttgcaggagctttatcacacatgcacttttcagctttaatgcctacttttcataggaacataaaatctttcaacatacttttggatgaaaagtacaatgcccaaatctcagatttggaacatcaagatcagtgccagaagacaaaacacacttgaccacagcagtacaaggaactttcgagtatttgaatccagagtactttcaatcaagcctttacaaacagaagtgatgttcacggtttctatgttacacttattgagttgctaacagtaaaaaacttcattttcttttgcgatagacaaagataagaatcaggtt

SEQ ID NO: 3686 - DNA, 599 bp, Cannabis sativa
ccgccgccatcgccgccatcaccaccacctcgtccggctacaatcatcctcggcaagtaccgattgatccgttatttaggccaaggaagttttgctaaggttatcgaggccaaacctttgagcaataacgatagcccaaacgtagccataaagatcttcaaacggaagaatctggatcccgaaatggagcctcgaatcatcgatgaagttgaagccatgcgccgccttcaccaccacccaaatataatcaaaatccatgaggtaatggccaccaagacctatatctaccttgtaatggagctcgccgaaaatggtgagcttttcaacaagatctgcggtggacgtaaattgaaggtgacgaaagtgtggcattattttcagcaactcgtctccgctctccgattctgccaccaaaacggcgtcgctcaccgagatgttaagcctcaaaacctcttcctcgacaaagcagggaatctcaaggtttccgatttcggtctctcagctttacccgatcggatccgcgacggtctactccacacggcttgtggtacgcccgcatacactgctccagagattttaactcggcgcggctacgacgg

SEQ ID NO: 3687 - DNA, 718 bp, Cannabis sativa
caaaacaacagagagaaacttaaaagagaagaagagagtagtacttaaagtgagaacaaaaggctacccaactaagactaaattaaaaactaagaaccccccaccactagaaaatattttcagacattgttccattcaaaataatagctattgatatatgtaaaagtcattcaaaagcccactggttctccctgcgaacctcttcctcttcctctggagtgaaatcattcttgatgttgaatgtcttcctgatctcctctggggtctttcccttgatcatatcagccacagtttggcatgtcaagtcaagcagattcttgatgttcaggtagtttgcagactgaaaaaacaaaacaatggcagatacataagaaaaggttagtgagaaattgcattcaattactcaataagtgacaatggaagatgaaacccaacaattaaagttgcataagtaacaaatacacatcaccttcactgaaacttggatctagtaagccataatcacttttactctcattacccaaaactttttacataaagaaaagaacatacaagtataaaatctgtcaagaaagccatataaatgtggtaatgaaaacacatcaccaaaaagattcatactacatgaatgaaaacccctaaaattcaaccaaaacaaacacatcacaacaaaacacgaatttacgtataaatacccatcagaaatgaaagcaaatta

SEQ ID NO: 3688 - DNA, 1108 bp, Cannabis sativa
ctggtaaaataaattcaaacaagtggctcaaaatataaatttgcagataggaagttttcctctcaaatatttggggattccccttagaccaaccaagtggagattagaagtctgtggtattattctgaaaaagttgaaagaaagattgatttcttgggcaaacaaacttttctcttttacaggtagggtgcaacttattcaaactaccttgttgggtctaaggaattattggatgagggtgttccttctcccccaaagtgtgataaaagaaattgagaaaatttttcgtgattttctttggggtttgaaggagaatcgacctaaagtttatttggctagttgggaaaaggtgtatctcccgaaagcttttggtggtttggggtttaaaaaaggcaccaaatggaacacaacttctcttgctagattcatttgggatcttatgaataagaaggatttgctctgggtttaatgggctaatgcagtgtatctcaaagggactgatatctggagttataatctgaaattgaacacaagttggtattggaagaaattgtgtcaggtaagaaaatgtttttctcttgctaagataacagttgctggaggagggggaaaatttagagcctcaaagctctataattcgatgatacatcaccctcctgaccatgcagcagagcaatttagtgtgggctcaatgtgccaaaacagggttttattttgtggcaagctgctcactcaaaccttctcacaagagatatgttgagtaaatttcatatttcagccgatctgagatgtgttgtttgtggaaataatcttgaagccattagcatatttttttcaattgcaggttgccaagtctggtcctagtcgaagtgttcagttggttggggttcaaaggttcgtcgaagacttatgagagctggaacaattggctccatgctagtcattcaagcttgattgggaagattttggtagttatatttgctgccacaatctatcatctttggaggaatagaaacaattgtatttttttgaactactcaaatactattaattgtatagttagcaaaattaaaaaagatgttaaatacagacaggggcggagccagaa

SEQ ID NO: 3689 - DNA, 931 bp, Cannabis sativa
agaaaagtaaatatatatatatatcttaaaatttaaaagatatatgtcaagtcagcgctgactctaagttgaaataggtcataaataaaagaatttttttgaatttttactgtaaatataaatggtatttttaaaaattattaaaaaatatgtatatttttcaaaaagtattttttatatgggccctaaaatgagtgggttctaaacacaaacttagtccacctatgaagggtcggccctgtaacaagtttaaaaaaaaaacattatattggaaaactatagttgtgaatgaaacttgaactaaaatacacaaggtttccttgaattaacctctctttgatctttcaatactcaaatcttcttaccaccatttttcatataatttatttttcaaaaacaacgtaatgatcgatatattcaagttatatcctttcaaaatttaatatttctaatattagatactaatgacgcctaactattaagagttatgtagcgttttacaaataattaattatttttcatattaattattaaattaaaatttatcgaacttgatattgaatataattacaaatggtattgggcattactattttcctttaatatttctcattagaatacagtgaaactggttcgaccgatatagtttttattatttgattatacttcctgtattgtagagatgtgaaattttgttctcttaatattattttgtattctccacccttttttggactatttatttttttttcgtttagtttgttttgttgtcatgtgaattttggattgtactcctacgtaaataattattactatgtccccttaatttatttttctacttactatttcatataggtggcataacatgtttgtcattgtttgccggttaaatagtttttttaaccacttgctcatgtttcgaagaattatt

SEQ ID NO: 3690 - DNA, 1382 bp, Cannabis sativa
cattaatttaatttatgtaaatacattacgtactcgattagcagaaccatcaaaaagagcagaattatcacgccattgaactctttggttaggaggaagctttccggagcgttgaccttcatagaacaagagtgacttagttagggcttctccataatccaaacactctattccttcaaaaaacactaacaacactactactattactaacactctcatattcatcttaacactcttcatcattttatttttttaattgtgtactcttgtgagtgtagtattggaactatatatataggtagaatagataattgtggtttcaccattctctaattaaaatgttgtcatttaattctgataattaatatgggaatctattgattaaataggttaaatgttttttccttattttgattattatcactcctacatgcatgtgtattgtgtaataaaaacatttgactttttgtttatttttaattctcattaattaaatattaatatgttctaccgtttaaattaagaaaaagactaattgtatagaaataaattaaatgcattcattaattataggctgaaataatattatatcttcttgtgatttatttagaaagatatttatggttaaaaagtcttgctaatttcttttgcacgtgtcaccacattataactttcttttgtttttttctttttttttagtctaataataataatccctaacactgaagtgagaaaaaaaaatggagatttttcttactaatttcaccaaaaaaaaaaaactacgaaatctcttttttgaagaaataaaatttgtaattttgtaagatttagaataactgtaactatgtaattttaaaaaatcattaatttttcttttatctcactggttttttcattatttacaaatcaaaaaataaataataaggaaatctctttgtagatgaaaaataaaataaaatgtgtcattttattaaattttgaataattataattatatttttttaaaaaaaaaaaatctttaaagatatgttccttattttatttcaatctcacaaaatctttgttttgtataacatccaaacaagtactcctaaattccttacaaaaaaaatcaaatatacttctaaatttatgatttttttaggagaatggagataaaatatagttaaaagaaaatgctacatgaagtaaaagttttaacttatttttaatttttgaataattatataaagattttctttaatgattttttttcgttccttttaaagtgttttgatgttattaaaaattaaaaaaattatttgtgagcaaaattaaaaatgatgtaaataatttcaattttaaaaaatacatttatagaaatacttttgagaaaagctaga

SEQ ID NO: 3691 - DNA, 945 bp, Cannabis sativa
tattaatataaatgcatgattttactttatatactatttaacatgcatgattttacagtgttgttgattttttgtttttgtgtttagtggagttagcattctctttaggttaggttcatggtttgtgcttatttgcttaatatgtatgcttcaaaacacaatagccgtgtaatttttgtagcctcttacaatatttatctgttttagactttagaatttgtagtcttcagcatatgtgtgctagctttcactaaagagagaaagatgtttaaagacacttgtaatttagtgtgcttagtctgattgactaaatttggcacctcaacaggtacctgagacactgccagaagatgttcttggcaagatgggtgctcccccaaagagcgatgtgcctatcattgaacccaaggatctttctgaggctgatggattacttcttggcttcccaacaagatttggaatgatggcttcacaatttaaagcattctttgatgctaccgggggtttgtggagaacacaagaactcgcaggcaaacctgcaggacttttctacagcactggatctcaaggaggtggacaagagactactgcgtaagcttacaattctcgacaaattatttttttatcatattctgtgagaccatcatttatacttttcacttcgagatataacattatgctgatcggtttggtttccatgtatgcagcttgacagccatcactcagctggttcaccatggaatggtgtttgtgcctattggatacacttttggagctgggatgttcgagatggagaatgtgaagggtggcagcccttatggctcaggaacttttgctggggatggcactagacagccatctgaactagagctacagcaagctttccatcaggggaagtactttgctggcattgctaagaagctaaagggaactgcttgatttcat

SEQ ID NO: 3692 - DNA, 521 bp, Cannabis sativa
actccccctcgagttgattctatcaaacagtcgaaatactctagtttggaggaaaaagcttcttatgaggataacagtcctgctgaataccaaaacgacagaatccctttcagcacctatgtcctttcttctaaagaaaagaggagagaaaccccgccttctgttgctagcagaaagtttagtgaaagtgagaaaaagcctgacagcgattcatctaaagaaagcaccctccctctgaaacagtcacaacagtccagtccccttccatcctttcttgcaagtaactttaaagcctcccctgttagagatgaaaggcacgtaaatttgaaggaaccaagtttagcctcgagttttaaagatgaaaagcaggtaagttcggaagaatcaattcctcaaccagtccatgataagaaagatgactcctcagatgaagacgcaaaaccccctcctttggctgggacaaatgtcatgaatatcataatggtatctgcagaatgtgctccatggtcaaaaacaggtat

SEQ ID NO: 3693 - DNA, 1437 bp, Cannabis sativa
aaaaaaaaaaaggtaataaattaattagggcatcaaaaataaaggttaatttgttattatttaaagaatttattcaagatgattatatagagatgaataggcaataagtatcagcacctttaaaagaaaaaataggtcagatcttgtctcatataattattctacttctagatgaaaaaatattaattaaataaaaaataatataaatttatataaattgattggataaaattaaatttaaaagctttgattggtttaatttatgtataatcaacgtggcacaacctatatatgctaataataagtgtattgatcattcatgggaatattatttaagaccaacttgaaattaatttggttatgatgatataaattcccttttgctttttttaaatataatttgttgttctttattttttatttctaaaattaatatcaagtaccttgaagtcaatttttttaattaaattgttctatatatattcttaaataaatataaataattttattgggtaaatgtataatacagagacgtgtttttggtacacctctagtggtttgacatttaagtgacaattttaatttaaatatttttcatgattttatatattaaatttatttaaaattattaataaatttttaaaaattttgagtagtataatgtcaaaaataatatttaaatatttgagttaatttttttttatacacataataagtaattgtcaactttatgtttggcattgtaaattaatttaaaattttaaaataggatttttttttatttttacactttaaattaatttttttttttgcattttacgaaaattcatataacaatcaatggagcaacctaaatcgcaatcaaaacctacatagcaacccacataaaaattaatggagcaactactgaagttaaattttttttaaaaaaatagtatataaagtaattctcttttaaaaatttataagtgagtctaaataaatacaatatatacgatcatgaaaaaaaaaatcgaattaaaaaattatactggattatgaaatagataaaataaactaccaaaactacccttgatgtaatacaaattttccaactttatttattcctttccttttatattgcacattaattttccttgagtaaatagacactatacaactttttagacattttgttattatttttatttatttaattatcatcataattaagcattaattatttagaataaaaattgctttaattagatgataagtaatgtaagtgtaggctatactaaagtcattatatgattctataaataaatagatatattatatgatgatagaataataatagtgttaggcataataatcaatagtaatggtattgagtattgtctttcattaattgttgaccatagttgtatgactcacccatcaataagccaaaaaaat

SEQ ID NO: 3694 - DNA, 770 bp, Cannabis sativa
cccccatacccaccactaaccacggtggtctccttcctttttcttttctttttcccttccttgccatgcctgctgcaatggatcctctctccaatgacttcaattccacactttcactcacaaaagaagaaagctctattcttacactgcctgacatcctttctaactcctcttcatcacaatctccctatatccttcttgcccgtgtactcactgaaaaaacaatctataagcctgctttttatgatcaaatggtcggtcattggaaaggaagattctctgtcacaataactgattccaaattcgagatgttctacattgctttgggttgtgaaggcgacaaacgtcaggtccttaataaagagccttggcactttcagaatcatctatcatcttatatgcgtcaggtgctctgcaaaatgtcacaaaggaggatatgattttcaccactttctgggttcagatttatcgccttcctttcacccttggtgactccatctgtaaatgtctccaacaaccgctccacacatacaccttccattggccacttaaacccctcattttcatcctctcttgcatcacccacaatgacaaattctacccccaccaatactaaacagccacaacaaacttcagatcatctcatgatctaacctactcatactactcctaccataattgatctttcacacatttatataccagatattagaactccaccattggcttcaaacctttttgcaacataaccccctcaccccccccccccc

SEQ ID NO: 3695 - DNA, 1079 bp, Cannabis sativa
agagtacattactagattgctaccacaaagttaacaaaatattcttaagctgtccagaaacaatctcactgaggaaagaatagcataaaattgtttcatagtccaaacagttcaatgtgtgttgggacactcacattcattccacagaaccagaacatgtaagcaatggcaaccgcaggggctcttcctagtcccgcggagcaatgaacatacacttttccctttccttctgaaatggcccattccaatgatgaaacagctttaggcaaaccgtttcgcaatgattcaggatcaaaatctctcgcctagtaatgttggtaaacataattgagttatgcaatcaacaaaatgttacttgatataaaactcacagtgcacaaagttggtatcagcaaaagaaacctacttactggccttctcatatggcgaattccgagctcttggcatcttttaactatggcctgcaggtcaattccccagtattctacatccttgtcttgctgtaagtttaggatgtatgccacattctcttcctgtttcagatgatctatatcttcaggcttctgaggctgagaacccactatcaaattatcagctataagtgtgtagttcatgcctgagaatagaatagaaacaaatcatatcaattaccagagttaattagtaatctataacaaaatataaaattaaagaaggaaaaagccttttttgttgccaaatcccaaagttcctgtttgggtgatttctgcttttgattttagcttctcaagaaactctttttaaataactactaaagctggttttgccaaatcaaatataaattggtttcattttgaaacactttcactgctgatgcgattccataaaaccaaccaaaaaggctaataaaagaaagaaacatttaaagttaaaaaatgtgtacagtcgaaaacaattttcaaaaattgcaaatggtaggtccagaatccagatctactccaacaatatagattgaaaaggtaaaagaataaacaatttttcacattctagtggtaaatcataacaaattagcttgagaagagaaagcaaaaataaataaa

SEQ ID NO: 3696 - DNA, 1604 bp, Cannabis sativa
aacctgataagcagaatcaaaaaaaggtaataggccttttgatctaattaagtgtcgtatttggtcccactgatgaatggttggatcaaccccagttgggttatgaccacttgcgtggaaaagcacagttgccccacttggcacaaatgaaaggtcttccaacaaacctgttatatattaatttatttaattattaataacaataaaattaagaaaaatcataataaagagcaagtaatgtaattaatggcatggaccttgaaagtccaatccatttgttgctgggtcgtagtaacgataggtcttcacagccatacccaccgtagagaaaaaatttgggtggttgctatacgtttgtttaggaatatataccatcttctgcataattaaaataaaattatgtaatttatataaaaaccaatcaaataattaattgatgataataatatttactttggtgtaatgttgtgccaaaaattcagctccaactctcagtgcgccacaaccagccacgcattgaacggtggtcactctattttctttaatagcagggctgcatatattatttgagttttcatttgatcatcaaaaatcgatttaattaacaaatcatttattagtgacaaaagaaaattgtaataaaataaaatgattatatacctgtcagcacccaaaatgagcttagcgctcaactcattgaattcaggtattccagttataggtacatattctttaaccacacacctatatatttatatatatataataattaattaatcatgaccttgcctgttctgttcatatataaatatacgaaattatattacttgaaaattaatacagtaattaatttataaaaacatacgggtcattgagtagaagctgctcggctcgatttactacgtcgaaaacgaaaggttttccatcctgttaatgaaacaaaaaatttcggtttttaaaattcaaatttgggtacaaaatcagtttcatcagcttcaatatacaatattattactattataattataatgaataatgattggatgagaaataattagattagaataacaagagggtcgttttcaaatacaaaatatatttaattctttttcaggtatatatggtatcagtattagctttacttttcgaactacttatatagtacttaattacctctgttctataaactccactccctaaattgagttttaaaggactggtatctttgctataagcagccattacctgttgttaaacaaattaacccaaaaaataaataaaacactaattaaaaagtgatgtatatatattctattttaagagaaaaatgattattaccgcataggttggggtttcaggaacaagaggaatatgttcaaaagcagactccccatttaataattgatcacaaacaagtaccttcttctttgttccattattagggctcatcatcatcacacaagactccattaattatacacttgtcaaacaaaataacacaggctagtcttcctttggtatatatatatagtactaaccaaaacccttccacaataatagtgtgttggtatagttagttgccttggcctgccctatcatatata

SEQ ID NO: 3697 - DNA, 1565 bp, Cannabis sativa
  modified_base (1423)..(1428): a, c, t, g, unknown or other
tgaacgttgagagatgttaagtgaatgtctgtgttcttgagaaatctgtccaaatagatgtttgcaacaacaaagcaagatgggctgcagccggagtacttgaagatgcgatcaatgtattggctgatgcttaaactaggcgctcttagaccgtgaaatatggtaagaacatctttagcttgtgttgcctccaattgcaactcgtttatctgtactgatttctcaaggagtgaggaaagaagtgataagacccggggtagtttcataacgcctttgcctaatcctttgagccccaaagaaatgtaaacaacatctgaacctacattactctcggtctcaactgccagagttcccattattaattctgcaaaattaagtattggcataagaaatcttttatttacttactcagtcaaagtacattatacaaacatctaatgcaaataagacttagactcacatgaactttattcatttcaatataaaatcgattctcaaagttgggcatttcagaatgacctagtacaattacttatctctttagattagaaaaatcaaacacgcagggaggcaaattctcagtaagattttggtggcccaatttgcaaatgaaaggctcttttagttttaagctttaattgaacatagtaatacatcttcgttctagaagtacaacttaaagttcacacatctagcattattgtcctatcaatgttttaccatacatggattatggtacattaagagtaaattcctgtgtatagctaagcaaacatgggctaaaagtaaaaacccacttgaattttccattaaagaacacagatcagagtcctacaaaagtaccacacccgaatttggtactaaatctaaaatcaaggaaaaccccataaggcaacaacataataagcagaaagaacccatcaatctaatccgacaactaacacgaaccagaaaccatttcttattcaattccaacacaaacaaaaacccaagatctaaaaattcagctccgaacgataattttagtagtactaaactagaagaaatcacaagaagcagagtttgaaaagataaaaacgaagaacatacatagatattcttgtaggagaagtctctaaatcccagcaattggtttgtgtttgagcataaaaatactcccaaagacgcaacaagaaagatacagtgaatgtagtgatatgatatcagcgtctaattcaatggacttaggcagtgtttttgctttgcatctacttcctcttcttcttcatctctcttccattacatttttctcggaatagttttgccgcagaaagagaataacatttattattgtttccctctctttctctgttttccctcctcacatggagatggaggcttagacaaacgcggtttctctctcccttcctctctctctctctcnnnnnntatatatatatatatatgtaaagtgctttccctgtaatacttcacattaaagatagtgtcggcaccagtcttttttcttatttataaatgataaaataataagtggctaccttcaccgtcgtgaattggtatccatt

SEQ ID NO: 3698 - DNA, 1597 bp, Cannabis sativa
tgtaatcaccattttagccatatcattcgtccctgcaatcactttagtccaagccttcctcccttcctcaaacctcgaatacgacgcctccgttcggaacaccaacagtagcgccaatgccggcgcagtcagctggtacggtagcgatgatgccctcaacaccgggaaaaactccggcaaccagtgcatcagaaccacagagttatagctcgcaatgacagctgctaccgacgtgaatgctattaccggtggtatcaatgaaaggataactcgagacgacaggctcgagagaaagtggcggacatggcggagcgagcttctgtggtcaacccatttctcgtggttgtaaagggttcggttctgtcgcattccccgctctttgattcggtcggcccagtctggtatggcacggaggattgaaattagagttttggagggagatgaagatgaagatgggttcgtggggtttgatgaagcgaggactttgaaagaggtggttgttctgggtttggaggaaagggttgggtgtaattttgagagggtttttggggtaaagtcggaagaaagggacactctggtggtagagtcatttctggtaaatatcaggtttggagttagggttttggaagagaaggaagaagagggcatgttatggagtctgagagagtgaaaacaagaactaggagagagagtggattggtagttaaaaacagttatttgtgaaggaggtttttacacgttcaaaatacaaaaatatgaaatatgaaatatgataatgttacttacattcgtgacagacatatttggaagttactgaaaataagtacgctgagtggagtcggggaatttgtttcaaaacaacaacacataaattcaaaaaactttttgaagattaaagagactcatcatgggtcatttgatgtgatgacctcattttaatagaaagttttctcctattttatgcaaaatcatattcaatagtttgaacttccaattggtgaaggcagatcagtctgatccatggattatttcttatggtgagcctacaaatggggtaaggctagcaaaacgagtcaaacacgataatacaatttaaaatctacacgagagttaggagtttgggtttgtcttaaatgagttcgggtcgtgttcgaattgactcgtttaacccatttaataaacgagttgtgtttagattcacacgactaacacaaaattgacccgttagtaacttatttaaagttgttttagtactttaacatatcacaaatgggtcataaacgcgttgaatacttcataaatgtattattggttgacatgtttaaacaaaaatatgcttataaacggattacacagatcgtgttcggattttattttctgatacgatttttaaatgggtcgtgttcgggtcgagcatatacctattatacatgagtctcgacatgatacgaatacgactcgcaaacacaaattgccacccctaaaatggggtggtagcaaacttgataacacatgcgtcaatgaaacatatagctcctgcaacaatatttttcaccacttatgtggaaaaaattcttactttaccattgaatttctt

SEQ ID NO: 3699 - DNA, 1255 bp, Cannabis sativa
ttttttaaaataatttgttcttttacttataattttatttatttaaataactggatattactcaccctggttaaaattttctgcgtcgcctcattttgaatttctatttgaacattgcgattttgattatttttttaaccaaaactgcacttgtagtttttataatttctcaaaccaagaacaaccacatcacaacactacaaaaatcaccaaataattctctctaggcattagagcatcttttgggcaggccaaatcaaaatttacatgcaagagagagagcttctaatgtagcaattgagagtgtaatatgcaatgcaagacaagaaaagacagcatctatctttcaattcccaacattaactaacgacaattgaactaaaatccaaaaactaacgacattttcaaagcaacttgcttgtatatatagcacaacttcactaaacaaacactaaagtattattgatcatatatcaagtagtactagacaaaaatggagaatgaggagctttccactgttgactatggtggatctctccctgttgataatgttcaagaattggcttcaaacaaccccactcaaatcccatctcgctatcttcagcccgaaaccctacttgatcaaatttccgtcgtagaaacactggagctacccgtaatcgatatgaccaaactacttgatcatcgccatcatgaattggaaaaactacatttagcttgtaaaaattggggattcttccaggtattataacacaacttaagaattgtattatatatcatatttttatatagtttgttttaattttattaaaattatgttacacaaacaatttaatataatactatataatataataaagcgcgagttcatcatgactaatttttcaatgatgatgaggcagctaatcaatcatggggtttcagaggaagtgattgagaaaatgaagattgatatagaagaattctttaaaatgccattagagaagaaacaaagttatgcacaacaaccaaacagtattgaaggctatggccaagcttttgttcattctgaagaccaaaagcttgattggggagacatgttattccttatagctctacctctctctcacagaaatatgagatgttggcctattcaacctatttcttttaggtacaaaaattaaatctttactatttccctacacctaaaacaaaatatgattgtcacccttgataaatttttcagagaaaatctagataaatactcaagggaagt

SEQ ID NO: 3700 - DNA, 993 bp, Cannabis sativa
acatttgtatttcatctacttattccgctctttaatataggattagggagtcaatatttaaagtaacaaatcctttcgttttatgcttaaaactgttccattctaaacttccttagcatttgagtttgtcttattctggatagacaacatcatatcatagacaacatgttacttaagtacaatttaaggggtgtgatgactgtggagatgatcccaaaatagcaaacgttttaagtcttaacttcttcattgattttcatatataattcttcaaaaaccatggaagacaaccactttggtctcatacaatctttcttcctttctaatctaaaagaaacttaccttctccattgtacacctaactactgaaaaggctaaaaagaaaacaatggaaaagtagggagttcctaagaaaaggttcaaattaaggctggctattggggagtctaactaaaatagaatgctctggcttgtggtcacattcataatcaaggtgaacaaatgctctctctacttcagggagttcttcaatctttatttgtagtgattcaccaattgcatgagcttctatcaatggcaaatcttctggaagttcaatgtcaacctgaatttaacaattagaagaatgatcagtgagaaaagtatgaaaatttatggcataatacttacctgaaaagacaaaagatacttagaaatttgctttaaaagaagactaagaaataaactgacctctacaaagtacagaacaccaaaggtgtatgcgcggactgtgtcgacacgtctgattagaggatgatgtctaagaacaaggtatgtcagtttctgcaagacttctggtggagctgattgcccaaccagagacactacatgaagaagaaaatgatagtttattaaagatccagtgttgttaataagagtaaccaaagtgacatgtaagtatgaggtgtttgtgaaatagttaccaatataagattgtttaagtttcatatgttt

SEQ ID NO: 3701 - DNA, 1827 bp, Cannabis sativa
tcatctgtttcacttctcgactctcatctaaatcgattctcagtcccggcagagccaccagagactcttcctctcaaatctccctttcttcttcactcagtcgccggctcagaaccagtggaagtctaaaaagctcagccggagccggtcaagcctcgccgatgtttcccaccggcgggaagaaacgtggctcggctgctttcgaaaacccagaaccgtcttctcctaaagtcacttgtatcggtcaagtgagagtgaagaccaaaaaacagagcaagaaactaagaaacagatcgaaaagaaagtccggcgccggtaccggcaccggaggaggagaagcaagctttagaagaggggagaaaagcttaaatgagacaactttatcatcatcttcttcatcttgttcggttaatcataatcatcgaaatcagaaatgggttcatcttccattaacgatttgtgaagctttaagagcttttagtgctgatttgaactgtttcttaccttgtaaatcttcttgtactaataacagtgatgaacataataaacaacatggtaataaagagaagagagttagatcggagaatggtggtggttcttcttgtggtggtgcttttgctaggtggttggtttctgttcaagatggtgaaaatggtaggaggagagagattgagcttgtggttggtgatgatgatgatgatgatgaagaacaagaacaacaacagagaagattggctttgcctgagatggttagaggaagtagtcaaagaaggcaagtttttgaagggattgagtttagagaagaagatgatgatgatggtgatgatgatgataatggtgatgaggaggaggaggagaagggtagggttagtatttgtattccacctaagaatgctttgttgcttatgagatgtagatctgatcctgtaaaaatggctgctttgtctaatcggttttgggaatctcctcctaagaaagaacaagaagaagaagaagaagaagttgttgttgatgatgatgatgaagagagtgaggaagaattgaaatgtgaagaggaagtaattacaacagttgaagaagtagctgtggaatctgatgaggttgaggttgttattaatggagatgatgaagaagaagaaaaggaagagaaagttgagaactttgaggtgttgttgaatgagaatggagataatggagaagggttaagttgtggaattgaagctttaatggaagaagaaccagagaaagaaaatgaagaagaaatggaagagaaagttgaaaactttgaagctttaatggaaaaaccagagaaagatagtgaagaagaagaagaagaaacaggtaagttaggtggagaaagttctgatttttatggatgtttatctgaaattccagaagttgaagatgatgacaatgcagtcaaatcagtacttgagaaagaagaagaagaagaacagcaaaccctagaagttgaagaagaatcaaacccagaaccagtagaagaaaaagtcaaagaagagtcaacggtacaagacgaagaacaagaagactcacccaaacccgaacccgaacccgagaaacaggaagagagcgaagataaagtgggtcggaaaagcgggtcgggtttaccagatttcttactgttaatgatgtgtgagccgaagttatccatggaagtgtctaaggagacttggatctgtagtacggactttatccggtggataccggatcgaaggcccaattcgaagaagggttcgggtttgggcccaggcccaggtgtggaagagcccaaaaaacggcccagtattgttgttaacggcggcccta

SEQ ID NO: 3702 - DNA, 871 bp, Cannabis sativa
aaataaataaataatccaaggtaagactaagaatataatatgggtgaaagatatatatcctccacagtaaatacttaagtattttagaatatagtggaggaaaatggctaaccaaggaaattttaaaataaaaccaccaggggaaatttatgtatagtatattgctaagaaccttaatatgaatatcagcacacttggtaattaattgaggccataagaaccttaatatctagagatccaaggttcaaaccttgtctcccccacttcccgacctccctagaccaacctagtagcttaatgtttctattaaatatcaaaagcaagtttataatttatcatattcaataacaaaaaccagacgagcctaaaaaggagcatagaccattgacaaataaaagctacctcacagaagataccataaagacctcttgggcaggcctttccagtaactgttccattttggccagaatgaccatgacctctaccaaatcctcccctgccacacagaggaaagaagcatcagctaactaaattatcaaatgagatagaaatgcaaagaaggcttttgccgcataaaatcaagaaacaactggtcctttcttccacatgcaacaactcataaattttgaggtcccatttgatatgatgtaaaatatcctttctccttactgatccgttcttatcagctagagagcattatgtttacttgtaataaaagaaagtttgcagaatggtctagaaaatacaagcactcatgtcaatacgttattttcattcaagccatttactaagacaacggtgtgtcttacaagcaaatcagcatataacaacataatgattcacaagaagtggcttcatgaagcaatggtta

SEQ ID NO: 3703 - DNA, 2782 bp, Cannabis sativa
aaacaaatactattatactaaatatataaacataaattataaataaataatgttgttaaaaagataacaaaaatattaaatggattcttgtcggagcaggaagtgtcattcttatctttgtcccgtttaatttttgggaataaaaataactccagtccctaacacattccctatttagacaaaaaatctctgctcctattagagcaagttcccgtaagcccccattctacgagaataatatgtattcttatgaaatttttggtatgttacaaatatgattctaataaaaaaaaagtaacaacgtaactttattttgatattattttattgttttgtttttttattagttgttaagtatgtcaactaagtcgattaaataccaagtaaatatacgtaatatattttttactacttgaaattagctcaaatggttataagagggtgtgtgtattggaagtttggagttctaatcttaaatatgcatagttataatatataaatactaaaataaccaaaaaaaaaaaattatattttatatgtactcatgctcatatctatcaaaactcgtagcaatttcgtgttaaaaaaaaaatcaaatagtacataaatgttgtacaaatatctctaaagagaataataatactatgccttcatttgtctttgtctaacaaaacaaaagtgaattattgtttaaagcttataatctgctttttttttatttagtgttgtcttttagtaagcatctgtgcttttttgttaatcttaggcataacatgtcaattttcttaaattggtggaattgagaatcttattttgtttttattttatttttatgaaataactgaaatttattttgttccctttctcgaatgatctgaaaatgttttatcagaacaaaaaaaaaaaaaggaaagatattcttcaatataaccatataattattctgaaatatcttcttcttttttttctttttttttttataaagttacatatatctctaataaaataaagaatataccatataattaaacaatttttttattactataatgtcacgttaaattaattttacttgatttagtgcaatgaccataaaaagtgtgagataatattttctttaattgagatgtgagcacgtacaagttttttttacaatgcagctgctaacagattaattattaaattaaaattataaaaagagatcatatattaataataaaaataaataataataaaagtatttaaatttttgaatttataaacattataaacttaataattttttcatttcgcacaaaaaataatttttaatttatactaattacaaattcaaaattttaatatgaccactataacgtatatgactatgaaaacaaattactaaaaaattatttaagataatagaaatatattagtccatactaatattttccaattacttttattttattagataataataattcacaaacccggtcccacccccaacatgtgatctcacatcatgttcaaaagaaaaaaagattaaaaaataaataaaatcgagaataccggaaattaattaatgcactaaaagtcaaatcaatgaatctttatataaaaatatgaccacatcttatccacacacatttatccaaaatgacaaaataaaataaatatgtaaaaagacactatcgtcatccacatctaatacccaatgcctttcgccgcgtacacgtaatagagggcattttcgtcatttcacactaaacacgcaatctccgcatctccaccgtccaaaattaattaacaaaaattaattaatattaactctctctttcctttcctataaataacaacgttctaagctttcaatacccattcaaatccaaaaacacagagaaaaagagtgaaagaattgtaatcaaaatcatcaacaatgtctggaatcatgaacaagatcagcgaaaccctccacatgggaggaagccacaagcctgaagatcaacacaaatccggcgaacaccacaaggaagagcaccacaagggagaacaccacaaggtcgacgaacacaagggagaacacaaggaaggtatcatggagaagatcaaggacaagatccatggcgaaggaggtcacgaagataagggagagaagaagaagaagaagaaggagaagaagaaggacggtcacgatcatcatggacacgatagtagcagcagcgacagcgattagattcactgtatatatatcaaaacatcatgatccgtcgatcgatttaggtattgatttctttctttttcagatctgaaattttctctgatcattttcaaattttgtggtatttttttttttttgtaataattttgattttcaaataagaggactgatttgtaaagtgattttgtttggagggctaatttgtaaatttggtgtgaaatgcaggtatttcggttgaatgctaatatcagaggtcgggtcgggtcatgatatctgaatctattacgtcgtcgttttgtgtgtttggaattggaataataatattgtgatgtaataataatggtattaattaattaattaatattgatataatatcatatgagatattgtagggtagagtattttaatttctatatattattgtcgtttatgaatgatgatattttatgaaattaatgcaaatctttatttctatggtaatatatatttcactattattgttttctaactaatatatattatttcttccaaaaaaaaaagaactaaatatttattatactaaattataataaagaaaagaaa

SEQ ID NO: 3704 - DNA, 1447 bp, Cannabis sativa
actccaatttctctatagctatacacaatttatatacatcaaataccatggcagatcatcagagaatccacccagctagagatgtagaagcaccggcaacggcagaggttcctttggttccacatggagccactaagtcccaccacggcgacccggccgccgggacaacagagccatacccagctccattccgccgaaccattccaatgacacaatcaaaaccaccaaagaagcgaagaagctgcctatgtagattcctctgctggataatctccctaatcacttttcttataatagccgtagccatagccggaggaatcctttacctggtgttccgaccaaagctgcctaagtatacggtggacaagctccagataacgcagttcaacatgggaaacgatcagagcctttcggcgacattcgacgtgacgatcactgcaagaaatcctaacaagaagatcgggatttactacgagagtgggagcaggattagcgtgtggtacgagggtacaaagctgtcggagggtgctctgcctaagttctaccaagggcatcgcaacacgacgctgctggtggtggcactgtccgggcagactcagaacgcgtcagggcttttgggttctgttcagcagcagcagcagcagattgggtatatccccatccttcttagggtgaggcagcctgtgagaatcaagctggggaaactcaagcttttcaaggtcaagttcttggtgaggtgcaacctcgatgtcgatagtctctcccctaataataatattagaattcgtaatagtagctgtaagtttaggttcaggttatagattacattctctctctaatctctgttactattctacacgtctttccttatacacacattaacagagttttctccctatttttttttctcccatgatatgattatatagcctatatatatatatatatatttatttttttatttatttgggatatttcccctttacttggattattgttgattgctgtttgcaccttatattatatataccaatacaatatacattatatgtgtttgcgtgttctctttctcttcagcactatatataacgatagtcacgccactctaccttggttttcttttttaccatttatgcatagatacaagtgattaacttgattttgggaatagttcaaaaaataacaaaattgattttggatcttggttggtaaccagtcattatgtatatgatgtaaattgacgaaagataatatatgccaaaataatattaaaaaaaatattctgaatcttgcgaaaagcaaagggactaagattatatatataaagtctactataactataataaggaaatatttaaaatattgcaaaggaaaatattcggttctctaacattgtttattatacctgttgcaaaggaaaatatttaaaaacagaaaggattgttta

SEQ ID NO: 3705 - DNA, 803 bp, Cannabis sativa
aaaaaaaaaaaaaagtaaacaaaaagatattttaccacaaaaataaaataaaatgctcactgtataaatttaaaatatatgggggttttatcaccaataacttttttattgaagaaaaacgaaacggacaaggacaagcacagaaaattaaattcgtttaaactattagaccatctccaattgttacactaattttgtatggaatcttttactttttgtgcaatatgctccaataatttactctaaatatttcaccaaataaatatatttttggtgtatttagtaatacttttttcaatcaattttttatttttttaattagaaaagtgaaaataatttctaaaaacatgttctataaaactgttttaactttttaattttttaattgagaatcaaaattttaaaaactatgaaaatagaaaaaagtcactttcaaaaaagttttaaataatttttttccttaattaatattttagattccgaccccaacttggaccttaaaattcgggcccggatcccagatccgacccccaaccccgtctggatccaaaccccaaactcaaaccttgacccgaactcggaccccagacccggctccacaactagatccaaaccccgaccctagccctagacccgaatcccgaccccagcctggaccagaactcggaccccagccccaaccctagatccggacccccgccccagaccctgaccctagccccagacccccgccccagaccttgaccctgaccccaaacgccgaactcagaccctgagcccatccctaaacccgaaccctagac

SEQ ID NO: 3706 - DNA, 883 bp, Cannabis sativa
aagtgcacatatcgttacaagtaataactcatgcaagtgaggtcgatcccacaagaactgtagctaagtactaataaattgaatctttgtttctatttggccaaaataaaactttggtttgagaatagattatttaaggaataaaattaaatagataaataaaagggctcaatcaagagatgaaaaattaaagggaaataacttccattgcttcaactaattcaataatgccaattaatcttttttcctccttctatgtaattttactaaaattcttattaggacattaagttactaaattgtaagaataactataacatttttgagataattaaacaaacaattcacattaaccagtaatctagtgtgacacaagctatacaaatatttttgtattgcatcaaaacctatgtttagtcaattaaagcatttttaatatttactttttaaattttatattggaatcataaatcaggtaaaagatgtatgtttaatctcaaacatgcattaaatacaaatatgaataaatcacataacatggaagaaagaaaaaccaaataacattatttcataagtaatctctaataatatccattaaaattcctaaaatatgagtagttcataatctccataaacacaaccatagttgtttaaaaaataaacataatcaaaaaaagaaaattaaagaaaaaagagaagaaattagtttgagattgtcacgattcaccaattctaactttagttccaatattctttttctttttctagggtttgtttcagtattcaatcatctaatcgtgatccttagagattaaaagtgtaatctctcaattttttcaaaatgacaaatttctcctaacaattgctgacaattacggcactc

SEQ ID NO: 3707 - DNA, 1198 bp, Cannabis sativa
ttatcgaaatattaatcattttggcaaaggaaataagggaacattatatagtcaactctagatgattaataattaattacttattgatttatgaaaacacattatatatattgttccaactcaactaactgcaattcttggataagaaataattctgccccaaataattaaataaatcatcaaacttaattacaaacaatattataggacccattagggatgactatatatataaattaactatggtacaagttgtgtggtatatatattaccatatataaatagatatataagactgggaatatttatttctccacgtacgtacgtatgtatgtgttggttttattgggccctaatcgaattcgtgtatcacgtatactgtatggggacaagctgtgtatagagtatagagaggaaccagccaaaatgaaaataaaaatgaagagtgtagaagtggagactggagacttttaaacgtgatagatgtctactgtttattggtcaattaggaagtactccagatatagggaatattaattctgtggtgagggatatatctagctatatatgcaccaaggcccattttgagaagaaatatatgtgatcacattatcatgatcatattatatactataattatataaatatatatgtaacatatagctagcgcttatcattatgtgtagtacgtgcaacaacgtccacacagactgattaattaatttattcataattgcgcacttaaaaaattaaagacggtataatatatgattaaattgtgattagaaaaatatgaaattcgaataaagttgatggtggaccttataaatataaatatatgtatggcttcatttaaatgtttaagtatcagtgatgatagatagtagaattagttaaaagaattggcgcgattaatgtttgttttttgatatttatatttagtacgtatgaattacacagcgttaaaattttcatttgatatctctctcatttttactttttttttttttggatgattgggtatatgatgtgatttggacaagactatcgatcatatccatgcagaaagccactgaaggccgtgtatatatgttcagtatatttgtaggtgtatgaaataaaattgcaaaaaataagaattaaaaaaaataatataagtgagttgaatcatatatatatgtagtaaataaaaacttta

SEQ ID NO: 3708 - DNA, 1237 bp, Cannabis sativa
ctctctctctctctcatatttaaacaatacccactaaattatcttaactaatttcctttgcatttcttcttatttgacttggaattaccactcatcttaatctctagctgggtttctacgttttggtatctgggtctcattcgtttcactttgatttctaaggaagaaaaaaaaaagtcatttctctgaagaagcttggatttaatagctttggcgaagtgggacttttttcattcttaaaatatactctttttgcgctaagatctgtgaggaaaattctggcttggcgaacaaggccgatatcgaagttgatggtttttgtatagacttggaaggtatcattttactttattttcctttggggcctcttctttggggttgataagcaggaaaatcaagctcaaaattctagtgtcgaagattgattctggttttctgtatttcaccttctgcttctgttgttcctgaatagatctgcataccgaataagcttccatgggaggccatatgagcaagaacaagggcccccctggatcatcatcgtcgtcttcgtccactacaaacatgaatgtccacacaaatattcactacacaaccgagttgaactcctacgaggcagcttgcaagcttgactcggacttgcggacttttgactcggcccttcaagctcggaccaaccaggtaatcaatactctagccgttggagtcgaagtccgatccctttcatttgattccctaaaagaggtcaccgaatgcctgttggagatgaaccaggaagttgtcaaggttatcttggaatgcaagaaagacatatggaaaaaccaagagctgttcgagctagtagaggagtacttcgagaatagcttgaagacacttgatttctgtactgcattggagaagtgcctgaagcgtgctcgtgacacccagttgctaattctcgttgccctccaacagttcgaggaggaaacagtggaaggagggagtcgctatgtgagaacacttgaggagctgaagaatttcaaagctgcgggagacccttttactgctgagttctttcagctattccaagaggtttataagcaacagactttaatgcttgagaaattgcagctccggaaaaacaagcttgacaagaagcttaaatgtatccatgcttggaggaaggtgtcgagtatgatatttgtcgccacttttgctgccgtactgatctgctctgtggtggcagctgccatggcag

SEQ ID NO: 3709 - DNA, 2176 bp, Cannabis sativa
aaaatgagcaagttcaaactttttaattcaccttttgggatgttgctctgtcaaaaagatgcttgagaatggaaagaagtacagcaagccgtgaattacatggtgctgcgaagaaaatcaatagtgaaactcacatcatgaaatcatttaatgtgtcaataaaacataatactagcacgaacctttgacatatttttgatttagttgagatgggaggttataatctgcagcaggacctgttattttaagtggatgttctgaggcatccgtatcaaatattaaatgttctggtaatgaagtagaccgcacccttttatcatccaaaccgatcataacaggattttctaagctcattttagccagattattgactttgtcatttaaggtagctgataaaagcaaattctgcctctcaaattcaggtacacgtgagactgttttgtccttccttgagtccaatatgtctagtatttctgctatttcttttccaaatccaagttccaaaatcctgttaaatggggatttccacagtaaagtacaacaagtcataatcaataatcatactttctgggagcagatataaagcaattttcactggtatatcatacctgtctgcttcatcaaatataatccaacgcaactttgagcgcatgaatgatgatgtattctttagatgatctaacagtcgtccaggagttgcaacaagaatggatatgcctgaaaaagaccacacggaagtgagcatctgcttgaaaggactggtaaggtaaaaactttttttattaagaggctcaacaaaaagagaacccagtagagaaaacataacaaccaattaataaagtaataattttatgtatcatgctagctaaagatggaaacattccctcccacaaatcctcaagtaaaggatgaacaaaaattggctaatgaatgttatagtgttatgcatgtatccgtacctttccgcagcctggatttctcttttgacctgttttcaccgcccattacataaccaggaacaatccagtgaaatcgatgcagtaacttctgcagaatttcgtgcacctgcaggcatagctcacgcgttggtacaagaaccaacgctatgaagaaatattaatttagaatcttactaaaaggagggctgcataaacaaataatagagagatccctttgttccttttagtaataatttggatacatatacgacttccttatggctaaaccaaaataattaaggattctccacgaatcaaaacaataacacccacattcaataattacagttttggttctaaattcaccaactagataagcaagcttcattgtatttatctgacgaaataaaacgaaaaattgacccactacaccaaacaacacactcttaccaaaagttccatcagacctctgaatacgaggattgtaattctgcaagtgatggataacaggagccaagtaggcaattgtttttccagtgcccgtagaagcattaacaagtctggaatatgctccattaaagaataacagaaatacagtacaaaaagaaacaaagcaaatactttatagatacaaacatatatatgtatataaatatgttaagagagagagcattagcagtggtgaaacacaaggatacacatgacggccggaaagaataacgggaatggcctgagcctgcacttgggtgggagcttcgaatcccaaccgttctaattttccaaaacaagaaggaatagtcgttagccttaatgaatatgaagcttaatgtcgatacaaatgaatcaaaactctcgtcccaattataaaacataaaaggtcacctcttttccagaaaattagttaattagagatgacccacgttacaaaaatagcaaaatgaaaaaccaaattcagtttatctgaagatgaaaaggacagagagaaaaaagagcggacctcgaagctgatcacataagttagtgtgaaggccgagactggagaaagagcaagtggcaaagacgtcgcctttagttttgttattctttgtatcttcttctgttttgagggctttgggtctcctgaccgccattgctaaaggttgaagctctggttttgcgcggttactagtctcccacagctcctaaaattgtataccgtactccgccgtaaagggaaagcggacaagggtttcttctct

SEQ ID NO: 3710 - DNA, 1018 bp, Cannabis sativa
agagagagagagaaacacacacaatttctctccaaaaagaaaatacagagagagagaaaccacacaacctatatagaaggtgccaatttgtacgggatacactgcccaactaacacaatcaatgtctcagaattgacccattgccttatttatgaaatgatataaatgtaggtaaatgatgtatacgatcttgatatacacatgaggctgagctgggcttttttacaagtcacgaccttagagttacaatatgaagacacgagaaaaatattacaaattaacatcacacggcaagtaaacacgaatcaaataaactaagccaaaacataaaaagttaaaacttcttatattaatcttaattatatatttgtatttacaaataaatatttgaattttaatcattttagttaatatttatataataatgtattaagtatggttgaaaaattatataaaaatacacacaatttagttattaacttaataattgtaaaagaaatagtgaaaaagtgatacctgaaatcaacccgtataagaaaatgggttgatacatttataaaaaattggtcagtataaataaagcacggcaggagtttgagtgtgacatgaaaatgtgagcttatagacagtatcgagcttactctttgaaatattagcataacacaccacgactcatattttatggtgcacggctcggcccatatggttgcggatttttcaaaatatgaactgagctgacataatgtgccatatttacaactatacatgtggcatattaaaattgttatgttattaagctatgtcttctctagcgatatttgttgttagaagtttaatcaaaattatttagtctttttttttgttttctatattttaaactttgattattttttgaaagtacaaaatacatttcgctcaacataaagtaaaaaaataactgaaaaataacaataaattaacttcacgacaattataaattaactataccaaaattaatctgaaaaataacatcgtgaca

SEQ ID NO: 3711 - DNA, 1439 bp, Cannabis sativa
atattttaatttaatatattatgttacacttatatatactttgtatttgatgttagaccatataaatatcactatttatataaatttttaaaaataccacttttgtatgtacaaagaaaaataataataatagttttgtcaaaagctccatataattccacaattttactgagtctaccactaataaaaattatgcaaaactaaattatcaaaaatgccatttttctcaaaaaattatcaaaaatgccattttctaaaaaaaatatcaaaaatgccataagtgggaagaagtagttaccataagtggaaggactttgaacaatatcttgaaaaataccataagcatcaatgtagatgaaccttgcatcattgaactgagaattcaactgatcaaccgtccccttcaacctcgcgttaaagattctatttgcagagttgatcttttcgacgcaagtggttccatcttggctattttgagccaactcgttagggctacacccgatttgaccgattccaaaaagtgcaaacctccgggccccgtaattgtacaatgtccttaggttttggacatagtcttgaatgagaagatcggcgtattgatcgggggtgtaacgagagccggtgttgtagaattgaggcatgaaatagttgtttaggtagtcattgctacctaaacctattgagtaaatacatttgctcaagtaatcagcagctgtgttctcatctcctaacaaatccaccacttgtgacactgtgtttctatagttctctacttgtccactaaagcttatcctaccaccctataatgaaagaaaattaaaaattatttttgttagaaaaaaaatgtatttttctaactatgatatataaaatggtatttttctaaattgttgttgttcttgtttttattgaaattatatatatttatggcatttttctaaaaagtttggaaattctatctaagcatgcatatagactacacatcataatcatttgattaaaatgaagaggttattaaaaataattcttaggtgatattaattaaatatctctaataattataaacattaagccaatatatatagtattttttttatttaagaaattttttatatatatcggtaaaaatctaaaatatattattttaaaatataataagttcatgtttcttaaatgaaatattaatgtaatattttaaaaaataaataaagtatttttttaaaagaaaaattatattttttgataaataataataaaaataaaaaatataaatttttcaataaataaatttgagatatttttattaaacaattttttaagtttagttaaagagttgggtgtggacacctgctgcctcacccttaagtcgtacttaataaacttgtgtgtatgcatataaatataaatagaaatgatgatgaaaaaactaaaaagctata

SEQ ID NO: 3712 - DNA, 697 bp, Cannabis sativa
tttttggtatttatgaaaatatgccttctatcaattaatacaaatgagatcgaatgtgattattaacatattagttatctgtagaacgaagaaatgaggccccataagatcaggcccatctcatctaatctgggctgcacaattgttcagtagctagtatcctcttcaatcaaaacagttgtggggaataaaaaggattttttttcattttgagtaattgcggtataaaattctgacgttttccaatattttctcagaaaatagttcatttaataatgcatatgtcgataaacatcactaaaacatcgaaaatctctcatttagtaatgcaggcgacatattgcctggatctgtttttcacaccaattttaactttcaaaactcattttcgagctaacttaatactcaactttccaaaactaatttaacgcatgtaaatgaatattttgatagtttgatcgaactcttgaaaacatctccatttgattttctatctcccatatacaattactaacttaattatatctttataaaatgtgaatcataaattacaaattcatgactatttgtcataaacttgaataaaaacccagcttgatcataattctagagagaaaaaccccacccaactctattataagcctttgacatatagtttgagagcacaaaatcctactttgccattcttcttcttctt

SEQ ID NO: 3713 - DNA, 1272 bp, Cannabis sativa
atatgcaagacacccgaaagctttaaggtgactatagtttggcacctttgaatgtaaaatttcaaaaggagttttatgtttcaagttgggagtgggagttctattgattagataagtggcagtacttatacattctccccaataaaccaagggtatgtgagattgaaataaaagagctctagccacattcaacaagtgttgatgttttccttccacgacagaattttgttgtggcctttggacacatgaatggtaatgaatgatccctagtttggtaaagagagtagggaattggagttctttggcattgtcagatctgatgcccttaatttgagcaccaaactgagttttgacaagctgaataaaggctgggattgctatttgagcatcggatttgtttttaatcaagtggatccaggtgtacctagaacaatcatccacaatggttataaaatacttaaaaccctcagtagtttgtgtattgtatggtccccatatgtctatgtgaattaaatcaaaacaatgcttagaaatgttatgattggaaacaaaaggcaacttcttttgtttggcaaaatgacaaatagagcaatgaaaatgagcactaggaccatattgaaaatgcaaatctttattcaaagaatgatgttttacacaagaggcatgaccaagcctataatgccacaagttttcatcatttatttcagaattactaatggaaaaaatagagggcagactttgattaagaaggtagtaaaggtttccaatcctttcacccatcccaatcactcgattcttggtaatgtcctgaataacacattcgtttggcaagaaaagaaaagagtaattagaggaatctgataatgcacacacagaaagaaggttgaactgaaagttgggaacataaagcacattattcaacaacatattatgtaaatggacaatcccaacaaaaacaactttggcattgacaccattaggcatgccaagagagttgattttggatttgtgttgaatagaagtgaataaagatggattggaacaaacatggtgtgtagcaccggtatctataatccaactggatttagagatagaagtgacattaccagatatatttgacactataggctgctggttatgatcgatttggcattggtcactttgagtggctgaaccagtgggctgagatgtagaagcttgagactgagattgaatcctttgtgtcatgatagtcatgagtctttggcacagggagatgaggtcctgatccac

SEQ ID NO: 3714 - DNA, 853 bp, Cannabis sativa
ttcttctttggtgtcaagtgctttccacctttagaggacacaatctccaagactatatctcatatcaggttccttcgcttgaacaatttctctctgctcaagatctagctctgaactagatcaatcccttgttcacttagtgggaacaacaagactaacttttatactcctgacacctttcttccatgattgaaggagtactcactcgttggcgaaaacacatcaactcaggtcttgcaaactcttgagatatacttctccactcaaacctgtgccaagatcgatcaatttactaatcaactgcagaatatcaagaaatgagctctctttaccaatgtatcttttacgaatcaacattgttgtggatcggcttagttctattggtcaccatgttattgttaaagaacatatgttagttattttcaatggtctttatccattagagtatgaaacctttgtcatctttattaactcacaaaattaaccatacatagtcgctgaaatagaaccacttcttctatctcaggaacataaaatggatagtcatggtcgtgatcttgattttgtaaacattgatatgtattgcaatccacataacaaattgccatatccttcttcgattgattctcgatctgctttcaattatcatgctatgccatttcattttgatcatggccatggtacctggaatccttatgttgttcctcccacgggtggccttgtctcatgtcactctcctactcctgttgttcgaggtagcatttctatctcatcacccactttagcctcgaatccttcttgatctcatcccatgtgtcaaatgtgttctaagcctggtcacctagctgctcgt

SEQ ID NO: 3715 - DNA, 1077 bp, Cannabis sativa
  modified_base (713)..(713): a, c, t, g, unknown or other
tttttttaataccgaaattgaataacatcgatgctctttttggaggtgcggtagcgtttaatatggttgatgagttcgatacttaattacactaataattatgagactgaaaaacatattaagtaacagtaatactttttagcaattatcataataaaaatattaaaacaacgtgatgggaatcaacagctgcttccaggcaacttgacctttctttggctcatatctccatcatcatcatctcttctctttcttcctagctagctagttgggtttttttttaaacaaattattttaaaaaataaaaaataaaaaagttggttatgaataaaataatggcaacttgttgattgtttgttgtttgttttgttacattttttttatttaatttttaaaagatagttgaatgctgcggcttaaagaaagaagaaaaagaatgcaagtgggttcttttctttttaattttttttttttttgaaataaaataacaataatgataataatgtgaaatttaattaattaaattggggagtgaatgtgaatattggtggtttgaattgaatttttttgaggtgttgagttgggtttgagtgaggcaagttgggagaagaatgaggcaagtgggttgcttttaatgatcccatcccattcttctatttgtctacttttgaatcccttcacgccaccctatttatatattttttaaaaaaaantaaaaataaaaataaatatatgaattcttgtcctcattcttaacatcaattatttttgtttattttcttggtataatatttaaattgactatacaataacttacttctttggctttacactaaatatacaagttaaccacccctatatatatctctactctcaccattaattatttgtcttattttgcttttcttttttgtatttttaggaataatacatagtgaatatatgcttgtgtttgtcttattattaaactttcttaattattattttactgcacttaatcttttaaatttaaattttaataataaaattgctcattcttattattaataaatttaaggtattatttatatctatcta

SEQ ID NO: 3716 - DNA, 1170 bp, Cannabis sativa
tgacaaagagagtcttcaaccttataaatcttcttgtgagaagcagctatatctttcttcaagattttctctcgagctttcgcattatcaaccactccttaaggacaagatacactactttccaagtcaccaatgaatttttcgaactcaacaaacttgttctgtgaaacggtagcacgcttctctacagctataagtttctcaataagtttgacaaccttcttgtgttcattgtccatggtgtaggcataacaaacacaagcctgaaaacagagaaagtaagtcagatatggtaaatataagaaagctagatcaaagagaaaacaagaacaaattgttacccgaaagatatcagtgaagcatctttgagaaatgacatgttgagcctttgaactaaccaacttcttcaatagaatattctcaggcttggatccaatgaaagcatccccaccaaaaagaaaccatgtgtcccgcacacacaacttctcgaccaaatataaacttgggctcgaagtaccattatcgacatcatctagagaaatctcaattggagaagtaggagatccgttattagccttagaaactttagacttccctttgacagagtcttgggcaaggggtcgccttacctattttacttattttctgagatgtcttctctgtagaagtaaaataagtagcaaggatgccctaaacaacatccctgactataggctctgtctccttttgtacgaagatctttctcttcgaataagtcgctattgtacctaaacaactcatgtattctgctgagaaggaatgaaaagtgtttagtatagcataagagatatgaaaaccaagatagttgattacaactacagaactcaaagcattagcaacccactgattccccaactttctccaacaccttattaataaaagtaacttcttcatcacttcgatctaaaaacacagacattctcactaatttttctgggttattttgaatagaattcacaacttctcacatttttctaaagacaatgatggtttcactttggccatcctcttcatcatgttcaagacgcctcatcgaagagtcatctgagaagggagtccaggtaaactcactacatgacattatcaggccaactttggagatatttttagtggtaagcaaagtcttccaat

SEQ ID NO: 3717 - DNA, 800 bp, Cannabis sativa
aaaagctagacaaacatacaatacataaatgaccttatatatagaccaagaatttatttataataaattattggattctttagttttgatgaacaaaaaaattaattcaaataataacaaataaaaaaaattaataaatttatctagctagcttaactaatgatacaccaaaaatacaaataaatccatgatatattcaaaaagagttttgagagatttttacttaattaagattttgtttattgtcgttgaattgtgacagcccaatgataatggctaagatatcattcacaatattatgtgacatgaaatgaaagaaaaaatgatgagttttgtatgttctattttgtagtgatgaaaagagaatttaatgctagtaaaaatagatgaatttaacatttttatttcataaatattctttgttgttggcatgtcacaaaactcatcacgaaggtcctcaataacaagttttattatttgacacttatataattagtatatatccaacttgttggaatttgactacttcaaaataccttaattttattatgtactgagtggtcaacaatggttgaaacgtacatattagtggtggggctgttcaaagtaaaagatcatttctgggaaattggcttatccctaactaaaatgaaatctctacctctattttggattggtctgtataaataaattgaatccaggtcatttcacacttaatttttcacatccctatctacgtaccttctcacccagaattatatagtattatatatagtgagtgcctacgttaatatatatat

SEQ ID NO: 3718 - DNA, 1947 bp, Cannabis sativa
tttagtaatttactttatttttttcttaaatctttcaaaagttgaaggaatttagaaggagaccttttttcactgatcaaatccaccaaaggagaaaggaagcaagagacccaatttgttattgaaaataattaagagcaattccatcaacttctctatatatttaaaatattttattaaaattctatttttctctacattatttaaataatatatttataatacatataataaaatttaggggaattatcccatatactgtttttttaatttatttttttaaatttacggtttgagtttctaaagtagttgcaacgttagttgcaataggagtttttatacgattttttgttggaatttaagttgcagcgctaattgcaataggaatttctacgtaaaattccgtaaaaatgcaaaaaaaaaattattttaaagtgtaaaaaataaaaaacacccataaaatttatatattatatattatataaatacttatactataaatcaaccaaaagacactaaaagtaattaaacctaggaatattgtagctacatttagcaaatcactgagcaaaaattttgagttgtaatagctatctattggatggcatttttaaacacattttttttgaacttagttatatttttacttttgtatctattttacattaactattgtgagtgttctcattttttttttttttttccttcaaatttttacattacactataaatatatcttctttaaaatacattactaaaattctatttttttttttaaattttaatatattttattcatttcaaatatataatattgatatttatacataacccaatataaaaaaaaaagcaacaatattacagaaatattgtgagttggccaaataaatatttataaagtccaataaaaaaattacaaaattaactcttacacacaccttcaacccacacgatccatgcttcatggaaacgaaacatttgtgcgattaaaactggtcagcaacgatgaatgagcttcattagatcaagaaacaacactaattccggcgatgtcacctgagaagaagaacaaaatcaaatcaaacaacaacaattattgactgatgcaaaaatttgtagaaaaattggtttagaacataaattcaaccctaaattaaaatcaaattttataaaactaattcttataaattcaatttgcatattcataaaatgaagataaaaaagaaataaatcctgagctcccaatcaatccaaattaagtataattcgaaaaaaaaaattgtcactacagaagttaatattatacgtattgcattagcatcattttataaaatttcaatcctctatttattcaattccaatcacaaataatagagtaaatttgcattcatcaagcgcgacagatctagtagcattgtttttgatttttttgactttatgtagttgtattaccgttgctcgtctattttatcaacactctaataattgaagagataataattacgagataataattgtacaatagttttagtcttatttatagttatttcacattaacaatctaacacaaggcttgtgtacaaaacattcataatatgataatatggttagtattttcatattttaacattggttgagttcacgttggtttacaatgttcttactattattttttcacaaaatattcttaatgtacaagtcattgttcatcagtgcaacaaaacttttttaatttttcttcttaacgatgtccaattacattgttcatgtatcgttttacgtacactattcagattcttaatatttgtgctactaacatatcattatgacaaaaattaagactcaactttagcattacacgactcaaatagatcaaacaccattgaggtaagtttgtctatattacatagtggacatttatagttgggctaagattgtaaagtagag

SEQ ID NO: 3719 - DNA, 3128 bp, Cannabis sativa
atatatatatatattatataagtggttttatcgatatatattgagaatttgacgtttacaattaggtgatctagagtctagagaatatcctagagctcttcatatacagattttgtttatttatgtgctttcttggagaaaaaaaaaaagacaaataaagggaagtattgagtaataattattgtgagggggacaacttaattaattacttgacgttgtagtaatctcatcagagacgaatagagtgtttgttttggcatacatcaaaaaaatcgaaaccatgattatttattttggaccactttagtacgtaatcatttgatcatgatcagagttaaaaattaaaaaaaggttttcatgagccggaatcctgtcattcaaaggtcaaacgtttttcttttaatatacttagaaaaaaccaaaataaatttagttaccgaactaacaaataaacaaattaaataaaattattaaaattagtttggtgagtggtataaaaattgtattgtattaatcattgcatattgtttaaatgcaatgtgagttgtattatttaatgcataacaaatgatctgtattcacttgtattataatatttacaaaggatttagggtcgaccccgatcccgatcccaacccaagaccctggacccagaccccgaacccgaactcaaatcccaacccaaaccgggacctggaccccaaacccaaacccagactcggaccctaaacttagccctactaggactcaaacccaaacccgaaccctaacgcggagccggaccctaacctagacccgaacccctcagccggagccgagaccctggaccgagaccgggacctaaaccccggacccaaaccagaacctggccccgaaccctagacccaaacttgaatcatggtctcgaacctcatgttcggggtctaggtcccggcttgggtccgagttcagattcaagcctggtcctcgtttgggtccgaggtctaggtccaagattcggggtctatgtctaggtttgggtctggggtccaagtctcaattcgggtctaggtttcgagtctagggcaagttttgagtctggggtctaatttcgagtttgagtcggggtcaagttttatttgagaatgaaagatacaattggccctctcatctcatctttctaaagtgcatttattccaggatgtttgatacattataacgttatggttagttttgaattaattcactctctgtttaaaagaaacaatggcagaagaggatttatggcacttaagcttgacatgagtaaagtatatgatcgggtggaatggagattcttagccagtacgatgcgataatttggttttgatgatgggtggattagagtgatcattgattgtgtgacgaccccagagtatacttttctactcaatggccttcctaaagggagagtggtattgacaagagagttacgacagggatgtcctttgtctccttatttattcctattttgtgtagagccattatcttcattgatttctcatgcagaatctaaatctgagctgatgaggtttaggtgttctagatttgggccacatgtcactcattttttttcaaataacagtcttgtgttctgtagggctaatataggtgatactgaagctattaagcgatattaactaatgaggctacctctagttagaagattaactttgagaagtctgctatcacttttagtctgaatgtgttacaagctgatcgagatggagttctacaagttttgggttcgacatctatagctactcatgataaatatttgggcttgcctacgctggttagtgaaacaaaaaagcgaacatttgaggggatctgtgagaaggttaggaagcatgttcgagggtggaaacagagtttcttttctgatggtgggagagaggtacttattaaatcgattcttcaagctattccatcttatatgatgagtgtcttatgtggaaagttgtcaaaaattgaagtctattgttagacagttttgctagggttcgaatggtgataaaaggaagattccttgggtaaaataagaaatggtgtgtcagcctaaggagatgggcagtcttaggttttgggattttcacctttttaataaagctcttttggctaaacaactgtggtgattacttatatacgcagaatcgttgcctacccgaattctgaaatataaaaattttccaacttgttatatatcctagaagtcactgaaaaggatggttcatcttatctttggtctagtctgatttggggattggatttgcataaatgtggtcttcagagttctattggagatggaatacaagtttgagaattcagagtcccacggctcccgcgtctgagatcttttcaaccaatcacgaggagagttaatgatgatcgtcgggtgagtgaatttatcctactatctggtatatgggatgtggggaagcttcgagaggtatttgtggccatggatgtggacattatttttcctattccattagcaaggcaagaggcacatgatggctggatgctggcactatgatcgggatgggatttataatgttaaaagtagctatttgctggcgtggtcgcttcacgttaatgagggagtatcagactcatcccaactgctttattggtggaagtgtaatatccgctaacatagaagggtatttttgtaattttttttaccgctaagagttttttttattttacatatttatgggttgaaatatgtatgagattttcgtgatgatataataatagttaattttcttggcatgtgcataatacctgataaatatatatatctggatattaaatgatagtgtgatttgttgattttggtacatattattattggtgtggaaataataataataatgatatgtgttaacttataatatagtaaaataatatttgtgatcattattggtaaatttatattattatagtggtaaatggtatatttaacacacttcttcttcttcttattattattattattattctaattattattattattcctattattattatttttattattataatactgttgaacgatagtgtgtatatacgtacgatacgaaggaccgatttttgtggaatga

SEQ ID NO: 3720 - DNA, 711 bp, Cannabis sativa
aatactttgaatctgtttctgttggtctttgtttttgcttttaagtatctctatattgaagtgcttgaaatcagtcaattgttgtattttcttactttgtttattgtcaaaaatacagggtgagctaattaaagagggacaagtaattggatatgtggatcagtttggcacagagcttccagtgaaggtaagattcctttttgagatcattcttggtaatcatactttcccatgatggacatatgtcgtaatggttttggccttttgttatgttgagcagacagacgttggtggagaagttttgaaggtcctcttcaatgaaggaggtaaaatttaaatgcttatggttgtatacgctaatggttttggttcattagagtaactttattactttgcccaaaaaaaaaagttgatatttttatattaaaaaaaaagcattttagttcattagatcttttataactaaaaaagattacaggcttatatctctcggcgataatgtctgttacctagagttttagtgaagtgttatctatcactgaagcaatagtatggattttgatctggttttcattctaatattttattccaatggttttggtttacagaagcagttggttacggagacccacttattgctgtcttaccatcatttcatggtatcaggtgaagagcctcgcctctttgcaaagcaaattcgggtaattgctt

SEQ ID NO: 3721 - DNA, 2201 bp, Cannabis sativa
aaaagggttaatatatcttttgaaaatttaggatgaaagattaaaaaataagaatatgaattccccctatatatagtctactgaaagttttataactaaacactcacaatagattctttaaaatagagaagttacaaaattcaaagaagcttattaaaaatatgctacatcatggtctaaacttttttcattttaaacttcctttaaaatttactattcatcctctatttattactctaaacatattttattaattttttttttaattttaataatttttttgaatgagaatgtgtgaagattcactttgacccagcacacaaaaagataaaaagaaaaaaaaaatatttcataaatatggtaggacccacattttattaaataaactaattttctctcattttcccaccaaataatctctctttcccacttctctttcactttctctctcttcaaagattcaaagaagtcataaccaccaccaccaccattttttggcgaccactctctggccaccgtccggctccaagcgccaaaccgttcaaacccccaggcgtcaacgacctcaacccccaagcggcgccacccctttcgccgtcattagcacgagattgcaagtcaaagtttagaggttcaaacttttaacggattttctagccacctccagtgtcatgcagtttaacgagtcgtcttcaccacaagacttagctcgtcgaggagaacaacttacactaagccattttgcccaacccgctactttttttggtgacgcttttgtagctctaccccttttcggcaactttttggtgatattatgtattgttttggcaaatggttggtatgggtttgatctactcatcgaggtggttattttgatatatactactcctatttcggtgtcatttctggtacactaatttttaccaccaccgatagttaatgtaatgttcccgcttcaagcctccattaggcccttatacacgagtacgtcactctggctgcttcatggactgaagactagcccgacaaactaacacaagtgtttccagcgtgctttgtcctcactcgcatgcttcttgggaaaacttctcaggaggtcaccgatcatgaaattactctaggtcaagcacacttaactgtggagttctttcgtgatgggctgccagaaaataagatgcaccttgtttttcggtagcccatcatgaaagaactccataattaagcgtgcctgacctaggataatttcaggatgggtgacctcttgggaagttttctcaggaagcgtgtgagtgaggacaaagcatgctggaaatactcgtgttggtttgtagggtcagtcgtcagtctatgaagcagccatagtgacgtactcgtgtataagagccatcatttagtgggtgtaagggcccaatgaaggcttgaagcggggacgtcgacgttacagttaatatgactgcttaggtgaggttttagaactctaaactttaaatataatcatattatatgtcgttggagatgattttgaatatagaatgcaatgatgataattatttagccatctaatggtataggtgagagtaatttatctaattcaaattttttcgagtcaaattctgaattaaaagtctttgtacagtaggtgttacaaaaatattaagttcattattggtctaagtattcactgattgatgatagagcttaaaagatgattgtgagcttatgttacaatggagttgaggtaaggaaaatattactcttgtacttgcactttcattgtttgaatgctagttgtagcttgttgtgtatggagtggaaagagttgattgtaatggtttcgatggaattgttattaatttgttgatagattgtacatgaatatttaaccatgttctaggtgcttttaggtgtgattaatgaccacacatgtatgatgatgtggtatatgtagagcagtgcacgataagggtgcactagtcgttggtattgcgttcgaattatgaatgtatattactccagacttgtacgaatgttggagtgggtttgatattgttaggtttgtgtgactgcctttttagtatgataaaatttatttaattgtactatatatatttgtgttagtgtctgtgcatggtgtcttttccttattgggcttcacaacttactccttatttatttttcatgtgtagagaagtaaggtaata

SEQ ID NO: 3722 - DNA, 1931 bp, Cannabis sativa
aaatagcatcatcttaactgactacgtagtaataaggaaagcttaaactgattaaagaagccaactatttccatgacccctaagtcgaacagagctatgcaaacttacccacataacgagactttcctgccccttaggatattcactgttgattggccttctaccagaaagaagctcgaggagcaccacaccaaaagcatagacatcaattttgtcgcttacttttccatgcatgaagtactctggagccaagtagctgccacataaaacaagaattataagttcaagaatatcttgaggcatattactatcttctgggaagagaaaggatggaaatacacacccaaaagttcctgcaacgtctgtgcaagtaatatgcgacgaagctgatgcccaactagcaagtccaaagtctgagagctgagaaatacatgacatttagatcacaacggaaggcttcaaatgacgaaataaaggtgaaaatattgaaattacagcatgcaaacctgtggttcaaaatcatcggacagaaggatatttgaggacttaacatccctgtgaatcacaggttccttacaaccattgtgcaaatattccaatgcctcagctacgcctacagccacataatatctctcttgccaaccaaatgcttttccattcttcttgggaccttgataataataaccatccaccatgatgagttcaaacaagccatgaataaacaaaaacaaaaataataatatgaaaaattgatttaatctaaaacagaaagtaattattataccatgaaggttctcttccaggcttcctcttgaaagaaaatcatataccaagagtaaatttacatcttcaaaacaaaaaccgaataaggatattatgttcttgtgatttagacccgtaataatatcaatttcctgaacaaattcttttatcacatcttctgatggcttcaacattttgactgccaattcctttccatctgagaggcatcctctataaacactactgctgccacctctgcctaccatattttctgaaatcataattccatattcatcaccaagaacatttaaaaaaacaaattaataagttcaaacttcaacacaaccttaaaaccagagcactcaaagtaagagcaaaaacaaacctgggatgaagttagatgttgccagcaaaagttcctggaaactgaataatctgcaagtagctgagtacttttcatgtaaattcaacaattctttaggaaggctctctaagccaatgttgggtaaaagaggagaggtgtccatactagagccaaatggcacaatagctccactatctccatcaagattagagcaatgatcctcatcctgaggacacagactgctttgcttctgatctggataaactactgctgaacaatgccaactcggcagtctcaatatccactgtaaaacagacgttttcttaacagatttctcaatgaattgccgctttggtaaaaacattcgacggagcaatgcccaaccaggtttcaagcattgtgaatctcgaatcaccaaagaattagaaggatccagatgtgcttgaacaggtaccaaggctaatgaattatcctcagagtcactggtggacaaattgtcttctaaatctgattcggtggtggaattctccggcaacaccgtcactgttgtacagctaacacaatccctcttctgggttttgtttctacacttggaacaggatttgcgtatacgatgatgacatttatatttatatctctctccctcatccactacctttacattcatggtaagtgatttttgaagtagaccaagatagttatcactaccattcgactgatcagattctgttaaagaaaaaacaatgggaaatgaacaaatatataaatcatagttccaagattaataggcgatttcatagtgaag

SEQ ID NO: 3723 - DNA, 1495 bp, Cannabis sativa
gtactatgtttaaacaatgtattacatagttttatgaaaaaaaaaaacaactcaaaataatggaaagtaagcattcttttcatttcattttattttattttaaatctcctttatgaactacactagaaactatacaattcgatatattattaaataaacatagccaggaaatcttcactaatgggacttgttaagatctagacttgaacagttgtatgaccctccattctgtgttttgtaactttcatgcttcagctgaaagataggaaaaataacatatgactacaaaatacaaattctattgaaaagaaaaaaaaaacagctcaacttagattaaaaagaatattaattttattgttatcattttaaatggaaatgaaatcgaaaacacacagaaatagtaccaatctttttattggggcattccaggggagaaaactagaatgaaatgtttatgtcatcttttttttttttgaaggaatgtcatcttaattccatgctaaacaacacaatcaacttaattggctgttatgttaaaactaataaactactaatacccaatcaagaatgacttttgttatttcttattgtgaagattgtcccatataaaataaaatggtagggtattgaaccatatacaagaataaggactactccacttatcgccaattagttttgagatggaactctatgattctcaacataatattagagtcatacctgcatctatacaaataatgaccatgtacgatttaagattggtgagcaaaaaacaaccaccatcttgagaaagaatattgtgggcattgtcttacatagataaaatagtagagtattgagccatatataaaaatatagaccactccacttatcaccaattaattttgagatagagatattacatgctacttgtacatttgtgtatgcaataatagcacattatgttactactcattctatattttaaaaaaggattaccttcttgaggatcttcttgtgatattggaatccctggtgaaattgaacaaaacaaaattattgtgaaaccatatgttggagtgagtacacaataatagcacatgagtaagttgatgtacagaaaactataataactgccatgtaagtaaggtaaaaaaaaactcaagtctcagaccattaaagagtaaacacataattgaaccttttagctaagtgcagttttgttcatctcagtaataactttacatatttaccttgtcagttccataaatgaaatcacagtaggtaaaaactgaagcaaagttactttgactatgttgtccaattcggtgatggtaatcatgatactcagctcctccatagaatggaatacattttgttaggctccagggaaagtcatacctgcatttgaattgttgattacaattaactaatacattgaacagaaattcattgaatgaaatgaaatctttactacttgttaagggtatgctgttgtatttctgttagtgacagt

SEQ ID NO: 3724 - DNA, 1343 bp, Cannabis sativa
cctgcctctaaacttatgtgtggttccagaagctatagacttatgttggtaaggtctggggagaagaaaatctgcttaagtgttgttacggttctagcctaattccttgacacgggatgacgcttggaatctatgacattttcaaacatctctcccaaaacccaacttcataaagtgtaaaagcctaggaatgtctaaaatgtagaagcttccccttctacggagaaaaacattcctaaaatagcattccatgagcaatgattccaaaggaataatcaactaccgaagacatacaaaaagtgccaaggctttgagactttctggtgatccgggaacagtctaaatgctggtttgtgatgtcaagatatttaattagtcaaagtttgtatttactatggcagtagtgatcctacttgaaaacaataaattgaagtctttggacgcttccaaagtcagctgaaggatcaaaaatttgtgaaaaggtttgaagtgcgggctgttggaaccatatacttcaaaacaacctaacgtgacaacccttaaaactgcctaacaacccaacgaatcagaaataaagcttaaaagaaaggtataaaagcataaatttattacaaacggcccccactgttaggacacaattaaattttctctgcaaaatgaggaaagcaaagaaggaaagggttaagaaaaaaattgtacgttcttggactcagggaccactgtctcggtcggacgctcgaagttgtctgctacttgatggattggaagaatttactcctaacaccctctccatggtctctttgtaaagatcatgaacaactttcataccccatatgagacaagtttgttgggcatagttatcttccagcaattgattccctttctttaggcctttaatccgtgtcttggatttcattagttcaacaagaagagtcttgttggaattacatagtttgcggttgtcagctttgacatgcttaagctccacgacaagctgtcaacctattctgcaacactttttgccaacagagctacctgttgcaatgaggaaaaataagaaagcttgatataatgatagaagtaaaaatagaaaagttcaaaaccttgccccaattgcttgttgtttggtggtgtgagcttgggaaaaggtgtcaatgttgctgcaagtttcccatgtctccaggggcaacttggacgcatcaccgaccacttgatccaaaagctctgctacaaaaggcatagtctcactccccacattgggtgccaagcatttgtcgaaggcctctacatcaatttttgtcccggtgaaaatggaggcattaaggccttcctcacagcagaga

SEQ ID NO: 3725 - DNA, 983 bp, Cannabis sativa
aaaggaattggttgacaaagtaaattaatatttagaaatctatttaacttttcagctatgaccacactgcttgcatttaatcgctttattagattactctcatagttataatgaataattaataaattggatctagattaactgcaatatttttcaaattgtttggaattggattttgtccaggttcacaattgtaatctttattgtttgtgaaaattcttcacctgtttcattaaatttcatacttaacatcatctatgtttcttaacatagcaagcatttctgaactaatatgcattacaactttaccatgcaatatgaagaacacccttggatacaaaatatggatcgagttcctaatgttagccttggagaacatgtcagaataaggatcaagcagttttcattaatgaataaatttaagaagagagttcttagagtaagtgtttgaaccttactttctctgttatatattcttgtattatgttagaacactctctcaagcatttgtttcatttatttatttcaggtggtagctgactacttgtcagaagaagaaatagatgggattaaacaaatattcgaattgatggatactgataaaaatggagatttaacatttgaagaactcaaagagggattttgttccattggtcatcctattactgattctgaggtgcagatgttaatagatgctgtgagttatatttttctttcagtttcttacttttatctaatcattaatttcacaagtgagattttggcatcaaatgttatttctcaatctagccattccaaagaaaaaagaaaaaaatggaattgattggaataacacatcataaaagtgctagagaaaaaagaagatggaaaagattcctataattgaagtaggatcatactaattttagagaatcagtatactaattttttattgatttttttttattgttcaaatggtgtatttcatttagtatatattgctg

SEQ ID NO: 3726 - DNA, 1778 bp, Cannabis sativa
aaggaaaaaagagatagttccttttattcatatttcttccttacttcctctattgtgagggtttatttatcaattaattttttagtgagggcttttatataattttatttagtaatttaaaatactttcccttgctttttcgtcatattactattagggtaaatgctatttttgattctttttttgtaaaaattactaattaaactatctattttgataaataacaatttatagacgtttttcaaaataatacaaaattaatagatcttgaactcaatttttatcaattttttcatttaacataatcaatttgaaaccagtatctaccatgaataaataaaaaaaatataattaatttagtcagaacacttttaaatttgattatataagctcaatgcttattttttttttataattttcaaaaatataaatctaattattattatttgacaagacaaaaattctaatcaataactattattgaaaataatatttactcatactattatatatcaagctattatatatacatgagttgcttatacatataagtgatataattatttttattatataagcaattatatatatgaattgacaatttcacataattttttttttagattatgaaaaaaagtacatcatatttttgtctttatgtttttatatttatatatggatgaggtgtaaaattcatttggtacgtatatgcatgcataattatttgactttttattaattagtttttttgaccaagttgccaacttgaaactaaaatatgaaacatgaaatcaccaacgacaaaactatcaacgaaaacgacagcatttagtacttttttgtgtgttagtgaattgtcattttctagaataaatggtacggaatatacagtatctatatatatacatatatgtgaaaacatattgaataagttggtactacttttattattatttaattaataaatatgcaatttaattacttggattgaatatgattaatcacaacaacaattcatcaagatattaattacacatatatatgttatttataataattaattctcatcaagaagtagttgaccaacctaaacaaaaatacaaacataattatttatttatttaattagattattggtctcctaacactaatgtcttcatcagaaacatcaacaatcccctcacaatgaaagctaatatccaagaaatagagcatgaaaaccaaaacaaagctgtaaataaacatgggaagaggaccgaatatccataagaatagagcgaacgcgatgtagaaagctcgtaaccctaatgaaaagaaatagcctcccatgatcacgttgttcgctacgaaatcaactagtagttgttcgtgttcatcatcttccgataatctcttgtacggcatgttaattagagtggtcgcattgctataataactgcaaaacaaaacacgcaaaaatgttaaaaaaatactttaaggtgtccaacacaataaatatttatattattattaacgtaaataaatacctgatttaaaatatttgagtttatataactttaaatttaatgtactaaattgcacccacaccattaataatatttcatgtcttagagtagttggaccttattatagcaaatgctccacatgaattggaatatattaattatcttacataaaaaaaaaataattactttggagatgatcattttggtaattttataagcttaattaatgtaattactctaattactattaattattgatgatttaatctaata

SEQ ID NO: 3727 - DNA, 545 bp, Cannabis sativa
cccacttggccccgccattgtttcccgactagctcggttgacaggacaagagccgacgtgctgatcgtggagcggctgaagccacagataagccgcaaagctgagtaagtccacaagttatttgcgaaagcagtgaggagagtggagatagccatggctagacaggtgaagcaaagcattttctttcggccaagccacgagtctgcgatagtggcaaggacgaacccgccaataaggcagccggtgaagaaggctgactcgggcaagctggtgaggatggatccagcgcactgtaaaccccattcggatatggtagatgtgtgttgaggcaaattccaaggccatgaataatctgaggatgatgatgagatgttgttgcagttggaagagggttgatcgtctgcaaagatggaaatgaatgtctgttgagcatcaaagaaccatgcaagggagacaaggatgggttggagagattgagcccagctgatgtttccaatggagttttcaatgattgagtccagtgatggggtttttttttttttttt

SEQ ID NO: 3728 - DNA, 588 bp, Cannabis sativa
tgttgattgggggttcaagaattttagagcagactcatcgttatttatgctgcagcagccgaagttcattctcatggtgctagtgtacgttgatgatattatagaacggggaatgacaaccgagaaatagacattttcattagcaaacttgacaaaacttttgctctaaaagacttggggcctctcaattactttctcgggatagaagtttttagagacagcacaggcatctacttgtcacaagctaaatatatttctgaacttctgcagaaacacaacatgatgaatgtgaagccttgtcctactcctatgacagcagggaaaatgctatctctaactgatggtgaaactttaaatgatccgtttatgtacagaagtatgatcggggctctacaatatttgagtcacaccaggccagacatctcttttgcagtgaataaactcagtcagttcttgaaaggaccaacaacggcacactggaacgctacaaaaagagtcatgcgatatctgaaagggtcagtctatttttgcttgcacattgttccgagtaatcacttaaatcttgctggtttttctgatgcggattgg

SEQ ID NO: 3729 - DNA, 610 bp, Cannabis sativa
gattctccaaagactaaagtcattgtgtcctgtgatcatcaacttccaacttcacactagccattcttgatactttcttgaattctttcaccaagttcttgatgaatttgagatcattggctttgataccacttgttgttgtagattaatacaccaataaaagaacaaaattcaagataaacaataaagacaataagaatcaaacatacaaagaaattaaaaactgaattaagagaaggagaagagagttgggaactgaaataagcaatacaaccttcaacaatagtttccttttttattaatcaccaatgtgctttacaatccaagacaagagcttagtctaaaacactttcaatttagctcacatgagagacattagtcaaattaaagtataatgcactctttaacatccctcaaatacacacaaatacaatattttgttcagttaaaaaatggatgggggtgttagacttctatttacagtacatagattaacactaggtgttataacagaaaaataacagaaattaaagatgcaactactaagtgttgagatgcaactgaaagactgtcagaatagctgaatcacacaacatgtaacacgtcgaag

SEQ ID NO: 3730 - DNA, 664 bp, Cannabis sativa
atgttttacttatgcaccccctaggcgtactgaaagagatggattttgggaatcgatgactactgatgtgaatggtttcagggaggcgtggatggtcatgggggacttgaatgcggttctcaatcaacaagagaaattggggggcagaccggtttgtgagaatgaagggaggggtctgagaaattttatgttcaactgtggtgccgtggatattgaaggattgggggcctactatacttggacaaatggacaacaatgggatcatctggttcgtgaaaaacttgatcgagttgtttgttctaccagttgggtaactcaatttccgaaggcaggtactaagaattatcccattcgacactcagatcattccgctattgtgcttaatacaatgatggacgctacaccaattaaagtccctttcagatatctggatgcctggactatggatgctcagtgtcctggggtaattgaacaggcgtggcaacagatctttcatggttatcaaagctatgttctttgctctaaacttcgttgtacggcttccgccttgagtaagtggaacaaggagtgctatgggatttgcagaaagaaaattgagctattagaaggtttgcttgtggaggttcaaaagcgaaacccgtctcctgaaaacaaccagctagag

SEQ ID NO: 3731 - DNA, 627 bp, Cannabis sativa
atttcatttagaaaatattcttggaattgtttcttgttaaacttgcatataatgttttttttttgagcaatatgtaactttggtgatgttgtaagcttttattgtatttaggcaattggaagcgtgcattttcagctgtgaggcatcttggtgaatcccttggttgtgcttctgagaggagatgcagcacagaggattgtagcagtattattccactaattcctctgtcaaattattttgaaggacttctccaaaaaagttcatctgacaaaggattcaactggggtggaaatggaggtttaaccacaccatcttatcagtttctgatagggtcgtccgagtttgcttataatttggagtctgattcctctaataaaattttaatgtcctcatcaacaaaatctgaactaaatgccttcattgagccacttgagaatttctacaagctagctgcaataaccactgaagaaaaaacacaaattcttgctataatagatcttcttagtgaaatgactaaaccaaactccgcttatgaaagtcttgatgaacctggacaaaggtaatcattctttaatttttataagatatcccaacacttttttatcaaatgtttttatggtctgtttt

SEQ ID NO: 3732 - DNA, 1922 bp, Cannabis sativa
taatcattgaggttcaatgctcctttcttcaacttctggagtttggttctaaactcaaggattttagaagaaaccttcagagtgaagtgctgttcaagagcttttcagatctgtttcgcagaattgcagcccaacattcgagttagcaaactctctgacattgaagataagagccaagacacaagaagttggtcttgaacctcccagttcatgtacttaggattgaagtttagtgcagcttggtcagcttcactgagaaattgaggagaaggcagatcttggatgaatttttgcagcctgtttccacgaatcgcagcaaggatttgttgtttccataggagatagttgtgatcattaagcttgatcgagatcgtataattgaagtgagtaatagtgtcttcttgatccctgatgcgatttctctgagtcaaaatgggagctccttgatgagcaggctgagagtttgagtttccaggaccagcagtggccatgttcgccattaacgacggccatggctctgataccatgtgagaggtgccagacctcttagccattaaaacataacagagaaaatagagaaaagaaagagaaagaggaagaaaggaagaggagacaaaagatgtctctgatattattgaataagcatttgttataagatgatatttatacaatgcacaactgtaacaaacacctaaccaactaaccaacaagttaaccaactgaagacagctgacaactaaccaaacctaacaactaaccgaaataacagaaggaataacaacctgtcctaataatatataataccagggccatatgcttactcccactaaaccgtgatatatacacaatcatcaaatctgaaacaataatgtgacatttgcattggaattgcacttcatcatcttgattacttagaccagcaagattcacagcaacatcatcattgactggaccactaacttaattttccaccctcaaagcatcatcttgattacttagactactaagattcacaacatcttcatcattaagcacaccaaagcttcatttgccacccccacaacatcattttaatcgtgaaagaaaccaggagccttaagcaataatacaattatgggacccttaatagttaaatatagttttgtacataagttagcaatagattaaagggaaatttacatcccatacttaatatttcccaattctttttttactgtaccacggtaaaattttttttttatactgtgtacagctactttttatactgtgattatatgatcaatttttttgatactgtatgagtgacttttgtcacttctatcaatttttttcttcttcccaatattatcactcactttaccgccatttatctctcccatcatttcattcttctcctatttttcattatttctttcatccttaaggtcttcatctatataatgtttgtactgtttaaaaagttttgatttgacaaatggtatcacttttgtgtctgttttattattaaaattaaaatgaagtgaaagtgatgagttgtcatgtttgtgacataattttttttttattaaaaataatgatgaaattgatgcgttatcgcttgtggtagatttttttttttaaaaaaaaactattgatgaaaatactcttaaaatcttcttccacttgttttatctttaacctaaaagcatctattctctcttaatacccctctccttttgtagtgggtatcttaaaaaaagagtatttgaaggaggaagaaaaagaagaagaattgagaaagataagagttttgttctatctctaacttaccatctgaattcaacaatttcagctttatctactcttctctctcaatacccttttgttacttatctctctgtctctcatcctttcccttttctcttctcctctctctctctctc

SEQ ID NO: 3733 - DNA, 1633 bp, Cannabis sativa
cgccatctacggcgtccccatgcccgtccaaccaatgaaatccatagctgctgtagctttatcaaaccccgattttggtattccggagattatggctgccgggatcttaacaggcggagtccttttcgttctgggtgttactgggctaatgcagctcgtttacaagctgattccattgagtgtcgttcgtgggattcagcttgctcaggggttgtcgtttgccatgactgcggtgaaatatgtacggaatattcagaacttgcctaaatcgaaatcgattggtaagaggccatggatgggtttggatggactcattttggctcttgtttgtgcttgtttcatcgtcgttattaatggcgccggtgaagaacagagaaccagaaatactagagaagatcaagaacaagaaattctacccattaaccgattcgataagttgaagaaaaagtttaagttagtttcgattccttctgcgtttttagtgttcttattaggtgtcgtttttgctttcgtaagaaaacccaaactcgtaaacgacatccatttcggtccttcacaaattgaggtagtgagactcacgcgccgcgaatggaaggacgggttcgtaaagggaacaatccctcaacttcctctttccgttctgaactccgtcatcgccgtctgcaagctctcttcggacctctttcccgggaaggatttcacggcgacttcagtttccgtgacggtggggttgatgaacgtggtggggtgctggtttggggccatgccgtgctgccacggcgcaggggggttggcgggtcagtacaagttcggcggaagaagcggcgcgtgcgtggctatactcggcgcgtgtaagtcgacgcttgggttggtgatggggacgtcgctggtggcgatactgagtgaatttccggttggggtcttgggggttttgctgttgtttgcggggattgagcttgcgattacttcgagggatatgaggagtaaagaggagtcgtttgtggtgctcgtatgtacggcggtgtctctcgtcggatctagtgcggcgttgggtttcgtttgtggttttttcgtttatggggttttgtgtcttagaaaattgggatcgggaaagtctttttctgagatatggatgaatgggagtgagactctctaaagctagctttaaattttaaaagagaagtgatttttatgaatttttttttcacttttaaaacttgtgtatgaacaagattgtataaatttaaaataatataaaaataatactttgtatttttttataaataaaaactataaaaatgttgcaaaagttgtggaacataagtaagaaagtaaaaataaaagaagaaaatataaaaaaaagagtatagagtgtaatttcctcaatatatttttgtaaccagtcgactctgcaacttagtgaactataaaaaaaaatagtctttatttaaaaaattatatgatatttttctaaattaataaattttttaaaaaatatatttttttgctatgagttaggttggtcctagatatagcccgtttatacttagggttaatcgaaatacaaagatttgggtgtaagttgatgaatacttttttttttaattcatttaatcaaaaatacttttatttt

SEQ ID NO: 3734 - DNA, 1350 bp, Cannabis sativa
ccatttttatcgtaccaacactttagaatcaatcgaaatgtaacaataattccaccaaaaagaagaaaaaaaagaaaatattcatctttgtatttttgtacaaaaatcacacaaaagaataagaatctaaaattagtgacaaaggaataaataaataaaataaaataaataatccgaattggccaggttgactctttttcgttgaccccacaacaacagccgttcaaccaatcgcattaaggcatggtacagaacacgtggcgtcttcccattggttgaatcccggtaactttaaagatcaacctcgttcccaaacttttcctttctgagtcttcacacaaagtggacacgtcatcactttagtggatgtgcatatggataacgctgtgggacccacttgtaaaaaagcgccacgtgttctcatccatgctggaaagttcacgttcataaatgtacacgtcagatctaaacgggtaaagtaccaaaaaaaaataaacaacgaagataaagagagaaaaaaaaaagctctctcagattttacaactggattttctttccctttctcgggaaaattctgcttatcttttaatgggttacttgaaaggacaatacagagtttgatgatctatccccacttttttttttccttctccagttttcccgggaaacaatcagaaaggtaagatttcagtttctttaattgttaaagatttgatttttatttgaagactttgagctaattcattagttaaggtaagatttgaaaccccttttgtttttcatcttaatctcttttagaagctttcacagaaatattgacttttttttttcttcttccttatatcagatctttgaaaattgaagtaagattaaactagctttagttagtttgggaagaaaaaaaagtgtttggagttgaaattccaaatttcttggaatgcaaaattgaaaactttcctgagaaaattagtgagaaagaaaaaaagaaaatggaaaaaatatgtgaattttgcacagaatttaggccagtgatttactgcaaggcagatgcagcacacctctgcctctgttgcgacgcgaaagttcattccgcgaatgccctttcgagtaggcattcgaggatgatactttgcgattcttgcagatttaggccatctagagttcagtggttagatcagcaaatgtttgtttgtgggatctgtgatgccgccgcgctccacgaggcctcgggagcgcttcaaaagcgagccatcggaagcttcatgggatccccttctgctaaggattttgcagccttgtggggttttaaattaagtgatgatgataatgatgataaacaagtttttgtgg

SEQ ID NO: 3735 - DNA, 763 bp, Cannabis sativa
ttgtctattaatcctatactattttcttcatcattttattgaaaaagaagtagagtactctaaaaaagaaattacaatataaatttccattattcgataagatcgatcacctaattaaaagtggtgctattagctatagaattttttatcaaaataaaagaaagggggtttaaattaaataaccaaaaacccctcttatccataatcaatttgaggtataaaaagaaaagtatgagagccactactctacaattgtgcaacatggttagtgatctcttcagggcaagattgagcttgaagaagctctaaacgggtgaaaggatgagcaaattgtaatatgtaatcttcatctgtggccacacaatcataatcagtaatcaaaagaaatccaatttcgcttctaaatcactttttaaaggtttttcaacatgtcctgttgtatgattctagaggttaaaacaacttactttctttaactgttccatagagccagcacagcacctcgtcggcaaatgctaggcatactcctccctgcaaaccagtttatcagaactcactcgccattacaatacaagtcatgaacttcaaaaaaaattttaccatcaacagaatagtctgattctacaatttgagaaaatatcaagattacaaagagagattgtcacaatcatctgtaattgctatcacatctgggatagggtgtgctgataatcctaaatctaactttgaagaaaagcatataaatttggcagccagaaaatta

SEQ ID NO: 3736 - DNA, 1425 bp, Cannabis sativa
cataataaatgtaatttcctcaaaatttaatgaaaccaaaacacaaatttaagaaagtactaccattgccactgacagaggcaagcatagtactgcagcagaaagcagttttccatattcaacaactggatcatggcagcaagtgaaagtggaaactcaataaaaaaatatcctggagacatcaatttacagctgctgatcaagatagggatccttaggagttcttggagaagcaatatactcggtaacacccgaagcataagttttcaaccaggaagtgctgcgagttaaccatccagcttgtgcttgctcctgtacttcaagcatacttttcctttcttcttccactagtatgtcaagccatctcttagccataaaaactttgatagcttcaaccccatcattcactacctcagatggcggaatcacaaggggattctgctccaagttgagtttggtcaagctgtcgagacggccaaaggtatcgggaagtgcatggatttggttgttgctgagatcaagttccttgaggttggttaaatcaccaaacgtttctggaagttctgtcaagtcactaaaattactgctcaggttgagaacttcaaggtttgttaacttcccaattgcttgtggaaggccacgaatttcgttgaagtgagcatccaaacagctcaaagatctcatctcacaaacagaagttggaagtgaacgaatcttgtttaactggattgaaagtctctcaagattaaccaattcataacctatgtttgttggcaagtatgtcaggttgttgtagctcgcatccagctcaaccaatgacctaaatcatttaagatgcagaaagaaatatttcaatttacgaagagcaattaaagggataagagtaagataataatgcccttccttttataggtagagaaaaagaaaatttacctgcagtgagcaatggtgtcaggaagggcacttagcttgtttcctgaaacattcagaatttttaacctctgtaacaagccaattgagtctggcagtgacaccaaaagattagaagaggcattcaactcctcaagattctccaatccagctattgaatcaggaatgaactgttaaccaaaacaagaacaaatcagaaaacaatccctttgtactgttcaaatctcaattacaaaacctataacccttatagtatgctccctaacctaaaaaagatgttgtaactaaattgaataacatgacagaaccacaaagggatcaagtgaaagtagcagagctattcaattatcattccataaccatattagaataatagtctaatacaacatcaccatagattcatttcaatgaaacaaaacaaaggaaatcaaatcaaggtctttcaaggtaaacatgttaagccctataaaacacactagaatttcagattcgatg

SEQ ID NO: 3737 - DNA, 2433 bp, Cannabis sativa
aatttccttgaagaaactccaaaggtactgttgactcaaaaatctagattgagattcctaagccacacttgcttgctagattgacaagaattcatatatttgataagtaaaaataaagaaaggcacaataatttatagtagttcactccctgtatcacgataataatggagctacatctacttcgagtttttatttctaacgagatagtattacagaaaaaggctaagtgtttaggctctattttctagagagagatgctctgaccttgtgagtagttttctgaatatgagaaataaactaagagagctctccttttataggtgaaagaggtccttaaaaacaggaataaaataacgaaaaaaataccagttggttatttttgactgtagatgatgatcaaacggtgaaaattatcttctaaggttgatcgtcaagtttcaaagcctggtttgcgacaataggacttgctttgggtaagctgaagcttatttttgtaactcccttgtgggtaaaatttgaggtctataactttagaaatatgatttaagtgtgagacatgacttgatagaaaatttaattagcttaaaaaaggttaaatttcatcaatcagatcaatattgaatgagttatggcaattttactgaaggttgtctcaagttaacatctagcccccatgttgacgtcttagcacccaggttgacatatgacgtcaacttggacgttgggtaagtaaaaaaatgtccggagaaagtactttatgatgcctaagtgatattttgacatcacttaatcggtttctgtgttctggcaaagctagttactagttcttggagatgttgttgttatgtggaaatgagagactcaaaactcttcattattttcgagtggttttcccatgttggaaatgagaaatgcgaaattgtaaatttgacttctctgacttcatggatcataattattgtgaaaaatttgatagacggtcgaaatagaatcaaaatctgataagcaaaacccaacgcaccaggccatttgtcaacctgggcgctcggtactcattttagagcttccgtaatgtctttttgatacttccaaggctcttgaacttgcggacgaggtctcttaccctatttttgaccattctagattgaatggtcgaattagatttgacatttgaatgatcaaaaccaggacaattacaacaatcatataattcatcccacaaatattagcaagtaaactcacacgatcagaatcaaataatcatacattacctatataattaaatctaggtcagcacggatactcaaacacaatgaataccaatataaagatatacaattatacacaattaccagtctaataataattatagttgttatttcataaagtaagcattctcaccattttcttaacaaaacaattttgatgcccaatctatcatactaatgtatttgtcattatttaataaaacaaccctgatacctaaaacttatatccaaatgtcactattattattgaactaggcaacatgaatacccaatctctggtatccaaatgttatcgtcgttgtcaaactagaaaacctaaataccactcctggtatccatgtcgctgcccctacctaaacaggattgtcgacaagtaaaaaacctaacaatagtttcagtttagagtcatgacttttctacaactcacaagaataacctaaataccactccgttgtattcatgtcactgtccttatctaatgagataaccgacaagtaggaaacctaacaatggtttcagtttacagtcatgacttttcccagttgtttcataggaataaccagaataccactacccagtattcatgtcaccattgttatctaatgagataaccggcaagtaagaaacctaacaacggtcagtttagagtcatgatttttctcggttgtctcagaggaacaacccgaataccactactcggtactcatatcactatcgttatcaaattagataatcgacatgtaggaaacctaacaacggttctattttagaatcatgatttttcccacttgtcacacaagaataacctgaatacaactccctagtattcatgccactattgttatctaatgagattaccggtaagtgggaaacctaacaatggttatcatttagagtcatgatgtttcattcattactaccatgactgcttcttcattttcataacggtaatgaccgtttctttaatttcataacggtaatgaccgtttcattacttttcaatatcaacaaattcatagacaatcatgatcgtatcttgacatgctatgtggtacaaatatacttttcttacctcgagttttgatttaggtgtgtcgactaacttgaatggagaaagatcaacgatcataggccctatgtcacaacaacgaaagaacaaaaaaa

SEQ ID NO: 3738 - DNA, 1186 bp, Cannabis sativa
tacttgtgtccacctcatggatctcattaatgttggtatgtggtagtttcaataattatacacgatgcattatataagcaagccatttgtgatcattatcactaggtaggcagagggataggagtaaaaaacaagaagttgaaaatcattcttgagttgactatatcgatgtataattggttaacaattattcatattatttcttaaattaaaatgtataagactctatattgaaatagtattaaaagtagttatatattgtgaaaaaataatgtcatatataacataaatgagctacgtatttttttttttaaatccaattgagtttgagatagaacatgcaccttaactacaaattttttaaattctaacatagtatcagagcaattaaaagcttcaattgtcttcacctttaacctctatttaagaccttttggctaatgtgtattggcttctaatgttgtattctaatttaacctgttttgaaaaaattcacaaatttctcaatatgtacacttacacattcttccgatttagcctatgtattaaagagagtctcacattactaagtgaaaaaataatacaataaataagaactcatattattatcaattagttttagttctactagctagttttaaatttgtatctttggtactctgtttaatatacatgtaataaattaaggaaatcttgaatctaacatgccatagaaaagacaaaaaaaaaaatgaaacactaagagaaagaagcattattagtaacacacactcctatctcaaaactatttctttgatttttctagatattaattgtctagaagactcacttcacaaatctcatcatgtttactacttattagtccttgcgtctctgttttgttttcttatgccattttctaggtcaattgagaaaaacaaataatagccttatcatcttagatgtacaactggagaattttttattttgtatgttttttaaagtacaagtttacaaaaatataatttatttaaattttttttgcataatataaaaatttataattttatcttttatattttaaaataactttctgtcatattgtgggatgaaatgcatgtaattctatttctaaattatatcagaatgaatttaagtaaaataaaattagaactaattaaacgatcgtagattaaataaaagggac

SEQ ID NO: 3739 - DNA, 1278 bp, Cannabis sativa
tactttttccctcctattttaaatggacaggcctccaatagttgcaaagtgtgatcggaagcgggtcttttcctcttggtccccttattgtggtaatgtggcccctagggagtttgagattgaattttcaagtgttcgatgtctctcccctcaagaattcattgagaagttagccaaagatcttggtgtgagtggagttgtggcaggtaaatttcttcaggagttattgccgattctttcacattacattttgtgtgtattaaaagccttgatgataatcattaaatcagacagctaattgcaacaggtgaaaattaccggtttggatataaagctgctggtgatgcagcagagctagtaaagctttgtgaagaatatggtatgggggcttacattataaatccagttatggacaaaaatcaattatcaattagcataaactccagcaatccaaatgacagaggacaagtgtcgtctactcgtgtccgtcgtgcccttgctgtcggagacatgaaatatgtgtcagagcttttgggtcgccgacatcgactcatattgaaggcaaagaatcaggaggtattcacttacaataaacataaactgtctgctcccaaatcctgtttgttaaatctagcacccaaagagggcttttatgagaattgttatctgattgttggtgagaaattagtaccatgtagagtggttatagacacagcccaaatccatatagaaatggatgacataggtacatctaactactttggcactgaggacttgaagctgttgcgcattgaatttggtaattcacaatcttaataatatttaattcatattgtgtttccatttaacattctccaaaattagtttatttaattattattactaggaaaccaaccacttcacggtttaaatttttttgcttataatgttaataaaagtcttattgaaaataaaaagggatatttatggggaaattctattaacatttgtaattgttacacataatcttaataaaaaaaagtagcggcaaaagtattttatcttacgattttgttgcagtcgtacttttttttagttgttaagtgttaattaagtttgttaagtgctaactcaaaaacatgtgatgacatatttctttaacttatttaatacgtagtctaataatatgtcgcaacatgtttttgggttgatatttgattgtcagaaagggatatgattgcaataaacttgtaagaaactatttttgtcgttaccatttttagttagagttatatgtat

SEQ ID NO: 3740 - DNA, 895 bp, Cannabis sativa
tcacttgagcaagaggatctagtcaaggcccctaatcatgacaaaatctgtagaactcgatttgtcatgggcaccaataacgctcctggctgaatgggatgtcggttcatttctttaagcactactgggatgcggttggggtagacttttgtgaggtaatctcagatttctttacctcaggaatcatgcataagggcgtgaatgctactaacttagtgctcattcctaaaatatagaatcctaggagtgctcatcattttagaccaatttctctttgtaatgtgtcatacaaggtgatatccaagattattgccaacaggatcaaacctattctatcgagacttatatgtccaacccagtctgcttttatgccgagaaggaatatccaagacaataatgtcattgttcaagaaattcttcattcgtttaaaaggaaaaaaggaaaggaaggcttttttctattatgattgatctggtgaaagcttatgataaaacaagtttgaaatttattggccatgtgctttgttgctgtagtgcgccaattgtgttcaaaaattagattactaatgtatcgctaccatatccttgaatatatgccttaatggaggtcacgtcgggaggatcattctgtcttgtggtctttggcaaggggatcctctttcttcttacctttttatatgggcggtcgaagttttgttaagaatactagaagaagctatgggaagtggtagtgttaaaagaatctgtctgtcccggagtggtcctactctctcccatattttctttgcaaacgatttgattttagttcgtagagtctctctgggagaagctagaagcttctggcattgtcttgaaaagttttgtgcttggttgggtcaacatgtcaataaactta

SEQ ID NO: 3741 - DNA, 3362 bp, Cannabis sativa
  modified_base (1746)..(1749): a, c, t, g, unknown or other
tattgtgttctatgttatatacaacttgatcttaggttcattattaatttttctaacaggaccaacatatttcattcacaatatttcttaccaaaattagaaaagtaaacaaggtataattctcattatttatttatattacctaatcccatatgtaaacaaccaagattattaaaataatttattaagaaataattgacatgggataagaactatttgagaatacaagtaaataatttaaaggtcattaaagatattccatttaaaatattcataattttaatatacacaaatagtttatatttattttaataaattattattcttatcatataataattttgtttggcgctcatttaaaagtcattgtataattactaagtcgtataattactaggctagtaattacattttattttaaaatagaaaaatttgcagtaaaagttccctaaaaatactattaaaaatcttacttttaattataacaaaacttatgaccaattgtgactaattatatatcatcattcatatgttgtgattaaaaggttaatggctaaaagtattagtcacaaaaaattacaatttattgtgattaaatgtgtttttagccacaatacttgttgtgactaaaactaaattagtgacaacatgtatataaatactatgctttagtcacaattaattttttattgtaactaaaagtcacatttagtcacaaaaaaattatgttatcactaaaagtagttatttttgtagtgaaagttcagtttgatacagataaattctaaccttgaaaaatagaggtaatagtctccaatatcacatttcgaataagtctgttagtcctaattttatcaaatctatttactcattcaaaaataccacatgttgaaacattattggtctaaatcatattttaattaaaaataatttaaagtaaaaaactacataaattatttaaaaatcataaaaaaaaatatttttttcttttttttttttttggttcttcatcttcttcatcttggcacactctgacccccaatcccacctccatgcccacaaataaccacacccaaacaccccgacgaagccttgacatcgaaattcctgacccccaaccccacccctagccacacatcgacccccaccccacccttctctacctcttacttcagtgttagagccatgtcgtcaactaatctgatggaggccatgaatccttgattactgagtcacatcccaaaccagaaccccactagagaagctattcgagacatgggttcagattttgaagcatgcattttcacctttccaagtcagtgatgccttatgggcccaatcgaacccatatcttgtcttcgatgtattctactggttgattgatgaaggctcagatttagtctgctttgaagactaatgagccatgtaatatttgatttcttgggtaattaattttctttatacttttagtttattttatttgccaatgggaataatttatcatttcaaatatttattagtttagcggtgtatgagattttttttagtgacaataaaatttattatttattattttattattattttattttgagggtatgtataatgctagataaataattaaattattagagataatttaatatttaattatttgtcaatattattataggtatattaataataacaatatgtgtaaatatattatagcaaattaattgtttagtttattattattattattannnntattattactactactactactattgttgacctcgcttttagccaacgacaatgagtctaaatagtaagcgacaagtagtataatatgtgtatgtaatacaataaagtaaataaagacatgagaattttatagaggttcagccccgagcagttcagtaatagcctaatcctcttggtttgtattgacttaagaacaaggaaaataatcccttttcttagagctcttacaatagtatttctaaatatgaattcttagataagtttttcgaccctttgcccagtgaatgtgaatcactatttatagggctataagcttgggagggaagaatttcccttctgagtacaattgatataagtggaaagattgcatattaaatacaaaatacactaatcatgggattcagagagcttgccatatccctgtgaatctaatcccaaaattatagggatttctttgatgactcacgatgtgaaagttgaaattgctaagtgttggcatgttattcggactgatcactgcccggttaggaaggcttcgtccgagcgaatatatgtggtgttctgtccggcatatctcttccgagcaggtacataaagttgattccacgtgtcaccatcgtgtgatgccacgtcagagtacaaaaattgggataacatttaccccccaagtctgtacgggacttctaaaattgcgtgtagacttcatccgagctgcccttgcatttgaatgggtgacacgtgttaggtgcatttgttcgcgattcgatgtgaggctgaccaggcgtctcttcagttttcggctaattaatgctctgactcaactaatgcctcaaacccagttttctctcaccacgtttgacggttagacttgattttctttgatttccaatatttgcttttggggggaaccgatgcgtctaaggcattttaaatgattaccctttttttcattttctacctataaatagggttgagcatcattcaccaattcatttttaccaatttctccattaaacaaactcagagcaaaaaagaggtttccacttcaagtcaatcgtgagatttctaccaaaagcatccaagcagcttcgtttggactgaacttagacatcgaacagtgagtaaattttcaatctctttctcttttactttgcatgtttaatttttgggttccatgcatgggttttgactttgctgtataagataggtaaaaaatttaggtttaaaactttgcaattttctttgtaataatctgtaacacttcgcggttcatgacgttggcctttcgatcgcacattgtctgtctttcaccttgtttattcaaagtttcgtgaaatttttccctaaacttaaaaatttcaaacttctgggttttgactaatttttgaatattttgtttctttaatctgttgagtactcctggtcggtatatttacctatttattgttcgatatcctgaccaaacactcatcttgcgtgttgtcttttgtaaatgaaccctggtgagtttcggggaagcgaacactgaattgatcaggatctacttcaacttctgtacgagggtcaccctcgtctcactacaacaattacattaataccagcggacacaatac

SEQ ID NO: 3742 - DNA, 596 bp, Cannabis sativa
tttaagtcttacctttttaaataaggataagtcaaaaatactgattgaaagagtaataagcaagcaagaccaaaggcttataccttctcgagaaacattgaaaataaagtatgaactccaaaaacttgttcattataatatgaatatagcgggaagaaaaaaattaagcaagttgcaagattgaatgctttaaccacgaagcacaatagatacaattaaaagatcttgtgtgcaaaaattgtacaaaaattatccaaaatattagtttaaagtaaactctactaaaagagtgttcaacaaatcaatctttttgcgaaaagcatttgcacgaagtatgctaactcatccttgttatttgcgaggagcacacatactaaatagaaggatggctcagtcaacaactattcaaacataagattaaaattagtgatagttattgtatatattatttaaatttagacaattattaatattatttccagctgttaaaataacatgaaacgtggagaatatccagtttcatgaattgtcatttagataaagatcaaaataaataactatcatagttaatctttataaatagtggtagaaatcat

SEQ ID NO: 3743 - DNA, 1280 bp, Cannabis sativa
ataaaaaaattgactaaaaaattcatccatatgcaaaagcaaataatgatctaccgaaaaaccctaatcctcattacatttgtagcaatttattaatttagtaatgacaattacaaaaattacaatatatagattatcaaagcattattttttttctacttatattatacgtatgtattaattaataaataaataaataattatcaacggatcagattgaattacacgagaaaataggggaaggaagtacggccaatatttacagaggaacatggcgaggatctgacgtggcagtcaaatgtatgaacccacacttcttcacctccaacgacaaggccgtgactttcttcgcccaagaaatcgagactttagctaagcaacgacaccgtttcgtgttacaactaacgggcgcgtgtttcgacccgcccaatcgcgcgtggtttgtgacggagctcttgaccatgacgcttgaggagtggcttcatgggccgggcggcaggcccaaacagccgatgacaacgagaagacctgggcctgttccttcattgggcttgagacttgctagagccttggaaatagcccaggcaatgcagtatctacatgagcaaaggcccaaagtgatccatagagatttaaagcccagtaatatttttttggacaatgatttgcatgttagagttggggattttggtcatgctaggtttttgagagatgaagaaatggctctctctggtgatacaggtgagttatatttaattatattttacttatttatttatatatatataggtttcggatgtaatttcgttcttgaaactggtctcggtgtcggtgtatatgatagtaatgtatagtataatacatttctcacactgagaccaattcaagaacgaaattctttccaaatatattctataacaacatgagtttcgccctttaaaatttatagtcttaacgaagaaaataacatttataacaaactataacaattacaaatttacaaattttaatttttttataaatatacggagtgttattattttattattttcaagttactattaggaaacaatgtgtaaaaaataagtgaaaaacttaaaaaaaatcataaaaatgtatacataaaaagtcccattttaagtactttaggtaaatttctaaaaaaatgttcttctattatattccgtctattttataagtacaagtcacatcaacaaacggttacaaaaacagacgaaatagagaaaattaacccattttttaattctcaccacacaaaa

SEQ ID NO: 3744 - DNA, 1338 bp, Cannabis sativa
tatttggctttatttgtcattatcaaagcattaacttttttttttcctaagataacttgcttgaaagttgattccaatagctttagtttagttcgcaatcacgttttactatattaagacaaaccatatatacaaaatgaaagaccaaattcatatgacgagaaaagtttgtcttcaaagttcaaaccctcaaaacagagaagataaacaaatacagggcagtcagttaatggaaaacaaacactaaaataaaatctaaggaaaaaatcacaaaatctaaagatgatgaaatttccgtactaattggctcgttcgttcctatgtaaaaaaaaaaaaatcaacactcgaggttgaaaacgaagtatacaatggttgttttgttccaaagaacctaatgtgaaaatgaaaataaaagaaaaaactaatagtggggaatcaccatatatatatgtatcatatatgcaaacataaagaaagaagtcttaattagaaaatagaactaaactatggagtcgttggctaaactgaagtcatctggggcttctgaacattatcttctttgtagagaagccttctctttttggaaccatagccatggtagcggtagatgatgctgtaaagacaatgcctcaaggagagcacatcaaatgactcaataaactttttgtctgtttccctagatttcacaccagcaaaccgctggtactcttcaaacacagaagccaagcaccaattctgcagttttctcaggcaaccaacaagacaaccagtcctatgctgcagaaacgaaaatggtaatatggttagtttatatatcaaatatgacaagtttccaactcaattactaactaataagagcacatgtaagtgatgataaagaattggtcaccaaaactatgacctagaacaagatagcaatggtagtttggttcatgcagacacatgttactagctacactatcaaatagtggagtacacgttgtccattaactataaaaactagaaaagtggagcacatagtattttattaactacacctagtaccaagtggaaaacacacagacaatcctaattaaaaaagtgatattgaaaagctaattggctataacgcatgaatgaacttgtacctttccacgcttgcaatggatcaaaactggatggtttcgcacgtctgcaaacaccaagaagtagaatttagaaagtactcaaaacttaattaagagattaataaactaaataaactacggaaatgattttcttctgattatttaagtaccgactaagatcttcagagcatccatgatagcatccttgagaagagaaacagtgggctcctgt

SEQ ID NO: 3745 - DNA, 4682 bp, Cannabis sativa
taggcaaagcttgtctttgtacattagttggtattacatagccaacttcttcaaccctgagaaaattattacacattcaaaattgaaacgaacctcattacaactggaagaagaaagaaaaacgaaaacaactcacctgcgtaatacatgatcggggacatggtttccgcaaaggtctctgagagttacgctctcatccgaaccaacttcttccgccatagaagttgagttaagaagctccggagcggagcaaattgcccggttttcagagatgacaagcctagagctagggcttcgtgatgggaaggggaaaccgtaagcatgaacatggagttttcgagagaggtaaacaggtcgtggaagagagagaagctgagtggctgaaactgatagagtcgccgccattgacgaacacactcgaagagctagtgaggtccgatgatgaagacgatagcatagctaaggaaattttagctaaaacgggaaagaaattgttgtcgtttccatcttattaaaacgacgtgtcgtttaaacagtaaacgacataacaacgaacgttgtcgtttgatgtgtagaaaactcacacggacgagagtaagccgaaaaggacggagcggaaatatcgagaatcagatccaatggaggagaataagtcacggagatcgtaatggacggaccagatttaagtatagatcatgtgtagtagtatgcactgtatttttttcttatgtatttttttctttttttttttttgacaaaatgtatttcttaattaattaattaggtgggagaaaatatcgtcgatctagattcaccgaattgagtttgtgacttagtgtggtgcgtgaagggacggccaatctaattagagatatttactatttaccaaaaattaataatgataatatgcagagatattcaacaataatatttttctttttgtttaaggggttacaattactttctttaatccttacaattttctgttctcgaaaaaaaacacacacaccttcagagaatatagtattatttatttatatatttaggattttttttttttgtaatttttcattttgccaatgtggaaataaaatttgaaaaaaaactaaaaaaaaaaaaggtatatctaaagatctaaatttataacctgcctataatttagttttaaaaaaaaatatctgtagaagatattcttactgaaatcatttcttaaaacaaaatgtgtatatatagttttcaaagaataattaaaaataaataataattattgaatctttttaatgagaaagtgagagagagagaaagattgattccatcaaagcgggtgaatcggatgatatttgggtttgggtgcacttttctggctctttccgaagaatacctttctttttattgaccattacacaatattcatattccattttcattttccaaacttatatttatatatatataaaaaaacactcttttctttccctctctactctctatactttttctagggttcttttcttcttcttctctcccaaaacccccaaatctacattgtactactcttctcaactcttcaatggcttcctcctcttcttctcacggttttcccgagaattcaatgctgatcattgcaccttcttcttcatcatcatcatgtgtaccgttaccttcggatgacaactttgaagaagaagaagactcttgtagtatctgccttgagcctttcaactcccacgatcctgctactgtatgattattatgatcatcttcttgattttacttccagtgctaaatgtagcgttgttgattgatccaattatgttttttttttcttttcattttctattaatgtctttgattggtttttgttttgtaacttgtgatgatgttgattgcgttttttatctggttaatgtggtttgatcagagacttaccgtgaatggaattatgatcttggtcgacgttagtttgtttgcacttaattttttcttttgttaacatgtgtgattatcatgaaattacagctcttaacggactttgtatgaccatttcccaagttgctaacagttttcgtctattaaatttggtctgttaatgttgcattagatagaaaccatttactttatgtttgtaatgggttgttaatcttgaattgctggctttaatgggttttcttatacatttccttgttattttcttttttttagattacgacctgcaaacacgaatatcatctccattgcattcttgaatggtaagtcaaaattgttcatttacttataattttttttatcgttttgacttatgattgtttgattcttattgaaatgaattttcttttaggtctcaaaggagaaaagagtgcccaatatgctggcggttactttccttaaaggattctgttaggtatattactaccttgttcttatctctgttctttttcttttttcttttttcttttttcctggtaatcatttataaatgttgtgtgtagccaagagcttctgtctgcagttggaaaggaaaggcatttaaggtcaaagagtattgaaaggcctatatcgaggcctgctgattttggagtgatttatgatgaggaagatcttgattctgaccctgtgagagtttattttagcttcaacaaatatgtatttgattgatgtcttcatcttcttacccgtttgcttctgttctacaacaatgtctttttttattgctttttcaggaactcggattagtgttcgatgagcctttcatgcggcatctagctgttgctgtgcaaagacatgagcttcgggaaagtagacagatacttagacattctggacttgatggctcccatggaaacagtgaggaccatacacatacaacatcttcatctgtaaccccacctgctcttaatgctcaatcgtctcatgtggagcccagaactgatataaatagtggtgttcccaagcccaagtacgttcataggacttgatttttagtttccaatagtgcacaatttattgtagcataatatgttttctttactcgtttgtcttatcagtggggacgttaagattttactcgtttgtcttatcagtggggacgttaagatttcttttctttcttatgaaattctgaatagccccgcaatcatgatcaacacattactatctattctattaatgtaagttactttttcggttgattatacagtgttctatatagtcagccaccgtctgttcgtccacagagaccaagtcccccatctgaaacatccactttatcggactcacttaaatctaagtggtctgctgcttcggccaggtaaattagcaattgtataccatttgtcattcagcaaaaaaaaattgtataccatttctccagtcctttcgtactctctttttcctacactgacataactgttaattaatgtgtgtcgattaggtacaaggaatcactatcgaaaagcaccaaaggccttaaggagaagctacttgctcgtaataactgtgtaaaagaactaagtaaaggagtacagcgtgagatgagtgcagggatatctggtgttgcacgaatgatagatcgcctcgatcttaccccaaaaagagctaatgcagccagtcgtgatggagttgcttcaaacatctctacaaagggtaaaggcatgctagagaatatgattgttcaatctcttagtaaaaataatagtaaggttgcagatgaaatgagttcagatgcagcagcctctcacccgtgtattgttattccaggcagagttgaggttttacaaccacaggtttgaatattttactattgccacattgcggaatgttatgttttctttctttcaaaaactaacaaaatccaagaaaacttattagtgctaacattgaaaacattgcatgtttgttcagaggagggagcaatgaaatgaatgatggtgggaagggaaaaggtctcagaagaagaagaagaagaaggcagttacgatgcaagtgatgtaataatgttgagagatcaatccccctggttggttatgcgtccggcattgcatacgcctgtatatgcgttaagttagattttagaggcgctgtgttgtgtgtgttttattatggatgatattttataagtgaattcttttgacaacttgtttgctttccattgttttcaacatttgaacaattaagtgtaggtgctttattgttttgcggtattgtgataaatgatataagtatatatttatgtttttttgttaataaatttggaattttattaatagcaaattagctaaagtaataggggaacttacaaaaatattagaatttaggttaagttttacaaaaatattgtcacacggatatcttttcaaaaagtaaaacacaaagcagtataactcaaaacaacagtagaacaactaaaaaatactagtagaacaacagtaaaaacttgcttggcagtatttttgtaaaaaaaaataacaaaagttagtatagcatgcaagttttccaagtaataacctgtaatcgaaacatttcttttgttgagacacgatcatgattaaaattagaaaaagtaataattaaaataaaattagatgaaaaaggttataacatcctagttaatcataagaacatttatattttgtttcatttattgttttgaagatgacacaacattaggaattgttacagtttaa

SEQ ID NO: 3746 - DNA, 1035 bp, Cannabis sativa
tttagtattttttaaaatagttttcatatagttaattaaaaatatattttacaaataatatttaattataacattaacaaaaaaaaaaaaaaaaaaagtgcggactggattttagcacttctgaacattattgggcttaacttcatcacacgagcccacagagggtgagaaagtaggaatttattcaggctgacgtggaaacctctaattggtcggaacctgtagtacgctggaaccagccagagagtctccagtgtctttagctcagagagaaagaaagaaaatggtcaaaaaggtcggatcctaagcactgtacacgcgtcatcaggagcacaactcctctgtattccactcctcctctacacctcaccacgtgtcattccctcatacgccatcacttcactacactgccacacccacaccctctctctctctcactctgaaaacacacaattgtacgtgtttgttctctgcactctactactaccgatacttcaagtctattgaaacgacacaaaactatacatcgttttaaggagagagagaaagatagagaattagattgtcgtttttcacagtcgcgtaaaaattgtagatacacataatatgggagggaccaatgtgctgtttcttaagtttgtatagctttttcgtggacgacacgatccgactctaccgctgcttctctctctctcttctcttctcttctctcccctttctctctctaaagatttatccttctttcattctttgtataaaagaaaaaaaatcaaagagagagaaagagagtgagctgagtaagagaaaagagcttctattgttataataagctccatggaaatggaggatcagtacggcatggcggatctaaggcagttaatgaacggaacaaggtctcattttccggcaatcccacaacccactgagcttttcccaggtcatcaccggcctgggatgagtccgtcggttcaaccctttgagatgatgatgatgggtggtcatccagtagttggtcccgccgccgccgatattctg

SEQ ID NO: 3747 - DNA, 1443 bp, Cannabis sativa
  modified_base (915)..(917): a, c, t, g, unknown or other
ttttgaagagtacgcaattggttggtgttaagaggccgagaaagtttattttttatgtttgttatgctgtcttagcaagtactatatatgacatttggctaaattgaaatttgtatctatttaagtataagtggttagctccaatttgtatatagagagtcattaacgagaatctcaaagttgaaaagaagttatcaagtcttgatagattgatccttaaaaatgtaaaggaattgtaagtagctttgttgggggtgtttcccaattaggtgaatttgactctctttgattaataaaaatttatttcttgataaaaaaaaaagaaaaaataattcagaaaataaaaataaataaataactcaaagttgaggaagtgcacattccaccacccgttacagcgtgacattatttaaatatatataattttttagatatttttgtagtagactcctataaaggttggtggattctctatctgtttcggtatttatagaaaaaaatttagtctaatttttttttcatgatcgtgtacgttgtaactatttagaactatttgtaaatttttttaaaaaatttgaatagtacacaacatcaaaaattaggtttaaacatttatttaccacgcgtataagaaaaaaaaaataatcatacgtgtaacaaaacatgtaaatcttttttttttaatatcataaactacttaaaatttttaaaaaaatttacaaatggtcttaaataattatagcgtaataatttttttcttactaaaaatttcttaagtatgaagtatattgtagacttatcataatttttttaagagaaatactaaagagtactagtagtgtctagcactttcctatgtgttaatatcactattagtctaactaagtatcgagtattatataatttaatataatnnnttttaaagagtatcgctagtcaattacaacacgatatatcgagaaagtgctaaacactactcgtgctaatagtaatactctttttataatcttgtattcataatactattttcactatttatcaaaaacctacattgttatgatttaaattattaattaattgttttgtatgatttcaagcataataattattaattttttaaaaaaaattataaatttcataacatattatcagtcattgctgtctaacttgtcttgtccacagctttgtttgtgggcctgcattccacctggtattctagaagaaaataatattgatacttttgaaaacaataaaacaatcttaaatataaaataaaatctttaatagaaggatataaaattggttaaatttaaaagcactaaaagaaaaggttaaagtagattcttactattggatattgaaacaagaaaaggtgtaaagagaaaaagaaaatgattttttggtatttatcaaaagttggcccttctagaagactagaattac

SEQ ID NO: 3748 - DNA, 1307 bp, Cannabis sativa
taaggtgtctaatgtaattatccccaaaataaaatcattcatatccatccaaaatgggaagttgaaagaattccattcccactttccttccatcccatattcaagcaaaataaataatatataatcaaaaataataaaataataaataaaaaatgatatcaaagccaatatcctcccaaaaggtggataagagtgacccatatcataggttgatggtgtgaggttgtgaagtaagtagtaataaatattttgatgtggaactcacatgaagtcaaactaataggacccatttgtcaatttcacttactttttaaagactattagctatttctcaattcaaaactccttcaagggctcttgttgccccttcaaccactacaatatctacctagctattttggaataattaaaagagtaattttttataggtttttttttactataaaaaatcttaattacaataaatatgtaagtaaaaagaaatcaagctaattagtatttttgtccttgaattttgacatcaatcaaattctgctctttgaacttttctaactgttaaaaattttccctgaactattgaggttgttggatttaaagacttttgtcaaatttttattcaattttactgattcggtgattgtccatgtactaaattatgcttcccagactttgatatctaccaaatcattccccttaaattttgatatgtaccaaatcatatgtcccttgaactttaattcatgttagactttctttactaaaattggacaaaagtttttaaatctaacaatcttaataatttaaggagaatttttagcggctttaaaagttcatgagacatgatttagtacatgtcaaagttcaggggcaaatgattgtaaaaaataaattttaaattagaggaaaatgacttgttcactgctagttacattttaggccaaatacaataaattctatttttgattacaacttttattttgtacactattctataattattttccatcaagccattccaaaatttgttgtttcggttggccgaaatgtagaacatcaatgcagccaaagtagtcgagatgacatttttcttgaatttgcttatcttagccttcctaattatctatttgctgattctgggtaaggagatagaagtagtctcccattgtagccaaagctttacctactctaaacagtttatcgagaaaggacactcaaaaaacaagtgtacacttattaatgatactaaatttcttcaatctatttctggttttgattcttctaaacataaataaccaaaaaaaaaaaaa

SEQ ID NO: 3749 - DNA, 1814 bp, Cannabis sativa
ttaaacattcgctgcgaagcacaggttgtttactagttattataaaaaagtaagacatttttttttctcatataagcataattgttgaattgcttaattatagtttttttttatagattattaatataatttgttataaaagtgttattattaaaaatttatctaaagactaccactactatatcttttctctctggagccttctagcaggtatgaggtgcatctcttctctttcattgagtttggttcctctaatggaggatctcgtccacccttcactgttaagtggtggtttgacttattatagatatcaatatttgtctaattttccctagtcttagtgcattaaatgctctagggtttattattgctctctttcacatctaattaatcttactcagagcattaattgctcaaaatcctttctctcttcctttctctcccgttttcttcatcattcccttttgtcttctccccatttactatcgatctcccaaatctttactcagaaaaactcccttgaatatcgcaaattagaggtagacgactggtttcccaatgcctctcaggttttcctcatcattgtggcctccatggttaagactagggatgtgactagggcggttctaaggtgtgctcttcgtggttctggttctttatatatatccaagctcaggtattgttcacttcatcccttccctctgccattttctctctttgttgctatctctgaagtttttctctttgtgaaaatggatgagtttctaaacactgtctctaatgcgttagctcttccccctgatgagtttactgtgtttacttatgatgttggttcttctagttcttcccctgcctcaattagtcttcttcgtaagcttcatactatttgaccttataataggccttctctaatgaaaactctttttggcatctgatcatcgcaatgccgatttccagttgttgtctctgaacatgttgatggcatgtttcttgtcacttttggctgtgaaagggacaagggtagagttttagagggtcaaccttggcattttgcccagtgtatcactatctttgctactccagatagttctttcccccttactcctgaaaatctgcactatgtttctttttggattcaattgtatggtattctattcatgtgtaagtcctatgaccttgctaggtttatagctatggaaattggtgatcttattgaggtgaataaggatactattaaggagggtactggactctatttgcgtcttagagtccttctggatgttaacttggacattaggaggggtatgaacattaagttcattaggatggggcgtgagtttgttaaatggcttgactttcagtatgagagactaccatatttctatttattctgtgggaaattggatcataccaaaaaatattgtgtagctttcttgcaaaagtgtgatgagattttgaatgaacctctatgtccttataacatccttcttagaggcaaagaaaagatttctgataaatctcagccctttcaatatccccatcctcctactattactatggttaactaccaacctgtgaatctcaacctgccccctcaacatttctctggtcattccatcactttcccttctttccttaacctcaatgctcacttcactggtccttttgctcctcctccatccactgttgttctcatgatgcctacacctttgaatcctaatatttcaagcattacttcacagtctgctaggcccacctttgacatttctttgaggccatttgcttttacctcatactctactgactctcttatt

SEQ ID NO: 3750 - DNA, 562 bp, Cannabis sativa
ttagaatttgtgttaggcaaataatggagtcccaaaagacctgtaatctgggagcttagcacctccgggatgactaaagatttgcttgatcatttatttttatatgggagacctactcccagacgcacctttactcaaggagttcgagtgaaaagtaattctacaaaaaatgttaatctctccatgaatggcccccatgccacatggagccctctatgcttgccatgtattttgttaacaaatgggtttaacaagctcaaataacaccattttataataataattcaagaattgttcaacatattcttataacaaaatgtaattaaaatatctattaactgactttagtgtaattatttcactatgaattagaataattaaataaataaaacatatctgaatatttgaagtaaactttgaaaatttaatgtataatcattaataatcaaagaggagtgctttgaactctcttttgtattttctctttagttttataacaaatgtcaattattaaacaatatttacttttgcttaacaattagccataatattattaatttat

SEQ ID NO: 3751 - DNA, 1584 bp, Cannabis sativa
tatggattgttcaatacacttatcgccaaatgctatcatctgtggcatagtagtgtttatttggtattatttttggagagttagaaagtggagagaggtgaaaacaatagcgcccgaagcttgcggaggttggcctatatttggtcatcttcacatgctgaggggaccaacaccaacccacataacattgggagccatggctgaccgatacggaccagtgttcaggatcaggctgggctcccaacaaggtttggtggtgagtaattcggagatagccaaagagtgtttcaccacaaacgacttgaagatatcctcgcgtccaagtctgctagtggccgagcacatcggctatgactacgccatgtttgttttcgcacctcacggagctttctggcgtgagattcgcaagatagctactgtggagttgctttccaatcgcaggcttgacctacttaaacatattcgccatttcgaaatagcaactttcttgaaagagctacacaaacactgggcggccaaaagccaaaacgatgtagttttggtggaattgaagcagtgggtttgggacttgactctcaatgttcttcttagaatggttgttgggaggcgatacacttcgggtaataataagatacaaagggcaatagagaattttttcaatatttttggggctattgttcctggtgatgtcattccatatctcaagtggtttgatttaggtggctatgaaaagtccatgaagaaaacagccaaggaaatagatgatatattaagggaatggctagaggatcataagagtgatcaaaaaaacgaccaagctgatttcatggatgtcatgctttccttgcttcatggtacagatcttggtggctatgatgccgatacaattaacaaggccacgtgtatggtatatataaattaattagagagatctttattgaatttgaaattaattaacttaaactgattaatgtatacatttgtttgttggattttgaagaatttgatcgcaggtggtagcgacaccactacaggaacagtggtatgggcaatatctctactaatgaacaaccgccacgtgttgaggaaggctcaggaagaaattgacagccacgtgggcaaggatagagttgtaaacgacactgatatcgctcatctcacctacttacaagctatagtgaaagaaacgctgcgtttataccccgtagcaccgctggctggtccacgtgtcttcacagaggactgcaccgttggtggttaccacgtgagtaagggaactcgtttgatcgccaatctgtggaagattcaaaccgatccaaatgcgtgggctgagccgttagagttcaagccagagaggtttttgagtaccaacaaagatgtggagatgaagggtcagcattttgagttgatcccatttgggagcggtagaagagcttgtcctggtacggtttttgcactacaaatggttcatttagcagtggctgctttcgtccatgcctttgatatcacgacaccctcaaatcttccaattgatatgaccgaaagcattaatggacttgtcaatgtcaaagtcactccacttga

SEQ ID NO: 3752 - DNA, 968 bp, Cannabis sativa
tacccaaattatggcatatgtaaggcatttcagaaattaaaagatttaaggaccttaatcactgaagtcgcagaagatgatattgaacgaagattatagctgtaagcagattcattatccaaagttagctcaaggtagaaactgaacagtaaccaattatcaaaaggtcagtcacaaacccgccctcaagaataacgagtaactttccaccagaaaggccattcaacatctgtgtcatctttgcatagccagaaggagtgacctacaagaagaaaatttattataattacacactctaatagaaagagcataagataagaaatctgtaaaataccgacaagtatctgagacagattccaacacaagaaaacaaggcacaaaattctagtccatcaaattcctttttcacataattttttgaaaaaaaaaaaaaaacaaagtagcaatggagaatcgatgacaggcaaccttagcttgatatagttggtcaattaattactagtatagtttatcataagaatgcaaacaaccagttacactggcaataatggttatccataggaaataacaaagctgctaagtagtgagctaacaagaagaatccttacatcacagcaccctagaggatcacctcttgcagcatcaaagcctgctgatatgatggttaaatcaggagaaaactcagaagctgtaatagcagaggttcagaacacagatgggttagccaacagtcaatataaatatgcataaacagtgaatccacacccaactaaggatgcaaaacaaagacaatgcaagctgataccaaacactataaacagatcaagcacaggccaattatgaataatataaagtactgattttctggcagctgtttttgcttgaaaagattatgacatatcaatcaaacttctcagcgaacacccaagtgttaaatggaatggtgatcactaccagcatcaatttac

SEQ ID NO: 3753 - DNA, 1164 bp, Cannabis sativa
agagcgtgcaaataagagcatggtgtttggtgcatgtaagggtttttgaatttcaaagtgagttttggtactgacacctaaacatgtgttcccttttgctttgccctttcattcttttcaaataccaaaaaaccaaaacccccttttctttttctttcttttatttattatttattaactctaataataatccatcattaatttcaacgcatgctttctcattctctatgtatttttttcatcacttctaggaaacccttttcttatctatttaattaattaattaaattattaattctaaaccaatcatatgtgagaatgtcagttttaattagacattaattaatatataaaattatctttagctcttgaaagaattcaatggacatgaaagcttttgtttttatctccaatttttttttactatttatttagtgtacttttttactattataagataaggtatagtggaatatagacttatatatacatatattttagttattaatttcactaatcaacaactagctagagctatatcgtaatttgtaaaggctgatagttctgacgtgtgttaattaagattgtaattaattaaataaaattattaattacctttaacatagagagacttaactttttatgcttgtttgattatatacataccttgttggaaaaaaatttagtttttttatagtatatattatagtaaaatttcaaataatttataatatcaaaaaataaaatttaaataattatttactaaatagttacgcatgcaataaaatatttaaattttatttttaaaactgtaaactacttaattttttttgaaaatttacatacgattttaaataaatatcacatacattattataacaaaaataaaataaattgaaaactcttatgtatgctgaaatagataaaaagtgtactgaaacacttatttttaatggtggattgtaaacttactagttatagtgagtgattacaagagatgctacttctatctttttcttttttgggtttgatttcttttcttttattaactcacttttgaagcaaaaaaactttagggtttcaaaaaggttaacctttcagtgccattaaaaaacaaagagtagtaaaccagcttgtgggtacttactaatttactcatataaa

SEQ ID NO: 3754 - DNA, 797 bp, Cannabis sativa
aacattctgatgcccaatttcagaagttctcagctcttttggatcagcatgtttccaggacagaggaacgattgaatcagctacccaatactgggttgggggagtcggaagggagaagtgttgatcgggaatctactcaggctggggtaagacgttcggacttgacgagtgatgatcgtgagctgaacaccttactcaaaactcttcgggttaaggtgccaaggtttgacggatcggaggtggatgactggatttataagattaacaagttctttgacttgcataaaatcgatgaaccgatgcggttggcgatggtggcatttcacttggatggagctccatccacttcgtttcaatggatggaaaagggaggggcaatcacgaagtggacctcgttcctcaaagcgctgcaacaacgtttcggcacttcgatttatgacgatccccttggtcgcatatccaagcttactcagtcggggaaggtagctgaatacagggccgaatttgaggcgttaatgccttgcattacaggagtgtcggaggcgatgtttatgaatttttttgtttagggcctcaagttagagatccgaagggaattgcttctatcgacgccattgaacttgagtgatgctatggcaaaggctcaactattcgaagatcgtaatgacgatttgggcagtcgacgccgattggacacacctcggacgggctggtatgggaaacccgcgccttcgtcaacaaccattatgggcacaccaaacagttcgggttccggttacaaaccaatgtctccatta

SEQ ID NO: 3755 - DNA, 781 bp, Cannabis sativa
attattaggggcggacgtggcccgtcggtattgtgtccgctgatattaatgttatattgttgtagtggaggttgatccattgaggccacgacatctcttaagtatcttcctcatagagagggtgtcatttggtcgtttgggtgtgagacttggttcaatgttttctttgttaccatcaggcactatggttgagtgatgtagaaaaccaacagaggcaaaaaattttgctggtgtgaaagttgtttgaggatctgatgggatgtgggaagtaagaggttttgtgggtgggttcacaggaaattatgaactagcagttgggggatatgttgcaaaatagtttgaagcaatagatggagtttcaatatctggtatgtaaatgtgtgaaagatctgttatggtgggggaagtatgagtaggttggagcatgtgttgatctgaaattgattgtggttgttttgtattggtgggggtaaagttagtcattgttggtgatgccagaaaagatgaaatagaggggttaatggggatgacaaggggtgtttgtgtggatcggctgtttgagtcattaacagtaggaggaaccaagggtaatggtggatttggagatgaagttggtgtagatggtaatctagtgttgttaatgcttgaaggtgatatgatattcaggataggagagtgatatgatttgttctcaacaatggttgacgaagggtcgaagattcaccttcaaatatcggttatggattggctgaagttcttgaagataacaacggtaaacttg

SEQ ID NO: 3756 - DNA, 832 bp, Cannabis sativa
catgtcggaatgtattccaaaaacttcagatgggtctataattgattactaagactaaagtttccatgctttgtctattaagttacaaacttttagttgaattgagctccaaatataaggcttcataatactctagggatgttcacacaaaaggcttttacagtaggtactccttataaaaagtagacgcttgtaattttctgagaaatcagctgaaaattttgcctattttacaccattcttttgagttaaacttatcgtattgtgcatgtgtggtcatgtaggcttgttttgaaggaaatcctttcaagacagttccaggacctttcaagcttttctggcggtgcatgcgttctaaacctgggtatgtatggtttatctcaccttaaaaatgatgttattattttcactgtacacataattttcattctgtcgctacaagttcatcaaacgtacttattgtttgcagggaggaaccaaccgagccgtatacctatttggaatttgatcctcccaaaagagaggtgaaactcgagtgaaaaggcatttagaagtgtggttttttctatttttaaattttcttggattagggataagagatttggaccttcttcgacctcaaccattggaaggggaggtgaaatgtgattaccagttagacttaccatcaccttttgaagttgtttaattcagcttgctgatataaataatatgaacctagattgccaccattaaaacagggtatttctcttgattttgaggcaatttggccttgcacatgttataaaaagcaaactcatgtttttgtcaaccttacgcatgatcacttatt

SEQ ID NO: 3757 - DNA, 1171 bp, Cannabis sativa
tagctcactattttaacattttagcttagagatgctctaagcaacttctttccaatttccattactacaaaatggaaagaaaaaaatgcatgaactaacaacacagccctatatcatgctaaaattgggtttatgctgcctttttttaaaacacaattcaacaaaaaatgaaagcttgaatttattataggcacgaggatttcatcatgaaatttcacattctcaaagaaaatgtgtatcttcatagataaaagaatcctaatcaaaccacacattcctttatcgagtgagacaagaactcaaatattaataataaaaaaacaacaaactctctttcctatagaaagaaagaagagaaataaaattaaatattatttaagtgtacaaaggcaaatctgtccaggcaccagaaacatgtccattttcacagacataagcacgaacaacaggctcaccatcatcatggtacccaaaaactcgccttaaacagaaggaagagtggagatcccaagtttcattacaatggcagaacgaacacttgagatcaatcttgttacgcttactatctttaatcgttctccacacttgtgaccctttgaaatccttgaaaattcctctgaaaagcatgtaatttcgtttctcttcgaagtgaacacacccaggtaaattacaaatatacaagcaatctccacggaaccgactatggagaagcttattcccctgttcacgactcagagtccaaaacccagaagccaaatgtgacctcatcgatcgacaaacctttctccttttaactacagttgattctcgttctattttgaaaacaccctttttaataacctcttggttgatttggggataatcttcagcttcggagacattgtaaacggtatcgttgtaaagatcgtcgaaaagagaccaagaacaatcggaaccagacgtacccacttgaggatttgcctcaatttgagttaaaaaaggcccttttatgggttttgtcatcaattgaggcgaacccaatttgcgataattctcatcgggtccgatctcccgctcgagaccgaaatcggaattttctagaaggacccctgagtggaccaggccagggcaacaaacggtgagcttgtgaagcgctgcccaacctccgagcggctcggcggggccggacatg

SEQ ID NO: 3758 - DNA, 1128 bp, Cannabis sativa
  modified_base (291)..(302): a, c, t, g, unknown or other
atcatattcaccattcagcattgcccacttccaaactgagctgcagttacatgggcctaccctacgtctgccatatcccattctttagacttcaaatctatccaaaaagaaaaaaagaaaaaaaaaaaaaaaagtaatgtgcaactttcattttgtaagagatgtggcccattatagggaaacttacaaaaatatttgaatttgggttaacttttacaaaaatactgtcacacgaaaatcttttcaaaagtactgtgtttttataaaacaccagtagaacacaaaacagannnnnnnnnnnnaacagtagaacaactaaaaaatatcaatagaacaacagtgaaaacttaacgcagtatactgcagtatgaaacttatataaaaatacagtaaaaaagtaaaaagtaaaaaaaatggcaaaagttaatatatcatttaaatttctctaaattataatgtagtaattaatgggctttattagtttcacaaaaaccaaatcgaaactaatgaataaaggagttttttaataaataagggaaaaaaataatggtaatttaccttggtagaaataaataatgtaaataaatatgagaactaaaaataagtaataattaaaatataaaaaattaaataaaagactataaataaagttggtaatttataataacaactatcgtcgaaaaagtcgttggagtagacatcggtgacagaaaagtcatcgggatagtcatcggtactaaaaagttgtcgaaaaaggcaccagctccagaaaagtcaccaaaaaaaattattggtatcagaaaagttatcgatgtcgaaaaagatattagaaaagtcactggaattgtcatcaccgtctaaaaaagtcacagaatgtaaatatctcatatataaattataatataattggttctataacatgatgaatataaacaaataacacagaataacttaaatcagttataattgaaatagaattggttttataacataataaataaaaacaaataatacaaaataactcaaaccgattataattaaaataaaatcgattctgtaatagtgttataattaataaaaatatataaacacgatataagtcaattataattaaagtagaactgattc

SEQ ID NO: 3759 - DNA, 976 bp, Cannabis sativa
cctttagcacagggaaattcccattgaaataccttggagtgttccttagagcaaccaaatggagacaggaggattgtgagaccatcatcaagaagctcaaaatgaaactacacacttaggctagtcgtcatctctcatttgcgggtagagctctcattaacactgtcttgattggaattcgttgctattggatgagtatttttcagccccctcaaaaggtggccaaatagatagattggatatacaagaattttgtatgggagaaaaaggcaatacaagtaagatgcgcatggcgtcttgggaacttgtttgtaatccaaaaacttggaggattgggatttagagagggttctaaatggaacaaggcattgttagctaagtacctttgggcaattaattctaaacaggttgtgcttagggtcaaatgggtgaatagcatttacctaaaggggaaaaatatttggtctctagagctaaaaaataatgtgagttggtattggagaaagctcttggacttaggaatgtcttcaccaaggaggacattgttcaagcagaggtcaatggaaaatttaagattgggaagatctatactaagctcgtgaatagagaacaatatgagtttatggcaacaacatggtgcaaactttcgaccccaaagcatagattcattatgtagcaatatcttcacaacaatcttttaactagagataatctagttaggaaacatgtgccaatagatacaaggctttgccctatttgtgagtggaaatttgagtcacatattcatttattttttgactgcccttactcttggagaatcatgcaacagattaaggaatggcttggtagtcaactttggcctatgaattttgaggatcttcagatttggctcaagaaaaagagaccgatcgagaagactcattgggacgttttctttgttgtcttagcaggtacaatatattgtatatggctgaat

SEQ ID NO: 3760 - DNA, 1391 bp, Cannabis sativa
tgtgtactgaaggtattatctacacgaacagaatgtataaatgacactttaattagaaaaattataataataaatgaatgataaaaaaaaaattaaaaaacaatttaatgcgcaagacctacagttacttgaagcatcaacttgacgaggaatgacgttgtccaatataggactgactgactgtccgcagtaaagagggctgaataaccaaatgcatctgtaatctaggacattctcgattcataatggaccttcccgcccttggcaaatagctagtgtctcgcctgggtaagggcttagtgccattcagtgtcgatctgttggatgacatggtagttagtgtgagcgagttgaccactaaaagttgggcgataagtagtagcactgatcgtgtgttattagccaactctactaggaagctggaatattttgaccttttacttaacttctctttttcacttgttgtaagttattgctcctttcttgactctttccttcttattttagatgtagttctcccagagcaaacttgtagagaagtgtgctccatggcagtgcaactagacctttccttggccactcgaaaggctctgaaggcccaaatcaaaaatactaaaaaggaagccatggaaaggataaaaaaaaaatatcgaagaggccaagaaatactgtgatgaggcggactccaaggctgacaagaaatacttggagaagttcaacgacttcaaagaggatttcaaaacttcgatggaggaagagtttagggtctgacatgctgagctagaaaatgccaatgcaaatctcaccaaagagctcaaggaggccaaagaatccaaggaggccctcaagaaccagatgtccattaagctccaagacctctaggataaaaacgacttcataaagtggctgaaggctaaggctggcttagctgaggcactctaccaaatttttgaaaactaggtcatcgctctaaatattggtatcaaggagaagaataatatcattgaggcaaagactaagggcgtacaagatttgtaggataaaaaggatcaatttcaacaaggtgaggcttaggccttgaaggaggttacatccatgcgtaaggaactcaggaacgagagataagagcacatgcaagagaaggaatctcatcgctgggccttagtctgctcagtaaacctggctcatgtcctcatgttggcacatttgtcacagagagatcccaacatctttagctatcttggtgaagatgcgaggacttctctaacagggttgtggtttacaagaggaacgtcgatgagtatctcaacacttatgactgggttgaagatgaggtgtcagaagacaaagaggtcaaaactgaaaccagagagactaaggatgagagagct

SEQ ID NO: 3761 - DNA, 1172 bp, Cannabis sativa
tcttgaagtttgcgtaaagatgcctaacacaaaatcgaatttcaaatccttcatataatgtctctaaagccatttctagtcccttttgtttgtctaaaatgaaagtgaagaatgttgtgtcttccacatctagattttatttcaatagttccacaaaccaagtccaacagttggtcttttctttttcagctacagcatatgcaagaggaaacatgttgctatttgcatcaattccaatagttacaagcattatacctctacaatatcctttcaagaagcacccatctaacccattgatgggtctacaaaacttgaaaccaactttacatgcttcaaagcatatataaaccctttcgaaaatccttttctcattcacaaaattggttttgatcaaagttgtgttgccaagattaagttgtactatatgtgtacattaattatgtagaatggcatgttgatctttcacaatcccttggatcttggccatagctttattcttatctcgataaaaaatccaagaggagagtatagaatacttattgtctgaattcgctttcttgaaatcaccaagtggcatgttgggattcaatttgaacttctccaacaattctttttcaacctaattagcatctaccaacttgttctcccatataattttacaattgtgctcatccacaattttgttcattcgcattgtagtccaatcatccctcatcctccgagcataaattaaccatttacaacctttctccttacatacaactctaattcttaacatgttattatgaatatacttgtactctctgtcagtcttgatgaaaaactcattcaaagtatctcttaagttctcaatagtggggaattctattcccaattcaaacttgatatctacaggcttgaattgtggatcaaattcaatatgtttctttttaagcactactccatcttcatcatcactaaccaagcttaccagatcatctgcctctacatatcctccaccatcatcaccttggtaagcttgattgcataattaatttatcgatatcctcgccacgtgctaggatctgttgtgccctcatccactaaatcttgatcttgtgtttctagagcatattcatcttccaaaaaatttggatcttttatttttgatgtgtgggttattttcctcctag

SEQ ID NO: 3762 - DNA, 1105 bp, Cannabis sativa
atttcacactaaaatcactaaaaatatgtctgatcattttgttcttacattcggatgttaaggagacaagcagagggtacttctcagtgagccttttcacttttaaaaccatcacattgtcttatacacgctaagtcctttacaaaatatctcattcgaagatcttatctactctcattttcgggttcaatgtcatagactccctttttttagcaaatctaaggctttggccaaacccttaggagacatcattggataattttagaagtctcagaagtttcggtggaagaaggttggggttcatttttaagatttcgagtcaaaatagatgttactaagccattgttaaggggttgaaatataagacttcagcaaatacgcgataagttctgggtggaattttgctatgaaaggctttcaaaatggtgtatggaatgcggtaggcttggtcatccttttcagaaatgtttggagtggatggaaaaaattgataatggaatcaaacttgaacttccatatggacttgaactgaaaggggcagaacttccaactagaacgatttctccaagaagaatgcctagccacttctcacgcgattggctcgtaatatgttatctacaacgattccaggcctcttaaataggcaagcatctcaaccttcgccacttctaccagaggagtattcagagtagcaacaaagtaacaatacagcggcaattattcaaggatctactcaaggcaccagagttgcttctactttgatcactgatgttgcatccatgtctccatgactaatcctagtaatactgccactcctaatattttaattgataccatggagaacaatgctactatgaagagtagaacctcaggcacatcgatttctacaataggttcatctacaccaacagttacgatttcggatgtggataacttgattgatctttatattcatgcacaagtagacctggccattttgtcaataccaaccagaaattaacctcaaaagttgctgcaatttcacatgtcaaaaaacctattttgacatcacatagcaataacaatcacaagtcaatgcatcttaacatgccataaattaaattaa

SEQ ID NO: 3763 - DNA, 1471 bp, Cannabis sativa
tacaaatctggttgcaagatgatgatactggttgtatatcagctacttggatagtgagtaacatacctagggtgtgtgcgtatgcaagaaaattgacataaaaaaaatttgtcttgaatgaggtagttcaattccatgtaaaatttatagagcaaatggttaatgctaattgatataccagtgaattgaagcattcttcatatgccaagcaaaaggatgctaagacttggtctatgatcttattcccttgctcgtgaatcaaatgttattaaattctgttagctgacgactatgataaatggactacttttataagggtaagaaatgaccattcgtttaaagataaaagtagattagcagattagatttgttgtggttccttaatattttgaaatggaaggagactcaacgtttcatacatggtatacaaattattaagtcagagaagcttggccaattcaattcaaacacaatatgattacattttcccatgttgaagatcaaaaagaaacaatcacctcctctagagatgcattcccggctctttcaccaatgccgttgattgttacttctaattgtctagcacctgcacatgccccctgaacaacaatcaaatgagacgagttcacatcatatctaaaatcaataagggtatcaaatgatgtcagtcaggaccaaggcattggcataccgatatagtgtttgcagtagaaagtccaagatcattttgacagtgtgtagaaatgacaacattctcaattccaggggtattggctttaatgtcagcaatcaattctccaaattcttttggcacgttgtaaccaacagtgtcaggtatgtttagagttgttgctccagcctttataacttctcccaaaatctgatacaagaattccctctcagacctggtgcagaaaggtagaccctattagcttcttcttcttcttctgtcactcataagaagataatgactataaacataaaataataagtaaaaagttttgtgaaaaatcttttgaattttttgtgttttttgggtctgtttctttctttgtaaaaagctaaaaaaagctaacccgaatggggccaatgtcatcaaattcatcaaaatgcaaacctgccagcatcttcagggctaaactcaacatcatcacaccccaaactccgagcaaacttcaccatgttcctagcgatctcaatcacctgctccttactctttctcaacttgtactccatgtgaattggacttgtagcaatgaaagtatgaatcctaggccttttggcgtacttgaccgcctcccaagccctcctaatatcgttctcattacacctcgacagaccacagataacgggaacatagccgtcggcgtcaacagcgttaccgacctctttggcaataatcttgacggcctcgaagtcatctttcgaggcggcggggaatccagcctcgattatgtcaacgccgagcttg

SEQ ID NO: 3764 - DNA, 1980 bp, Cannabis sativa
tttgtatggcagtcaaatccaaagaacctttgagtttttcaatgagattgagaattgctctgggatcagccaagggcatcctttatctgcacacagaagctaatcctccaatatttcatcgagatatcaaggccagcaacatattattggattctaagttaattgcaaaggttgctgattttggactttcgcgacttgctccagttccagagatcgaaggggacttacctgagcatgtatccacagttgtgaaggggactccggtatatggcttttgaaattatactgattgtcgaatagttttgatgaagtagttgtttgacattcttgctaagctaatttactacgttacagggttatctcgatccagaatacttcctaactcgtaaattaacagacaagagtgatgtttatagtttcggtgttgtgctcttggagctcttaaccggaatgcagccaatttcacatggaaaaaacattgtcagagaggtacaggacctgttcaactttataatctctatttgtttgactttggctcatattaaaaactcttgccaatcattcctttctgtcatttttaggttaatcttgcatttcagtctggtatgatattctcagtcattgatggacgaatggggtcttacccttctgactgtgtggaaaagtttcttgatttggcccttaagtgttgccaagaaagcacagattctagaccttcaatggcggaggtggtcagacaactcgaaaacatatggcttatgatgccggaatcagacaccaaatctttagaacctgtgatcactcctaaagctggaaagcaagtaacttcaccatcttcatcctctgaaataaggaatccatatatgtcctttgatgtctctggtagtaaccttgatagtggagtcattcctactattgctccaagataagaagtatctgattcaagattttctcatattctggaaatcagtttagaatattatgttggagctttttctctctgataaatatacacgttacaacttacattgccttataccagaaccaatttttgtgtatataaatagaaaagtaatagattattattttagtacattgttgaatttgttgctgtaaatgatattgtatgtctttgtgggaactatgcagtttttgttgtaaagggtttcttttaagaaaaacgaactacgacaacagtttctaaaatgtatgaatccatgattatcatttatcaatgaggcatatacattagactagcataactcaattttggcaagctttttttttttttttaataaacaaataattaaaattgatcgaaaatgaagtttcccaaagcaatatgttaatgatgtcagtcatgtatgtgttgaggtaattactattcccactagtggtgattccaattcaagttttaatattagtcacaatgatgatgctgtgagtcgaacattgagagcttggaggtgcctgtttcataaggctaccaaccattatgagtgtattatcgtgaaacacttaaaggtgtggggcaatgaaaccaatgttcgggatgtcaaactagatatcttgtttttatcttaaactattgagtctctctctcaaatggaattacttagtgttcatttgagattttacgaaaaatcagtggtaaaaagaattggtagagttgtccataaactctgagattttatgacccttttaccaatgttgctcataatattggtgtcgtggccagtaagctcaattcgtagaataaaaatgtgcattgtcgtcacaagaaagccattaacaataagaataaggagcttgcttttcttaattccaaccttaatcttaccaatcatagcgagttaaggaaaattgaaaaagaatttgatgtcctcaatgaaaaagaagaaaaatattagatctctcgtggtaaaaattcttggctcaaacttggcgataagaatttaggctattttcacaagtgtacct

SEQ ID NO: 3765 - DNA, 502 bp, Cannabis sativa
ttgtaacttctcctttcacttttggagattttcttcgtggggtgttatccctatttttatgggggcttgagacgaaatgtgccagtgggaagagttattcttatatgtttcaaggtgcagattatgtttcctgtttgttactgcctcctcttgtcgagactttgaaattttgtctcccgatttaaaagtagggagaggcaatgtgtattatggctttggcaaggaatcaccaaggagaggttttgtgggtgaccaccgacctctttctaacttgtaacttcgcctttcacctttggagattttctctgtgggttgtcatgcctattttatggggcttgagacgaaaagtgccaatgggaagagttaatcttatatgctttaaggtgcagattatgtttcttgtttgttactgcctcctcttattgaaacttcgagattttgtcctcgatgtaaaagtagggagagctaatgtgtattttggctttggcaaggaatcaccaag

SEQ ID NO: 3766 - DNA, 689 bp, Cannabis sativa
accagcccttcaaccaattctgcacccaaactgcccttaacagttggacccaatttaccatcatgatagagatggcggcgaaatagttcaacatctctaccttttgggtcatgctcacgaacaaccttaccaatattttagcccaaacaaaacccttaaaatacaataaacattaaacagtcttttcttttacttacaaatacattatatacacacacaaaatacaagaaaataggttctcgatttttaaagtgaattaatcaaaattcagtaggaaaaagaaaaacaaaggaattgggtacccaaattacgagaattccgcgctgccgagccacttgaactgccgcaatgacattggggactatggctttgcctccatttactcgcacatgaccatcttcgtgtatgaaatcagtctgtgaaaccagatttaaaacatgaaacaacactgtgttgaataatcgaaaaagagggagagaagaaaagagcaaaacctgcatatcaatgacaagaagagctgtgtggttccatttctcagccattgctttccaaagtaaagctaccggcaccgccacgctattgcatttgtagtcgtcgttctttatggaatactaagcaaatgatgtaataatgaggccctaacgaacaaaatgggcctataaatatttgacttgattagaatgggattt

SEQ ID NO: 3767 - DNA, 767 bp, Cannabis sativa
catgagccttagtgtgagcgagcttacatcagaggtgcgggcagtgagtagtagtgtcaatccatacactttatcggtggccgccagacagcaggtcgagggggttagcctcaattttttgatttactcttacttgagatacaacttttattaccaaagtatgcctaataatttctgtatactttccttcctctaaatggcattgttcgtagagaggatcaccaaagaagtggggaatatggccatagaattaaactagctatgtgtcaaagttcaatccttgaccgttaaaaatggggccttacatgctaaagttgagcagatcaagacctaggcggcttccagtagccaaaagatccaggcaaattacaaggccaagctggcggttgaggaggagaagtgggacaccaaatatcgaaaaatgtacttagttcacaaagctaaaattgtgcaagaagttgagggaattgtacgctctcttcgagaggacttggccaaggccacaaaggagaaagacatagctgaggcccgcatgctacttcagcctaagattatctccgcccaaatccaacaagtcaaccactctaagaggacatccgaaagaaggatttactcattaaggaccttcaagccgaacacgacaaggagaagaaacaggcagagtcctgggtaacaaaacatggcaacttgagccttcttctccaaggggtcgtcgtaactgtgaccgtcaacaggaaaccatcgatagattgcaaaagagagtcgac

SEQ ID NO: 3768 - DNA, 1212 bp, Cannabis sativa
tggtctaatggccaagattggaaccatctggtgagagagaaactggaccgggtggtttgttcaacctcttggatctctatatttcctaaggttggcactcgcactctgtctatttgacacttagaccatgctgttgtggtattgaacacggttcttgactctgctccgttcaaagctccttttctgtatattgatgcttggaatagagatgaggggtgcagcaaggttattcgtgaggcttggcagaacgttgtcacgggttaccaaagcttcattctgtgcaccaaactccgaattacggccaatgctctgagcaaatggaacaaagaaagctttggaatatgtaaaactaaattggcgctcctggagaaactcctcattgatgttcaaagccgtgaaccctctcaggaaaacttgcaactggagagtgcgttgatgctagaaattgctgaagtggaagctcgccaagatgagatttggaggcaaaaggctagggagctttggcttaaagaaggagatcggaactcccgattctttcacgcttccctggtggttagaatcaagagaaatttcatttggggtgtctcccaagatggcattcattggatagacaatagagacatggtggtggattatttcaggggaaggtttattgaatctttctcctccactaatccaaagtttagggaggaaattttcgaactgatttcgccatgtattaccacggaggagaacgagtacatgcggggcattccgtctgcagaggaaattaaggctgtggtgtgggagatgcctccacttaagtccccaggccccgatggctttcctgcaaagttctacaaaactcactgggacacggttggccaacaaacgatagactttgtgaaggaattcatttccactggtaagttcactaaggctgtcaatagaactttcattgtactgattccaaagaaacaagatgcatgtaaatttgatgactacaggccgattagttagtgcaatgtctgctacaaaattgtggctaagattctggtgaacaggttaagaggagtgctagacaaaatcgtctctccctatcaatctgcttttgtcaaaaatcgatggattgttgaaaactcaataatcgcccacgagattgtccatgatatgggcaggaagaaagggagtgaggcttttgttggtatcaaatgcgacatgtctaaggcctac

SEQ ID NO: 3769 - DNA, 887 bp, Cannabis sativa
tggggtggcgagcccggtacggctccgacgacgtcgtttaggaggaatttcgttggtggattggagttttactcgatggttttggagtcgcttgatgcggccatggtgggatcggagtgggtaaggaagatcgaggcgtttgtgctgaaaccgaggattgtcatggcggtggaagctgcttctgcggcggcagctgctgtcggcggtgggagaagaacggcgtcgtttcgtgagatgtttcatggagccgggatgaggccggtccagctcagccggttcgcggattttcaagccgagtgtttactgggaaaggttcaagtgaggggtttccacgtggcgaaacgacaggctgagttggtgctttgttggcatgagcgggcccttgttgccacgtcagtgtggaggtgttaagaggattaaaaatgttaattaatttagggtataattttaattctctctttatttatattattaattagttattaaaaaaaatgagagggttaggaggaggagggaggtctggggatgtataaattaattgtaagagaagcatccatgaccatatattaatggttttatttaagtgttttttagtttgtgttgctgtctacttggttgttataatccttttttgatctttttatatatttgggagcttttgcttgtatttcttcaaacaaaattattaatttggagactacacaattattggccttttgcatactcgtacatattatctaattttattttcacatcttctttataagtaaattcattaatctccatgttagtgcagatatttcaaatttacaccttttgtacaatctaaatacatgatgtgttaaaaagtttaataatttatataataaatatttattagaaaatta

SEQ ID NO: 3770 - DNA, 1241 bp, Cannabis sativa
ggggggggggggggggatacaggatgcagcgagtgtggtttggttggcgtggtcttcaggtgtgttaggtgagttttctactaatgtgacagagttgctgaccattcgtctgggcttgactattgcgcatcaatttgatttcaatgtcttcattattaatagtgattcttctatgacaattgagtggattaataagcttcatattataattttagttttcagtctattttattaaatatctactctttatgagctgttgtcggtggtgattcttgcagcgtcatttcgcgatccaatggtgttgtccacacactaacaacctcctttactagtttaaaaaattgtgtttggatagatacttatccacgttttttaaattcttctttaacaatagatttatcttatttaccataataattaaccttttattaaaaaacaacaacgacaaataaataagtaattttaatgaaatcaattttggtgattcatatacttttgttatttatatattttgcttttttgaaaatatcattagaaacaattgagacatgtgatcatgtataacctacttgcttcacacctctacttataatttgaaggtcccacgttcctacttctcttcctcagtagcaaaaacaaaaaacaaaattgaaacccaaatcaaataaaatttgtaaaggcaggctgcccagatcatagtgtaataatatacacatagattaatagctccctaatgctgatcattacccatatgccggtatgcatgaatctaagtgcagttaattaccacgttcaaaataatttaatcttaagatgttttggagtttctgtttatcttaatatactgaatttttggcaaagtcaaatatgtacatataaatttatatatataaacgcatgccatgaccacaaaaatgccaccttactagtcaaactctttggtttaatctagtgttagtagtgattaggataaggaaaaaaaaaggtctaacccatagtgttacttcttttatttattagaaactcaaggagtctagatataaagtcaattttcaatttttgggtcaattcacattattatatttaattaagtaggaaacttggatggtatttggtcatttctctgatcgcctaatttggctgtttagatcacaaaatcaaaattatatctatacagcttgcatttgacatgatttttgatttaatcaaatatcaaaatcttatagtttgatttgagattt

SEQ ID NO: 3771 - DNA, 997 bp, Cannabis sativa
ctagcctagagtctcccttacgagattggtgccatagaaagggttgtttgatatacaatcaggttctcaccctaaactcaggtttttccttcccagaagcctgaaggtggccatgcatttcttaaagacctccgtggaagggtgcaaagcaaagatacacccaacacttctcttcggaaattggaaagaaacacaagttagactcaaagcaaatggctgagactttaagccccaaagttctcaactcatttggggggtatgatatatcaaattgctgacagcgacaacatcctacttctatctgccgaaatcgttcaacctaacatgcaacaaaagtggggaacacacttaaccaaagtctccccaagagaaataaccttaagttcttccctcactaactaagctcaagaattaaattggagaaaagaagcacatccgccaaaaaaaaattgaaatcaaaagaacgtgcctgaatccctactaacatatctccgcaaacttcacgaagagtttggcccagtaagttgcatagaaggctagaacgagaaattggcaaggaccaaagtaaggaaatttcctaactctagggaaaactcaaataatgctcccaggacctaatcttgtagaaaaatcagactcggaaaaggacagtaaaagacctcgtttcatggaaaagggccacttcctatccagctctgaacaaacgaccctctgggaagcgagtgaaaaaacatcacagccctaagaaagggagggaaaagaaaaagaaatagtttctgaatcaaccaagcgacgatcaagagtaaagggaaaaaagtttgaaacactggccattggaactagatgcttcgaaaaatgcaaccagtccctaaacagtctatcacagcaagtctttaaaaaaggaacagtaaaaattatcctattcaaactactaaaaaccccctgcgaccagtgcaagttaattgtctctacggctgaaaaagtgtagttaagggaa

SEQ ID NO: 3772 - DNA, 1089 bp, Cannabis sativa
caagagtgctcgtaagggtaagaggaagctagggagccaggttggcaagcttcaatcttgcattcgagagttgaaggatgaatttagggagatccgccaagggtcagctgtacctgatagaaaatttgtggcacaagctctttataacgtgtctcatgcaaaccctaatactgaccttagttggtttggtcctaaagctattcatcgagtagctgaatggaaagcttattttgatcagtcgggcagacgttgctcgtgaatttctcaattggttttattaatttggcacccctcaggcatgttagggcgtgtgtctttattttgtgatgttggatgactacttatttatcatgattgcgccccttctttttcgactttgtatgggttttagcaactaatgatatttaagggagtgttactgtaccttttcattagttgctcctaccatatctactgcttatttattattgaattatgcttcttctcttgttcgatatttgataagggagcatttaagcacttcgtgatgtgctttttgtcctcaacctcttgttatttttaagggagatgatggttccatgaattgactcgaccttttgcatgtgtttattatttgttcctctacgcatgtttttgaggtttgagtactctaaggagtacatatattttttgtatgcccttacttgtggggttcccactaggctcttgcttttcttagatggatgggggtagctaatccctatcatcttgagagatttttctgttatctcccccaagtgtatgttggcattaatgcgagtagatgcttgaggtatgccgcttttttatttgaatgttctgcacaattgtctcactaaaacttgtcataccatgcaatatataaaagtttagagttacatcataatcaaattacatgggaacagaagacatttcaaatatcttccttgattgaaaataaactacttaaagaaaacaaacttcttacttagtctctgttaatggtcatcacaaccttactagtaatacttcttcaagtgcttggtgttccatgctcgtggtaccacggcgtcatccatgcggactagctta

SEQ ID NO: 3773 - DNA, 523 bp, Cannabis sativa
aggcttgtaacggggtgtttgaggtgttggtgtttgaacctttgacgagtttcacgtggtgtttgttcgctgtctatgggagaccgtatgagagtgaaaaaaaaaagtcttttgggattaaatggaagctaggattattcgttgtaagttcccctggatggtagtcggtgatctgaatttgattgcgcatccttgggaaaagagtgggggaaggcaagtctttgttcgtgacactgtaactctgcaaaaaattttgcataatacagggggtattgatttgggctatcatggttgtaagtttacatggcagaataatagattcacgggaggtctaacaagggagagacttgatcgagcggtggcttcgggagattggattactacattccctaatgcaaaagtaaccaatgcaccaatctcggtctcggaccatagctttgtgttagtggatacgttcgggggaaggagtaagggcacaaagtcgtttcgcttttttgaagcttgggctagggagcagtcttgt

SEQ ID NO: 3774 - DNA, 725 bp, Cannabis sativa
tgaggtgatcgcatttcaggatgatgtggtaactgaacaaattatccatcaggattttatcaagtatagtgttgatgcttctgttttgaattcgaaggctgggttaggagtggtggagttttcgggtgaagctgtttgagattggtgggtggctacagatttttgaatttgtttttttcactgggctttatttggtagatgtgtaacgtcataattagccatttatatattataagatataattgtaaaatatttattttattggtatatatataaaaaatgtgtgagttgattatagttgtcttatttcttcttcatatcatcctttttttaaaaaaaaaaattattatgtttttctaaagtaatatacatctaaaaaataacaatattcaattatttagagaacaattattattggtcaacaattaaatataaggaagtctttttttctctgtcttttttttttttttttgaaagaagtctttttctcttttattaggaatcaaatagttgtatttatttgactttgaaacacaccttatttattcttcgccgtgtaaattattgaagcaaccttgcctggtccgattgattctcttttcctttttttttttcacaagaagcttctatatatagtatttattttcttgaagaattttctatgaaagaattatatataatttaacgtatgaattgtaatcaatattaagttagtcaaagtagct

SEQ ID NO: 3775 - DNA, 654 bp, Cannabis sativa
tgaagtttattagagatttgactttaaatttatttacactttctttagatgtttgttgaagaagtcatggagctaattgagctaaattcattgagaaatgctttggttggacttccaggagttaacggtctaacaaccgaacaaagaaaaaggcttacaatcgcggtagaattggttgctaatccttctattatcttcatggatgagccaacttcaggccttgatgctagagcagctgcaattgtcatgagaacagtgagaaacacggttgatacaggtcgaactgttgtgtgtacaattcaccaaccgagcatcgatatctttgaagcttttgatgaggtataatgtgattgtggacacttttctttataggttttataaggtctaattcatgtcaactttgtttcttttttcagctcctattgatgaaaactggtggccaagttatttatgctggacctcttggtcaccattcacaagatcttgttgaatattttgaggtagtttttatatttacaaccacataaaataaaaccattaatttaggcaatgtgatcaaagaaattattgagatttgtaatgatttttttcatttcttttatcttttgcccccgaattcttaacggggttgctcatgttttggctaagcacgct

SEQ ID NO: 3776 - DNA, 699 bp, Cannabis sativa
ttcacatattcgaaccatcatcaaccgaccaattacccttaatttcttgcaggtgcttataagcacttctcacagaatagattcatgttgattccttgctccaataccaaacatcttcattaaaattgttgctaagagggatttgtaaaatgacttgggcttctcttgaattgaatatgtcatttatcacctcagcatcccactctctagaattaagtttcattagctgatagactttgcagttgataagagttggatgatcagaagtaacacagggagttgtagctgaagggagccatggattattgaggtcattagtttcgaagcctgagccaatacaaatcctagcacacgatttcataagctcttgtgattcaaaaatgctcttccaaatgaaacttgaattatttccaagtgaggcagtaagaaagtttccatgaggataatatcttgctttgtacacacgtcccactagagtctgatcatttagaagaagatgctagccttgtttaccaagcaacgacaaattgtagtcatgaaagctacgaaatcctattcctccagcatctttgtgcttcgttaagcgtttccaactcatccagcttataccacgggtgttctgagaagtagtttagacatcatactctctaatgaagaacatgtatccaaaggcaataaaaacaccgacatagcgtaact

SEQ ID NO: 3777 - DNA, 787 bp, Cannabis sativa
ataaatgggaaaactattttactttcttttttggttaaaatacctaatagtcacatgtagcaatgctgacattttaaagattttttttttgtttccataaaaaaatggaaaatagaaagtaaataaaagagcgtgagctacacatccttcgataacgcgtgtactgaatttccacgtcccctaaaatcccaactatatagtccccaaccattagttaagcctttcctcctctctagcttcttcttcatcagttcctcagttttcccacgcttgaaaaacttcacatgctttcatactcgccgcccaaaccagtagtactcctctcattcaaaataacccgtttcggcccatctcagcaatgaaacatgggctttctccggcgactctttggcccaaaaaggcccaccacttcgccgccggttaaggaaaagaagaggtggggtttttccaaagacaagactaacaaacaatccaatccctggccaaccaagctcaacacctcctccacctacgaccctccctcctcagccgctgccttagacgcaaacaagcacgccatagcagtagccgccgccactgcagccgtagccgaagcagctctagccgcagctcatgcagccgccgaggttgtccgtcttaccaataacggtagcgccggaacctctaccaccgcggcccatgttagccgtacccgttactttgctgccgttaaaattcaatcggcatttcggggatatctggttagtcgtctttacttttaaattattgaaaatgatgtggaactttc

SEQ ID NO: 3778 - DNA, 1812 bp, Cannabis sativa
tgatactcgggtttgtgcagaaattcctaaaatgtcggatgacggtcttggaaattggacaccaagctttggaccatggctcaaagtggaggttaaacgtgaggctaagaacaacccgattgctgctaatccagccatctatctgaagaagaataactactctgctcatattgaggaagattctccttcatcaactatcaagaattctggtatgggatttggtattcctgttgcttcccatttgaatactggaaaaacagagattgctggtatgaatataaatgctattgagcccatgggaataattcaggctaataataaaagtatggggttcggtctggaatctatcaaaggaacaagggagtttggtactacaagtggtaaaagaaatggctcttggagagaggagaatggatctttaaaggattctgctgttatggagttgggaagggcctataatactggtatggtagataaaggaattactgactctgatttcaatcatgttaacttaattgatgttcccataaattacgatgatagtttggaaagccttagcaagattgaaggtcctgtaaagagaagaagggtaattccaaagaggacaaagaataaagggaaagtgggacagagtgcaaataatcaagtgggtatggataaggaagatgggggtaactcttcaaggggattttctaatgaaatggatttgacccttgatacttcaatggaagcggcgaacctagttgatctaggtcgccgagagccatgaatatcatgttttggaatgtccaagggcttgggaatccttggacattgaatactttgaagtcccatgttaaagattatcatcccgggatgatatttttgtcagaaactcgacttaatagcagcggtatggaattagttcgggtgcatttgggttttgaaggttgttttacggttgatgctagaggcaagagtgggggattggctctcctttggtctcatgattttcgggttcaaattaaatccttcactatttctcatattgatgctttggttgagaatgacttgggttttgtttggcgtttcacgggattttatgggagtccggaccctggtggaagatcggaatgttggaagctactatataggctaaagacaatgtttaactatgcgtggatttgtggaggcgattttaatgaaattctgaatattaaggaaaagaagggaggagggccaaaagctgagtaccttatgaagaattttagacaagttatttctcaatgccaattacgggaaatagctttttctggaaatgtttttacttggtgtaatgggagatcttctaatctaatttttgaaaagttagatcgtgttatgtgtaatacgggctggacggataagttcaagtcaaacaaggtcactcctctcaaatggtggaactcagaccataggccgattcttttggaagctcaaatcggtgagaaaggaaattcgtttagaagaaaatggggtaatagattccactatgagcatgcttgggctgataatgtagattgccaaaaaattgttaatgaagtttgggaagttaaaatgaaagagaaaccgattgatacacttactcagcttatttacaattgcgggagaaggcttcatgaatggaatataaagcataaaaaagacttttttgctcattctaatgagttaaaaagtaagattgattcactttccaaatcatcagcaatggaagattggttggcccgtcaaaacttggaaaaagatcttaatggtgttgaagaaaaacgcgagatgtattggagacaaaggagt

SEQ ID NO: 3779 - DNA, 797 bp, Cannabis sativa
atgcataaaacattataagtttagtatttaattttgattttatatatgtgaatgaaatttcaaggagcagtggaagtttaattttgtgtggctttatgtagtatagtgtgtaggttaatgatgaagccatgacacacttacgtacgtgtagactgtagtagtaaaagacatatatacaaattatctattatatattgataggtgtcaaatatatatattttctggaattattattattcgagaataaaggaaagtatcagattctagtcatatatattctttggatagaatggagtagttgagaaatatcttgaatcatatggaaagccttataattatcagaaagttatatataatagaccaaaaatagtagtgtatatgaataataagctaggtcggcctggtattaggaaaaataaatttttttaggtcttatattttaataataggtgagatagtttaaaaaattattaaaaaaaattatatgaaatttttaaaagaatttttttctatttggcccttaaattaggtgggttctatgcacgtaccgtacctaggtcccttagcttataatcagccctctaccacgaaagactgtattatataggtctacgtacggtaattaaacagataacaaacacaaattataccaaccaaccaactttcataataacttccaaattatataatagctatatttagttggtaatgttaaatattgatagtaaaagaaaaaaaaaagtcaatatttgttagctttcatatttggcacgcccacagtatttgatacttttctt

SEQ ID NO: 3780 - DNA, 1047 bp, Cannabis sativa
tttcaaaatcacaaccttcttcatggtgacttttttggctctgaccatcggcctctcattttaaacctacatcaccaagtgcattctacatctcccaatccgcgttttatttttgacaaactttggatggctgaatttggctttgatgagtgtcttcgccaggcttggacttcgggtcctcacattaatggttgtgatccaatcataagcataaataaaagacttgaacagtgctcatcttaccttcgacagtgggaaaagacccttggcccatccttaaattccaaaataagggacactaaaacacgccttaaaaacgtgcaaaactgcccttagccgactgatgctcagcttatgcttgggcgaaagctggagaatgaacttgatcaactcttatataaagaggaagaatattggaaacaacggtctcgtgtaaattggctaaagcttggtgacaaaaatacaaaatactttcaccaatttgcttcctctcgaagagcaaaaaataagatcatttctcttcttcgccctgacggttctattgccaaggataatgactcgttcgctcacatcattgaacaatatttttctcaactctttgctagtcagaatcctaatgatgaactaatggagcacattttatcaggcctaactgagcatctttcggagtcagaagctgagtccctcaatggcatttatacggatgatgaaattaagagggctgcttttcaattggccagtgataaggcaccgagttcgaatggctttaatggcactttctttcaaaaaaactagcatattcttggccaggatgttctccttgcagcgaagggctttctcaatggggatggaaaccttggtgtaatgaataacactgttattgtgcttattcctaagcattcccatcctcaacaaatcactgactgcaggcccatcagtctctgcacaaccctttacaaaatcatttctagagaactagtgaaccgtcttaagcctatcctcagtcccattatttctcccacccagagtgcctttcttccaggtaga

SEQ ID NO: 3781 - DNA, 2921 bp, Cannabis sativa
tgttatttgcaagttcatgttgttgttgttgttaatatgattttgaatgagcaggatgctttgcctacattcccagatgaagaagcctttgcttgtatcgaaaaggaattgggattatcacttgactctgtttactcgtccatatcgccatctccaattgcagcagccagtcttggtcaggtttacaaagctcaactaaaatattctgggcagattgttgctgtgaaggtgcaacggcctggtattgaagaagctatagggctcgatttctatctgattcgaggtctaggattcttcatcaataaatacgtggatgtaataaccagtgatgttgttgcccttattgacgaatttgcacgcagagtttatcaagagcttaactatgtgcaggtccagaatttgctgagcccaaacttttttatttatcgttttttgtttgtgatttttcttttggaagattcttcctagattgaatgttaaatttgacaggtgcctgctgcaggaggcgcaaaatgcaaggagatttaagaaattgtacgcagacagagaagatatccttgttccggacatattctgggattatacaagcaacaaagtattgacaatggagtgggttgaaggggtcaagttgaacgagcaagttgcgattgagaaacaagggttgaaggtgttggatctagtgaacactggtatacaatgcagcctgagacagctgcttgagtatggatatttccatgcagatcctcatcccggtaatctcctagcaacacctgatgggaagctagcctttcttgattttggaatgatgagtgagacaccagaagaagcaagatttgcaatcattggtcatgtagttcacatggtcaatcgagattatgaagctatggctcgggattactatgctctagatttcctagcccctgatgtagatgttactcctattgtacctgcattacgaaatttctttgatgatgcactcagttatacagtgagcgaactcaatttcaagaccctggttgatggtctaggcaacgtactttatcaatatccattcaatggtgcgtcactcatatccttttgcccctcttaattaaattaagcaaatattctaaaattgttttcatcgatgttggctagttgatggcttaagtttaagtgtttaacagtctccttccaaaatatgttgtgtgctgcagtgcctgcatattacgcattgatattgaggtcgctgactgtgctagaaggcttggctctttatgccgatcccgatttcaaggttctagctgcttcttatccatattttgctaaaaggcttctgacagatccaaatccatatctcagagatgctcttattgaattgttgtttaaagatggaaaatttaggtatgatctttgtcagctatgctatcttgtcttcataatttcaaccgctcctatcacaggcgtcacttactagttttcgtttgctgcagatggggtaggcttgaaaacttacttattcaaggaaaaaaagatagagatttctcagcaaaagatgctttgcagccagtattgaaattattattgggcacagatggtgaagtgcttagaaatttagttatcaaagaagctgttcgggttacagaagcgtttgttttaggcacagttgttgatacatatagtttgatgccagatttggtgaaaggtttgatttttaatgggaacggaaactcatctggacctcttgttatgagcaaagctgaacgggaaaacgtgttagagctcagagatcaagtatctagaatatggggacttcttcaatcctctgaaagtttcgatccagcctctttgcagcccttgttacaagtaataacttatactatttcttttaataaagttacattatttttattatcattctttattatctgttctttcctgcatagcattcaacataaaattgctgacacaaatgtttattactgtgaacaatcaaagaaatgtaattcgaatagtctaaggtttgcttcaactaggtctacttgagtctcatatgggcatcgatatggcaattcttataatttctggttctcaaatatttaaggattaggcaaaaagacttgttttccattacaacccaaccgaaaattgagtttaattcttctcacaggaatgagaacccctagaggcctcatattttttcattgaattttgccatgttctttaaaatcgaaatctgattgagttagtatactcaatgatggttgttatgatgatgaacaggtgctgcaacaaccggagggacgtagtctgggcgggcgtgtgcttggagggatcactcaacgtttggctgctcggttactacaacaagtgcttcgagtgccaccaacttcatctgcctcctccaccacttaaatttcatcttatagtttcaattcaagcataatcatacactaatatttgtaaaaaatatcaaaatcataaattcaatcccttacaagttacaattgtgaacattaatttaacagttgtagataaattagtcccattttttaaaggtaaaaaaatactactgctgttaaattattgtttacaacaatagtaataagttaataattgtttcgatttatactatgttctttttgttaagttatttttcaatatttataaatgaaatagtacagtgcaaagaaaaaatatttctttgtattaatatggtacaattcaacccaaaaattcacccatgccactataaaaaatcacaaagtttccactttctaaggctctaaaatctgttcatcatatataccaacactaactccattgattttatttcacattttcaatgattttacaactctaatacttattattatgatataataagatgaagatcaaaatcttagaaaattggtatgttttcatgagatttgatcctaaac

SEQ ID NO: 3782 - DNA, 2219 bp, Cannabis sativa
taaaggaatgttagcctgagctgtgtttccagcattagcgacattggctaaattaggttgattagccccattgttgttgttattatgaaggccattatctctatgagcggtcattctctccaatcgcttttgttttcgattttgcctacaagttttttcaattttaagatgaacaggcactagtgactcaaaaccttatcgtcacgtaaactttattaatcttgaaaattaagaaaataagaagcaaaccaaattagaacatgttagaaaaaacaaaagttgaatgaaaaataactaattttgatattgttttaatatttagtctccgacaacggcaccaaaaacttaatagtaaaatttattacgcaagtgtacgtatcgttttaagtaataaagtgcctaagcacgagaatcatcctaagaagactattaccaagtaccaataattatttttccattttctatttagcaagtaaaaattgaaggaatgttattaaatctatgaaaataatttaattatgaaattaaaataagcaaacaatgattaagaatatcaaataatggagcctaggctattaatttcatcaactttacagtctatttattttactaattcattcatcatttcctctttctattttaatagtgagttaactaaaatgaatcttattctttctcgattttctcgagatataaaatctcaatctctgtgcaaattttttacgtatccttgataaatttcaacatttaaaagatataagaatggaaattctattttctacacaagtcatactggtactatcgtctaatatgtaatctatgtctatatagctatagcatattcaattttcatctctcgaatcttgaattggaatcataaaacatacaaatagtgataagttattcacaagtattaagcataaatcatataaattacaataaagagaaaaagaattaataaaacattaaagcaaaataaaatagaaaatgaaattattatcgttgaccccaagataagaaaattagtacatgaaaatcatgttcataatgattgcattcattattcaaaataagaatataaacaaaattaaagaagaagaaaaaaaatgatgataaaaattactaagtagttgctataaatgagtttctgagtttagagctttcaaagcatactaaatatactaaaattaacatgtttatatatgctaaaaatgttctctagaaaatactaaaaatctttaatttttttttaaaaaatacacttaaaagtcgcagctcggggtaccgaagccgtggctcctcttaaaaatctatctttgtcgccctatcttttttaagaaaaaaaaaagcttcaggagctggaactccctatggtagagctgcaacccctagggctttcttgctctattctttttcctgcttttctacaaatttaacttgttttccattttttatcatatattcctaaaataaacgaaaacaagtgtaaaaccaaactaaattaacataaaagactctaaaacatcagggctctagaatttgattctctaaagaaattaacaagtctatcttaatcaaattattcatattatgtatggtctaattaggggttgcatttttcttaatgtgtttatgaacgcagggttgttgtatattttgtctacaaaagtaattaattattgaaaatttcacttagacattccttatgaaaaaaggacccgaattcaagacttagactctgactcgaaccataaccccagccccggactcgggacccaaacttggttctcaacccagaccctaaacccaaccccagacatgagttaaataaaaataataaacaaaaataaaaaataaaatttgttcttaaaattaagaaacaaaagtagcttatttttcaaaaacaatgttttttttaaaaaaatctaccttcattaatattaatatgattaaaaaaattagttaaaaaacaaaagtaaacaccatctaaatataccaattttttttgtcgtgatgtgtatcattatgtcaagatctgtagagtaatatacataaaaaagagtgaggcagtagtagtacgtacgtgccatttcaaaaaaagaaggcaattaaaagtgagaattaaaaaatggcaataaatcgtcaaaacaaagaagaatagggacgtttgatccaattataataaatgagatgatgcgatgtacgaccgaagagatctg

SEQ ID NO: 3783 - DNA, 907 bp, Cannabis sativa
aagtatgttgcatagatatatgcaccacctagctagtcaaaggaatatgtttgtgaagaagcaaattaaatgtcacgattttccgcctctttggggagataattaagttaatttcatcacataaggagcacttgctgtgtcatttaatgtataaattcatgaaaaaaggatgtaatgcaacaaatagaagatagatgtctcccaactcaaataacttttcattttttgtttgcacagcaacctcctcaagaatgaataaagctaaacgtagatgcagatttttagaggaagcagcacaagctcaggtaatatgtatggaacgtggattgctaagttcatgaaaggttttgttagaaaagtccacaatttggatcaatgcagaaagagctgaagctttaggcgtgagaaaacatagtaagccatgggcaggggaagctgggattactttacataatcttaactcagaaattctaatactcaaaaaatcacaacttattctgtttatattcaagtgaactaaatcatataagctataatgctataagctaaaggggctcattttttgtttttgctaaaatcacatttcatatcgataagagattccaataaagttataaacttttcattaaaaaagaaatatttaaactgctcaactcaattacaagcacataaagatggcgtaatatgaaacttagatagttgacaatatgaaaattaacaaaagggaataagttgggatgtgttaaaagaggcttacagctacagaaacctttattggcgactgggaaaggcaaggctcaccaatgtcccgaacaattgaactgaccctttgaaaattcatggccactccacctttcgcacaagtccatcggtcttcatttacgccccttcctcctcctcctcctcc

SEQ ID NO: 3784 - DNA, 679 bp, Cannabis sativa
aagtgaggccaacgggaagggttccgtcgagataggggaagtgtgtggtgatcaaagtagtccctccagtccaaaacggtgtcgtctcgctccaacattcggcttccatacccctccgtggccgaggaggttggatcgcacgcgtaccggaccttatcggcaacggggcagtcgttgaagaaggtgagtccgacgcgcttcacgcgccggagcaaatcggtagagattccatggccgatgacgtggaaggctccccagtcgttgcaggcccgcccaatagcggcccggaccaagtctctttgggccgggtccgagccgaataagtcgataactggaattgtaatcggcggagatgaagatgaatgtataggtcggtgctgtggtggttgaacgtattggagaggaacttgggttagaccagcttgggcaatgctctgaactctaatgggctcgccggcgacttccattgtattggtcagaatcgatggttttcagagagacgatgaaagaagaacggatttgaatctctttgaccaagttagagcactcacaacacaagagaagaggaggtaaacacctcctacctctcaaaaaatgagaaaaatttaagaaaagtgtaaaaatgggactcggatgtataatttagctataatagttaaatttggtaaaaaaaaaaaaa

SEQ ID NO: 3785 - DNA, 533 bp, Cannabis sativa
ttcaagccaactttgctaacctttccttcccaaaacagagaccaaagtcatcttctcaacaaccaccatttcctccacgatactcacctcaaacacagccatctcgccaacctgctttaccatcgtttcatcaaccccgtaacccatctccttaccctcctcgatcaccaaacacttggaatccaactggcccccgtcctccaccaagacccccaaagtgccaaatctgtttcaaaaccggccacacagcattcatgtgctatcatcgcactaacctcagtttccaaccccctccaccacgcccattcaatgcctatttcactcaacaacaaccccagaatacaacaccccacacacctactccccctgccagtaatccccctttgcttcccaccccctcgtccaccattgctgtgacagatccggtctggtatatggactccggagcctctcatcatttcactcccgacttgaatctgctcgaatccgcggcaccttatcatggtaatgatcacattactatgggaaatggt

SEQ ID NO: 3786 - DNA, 1901 bp, Cannabis sativa
ttttttttttttttgattgaaagtagagaatttcattaaatagccaaatctgtaattacaaaagactgaagagtagtaggactagtactctcagtaaaactacgatcaaaccaataacaagagccacgagtcaaatagtgtgtggccttgttagcagatcgtttaacatgataaacattaacattattgaacgaagataataaaagtttacactcttgcacaatataaccaaagatagaaggcatatccaccaaactgtgcaagacttgtatagcaataagacaatcagtctcaataataatgtttgaaagattagaagcttttatccaacttaaatcctctttaatgctcatcatttcagccatcgatgcacttaaagaaccagtcgagtaagtagtagtagccaaaatgatagcaccatttgaatcacgaataattaaaccaatcccatatgcattctcggcttcaaaggttgctccatccacaatcttgatcattccttcattaggtttagtctaaaaatccttgctgccaccacagtcagagtgaaagtgcaacagctcaaaatgacatgtttgagcatatttccattgaccaagaacattatgtgcaatagacaaaacattagcagttgagcgagtacgattgttccataaaagctcattgcgagctttccaaatggaccagctgaccattaaaatttcttcaacaccatcacccttgtgccgtgaccaaacttcagtaaaccagtcatggaagtcagttgctgtcaatggaggtaaagctatagcagacacgttccagcatgatttggagaaggaacactcaataagaagatagtaaatagttttagcagctccattgcagaataggaagtgaagattgaccgagacatgcttgttttacagttgcacatgagtcgccaaactacccgacaaagctctccaagcaaagtgaaggacttttgggggtatttttaacttccaaaagtgattccacatttcagatgtcgcgtccatggaccaactgcctttcaccacttgaatgtgttggtaagcgctttttactgaatagataccagttgcttccttcctccagtagcaggtatcactattagtaagcttgctaagaggaatactcattatatgctgaatatcccttgaattgaaaatatcatggacaacattagcatcccattctctattgttaatcttgataagctgacaaacattgctatgttgtaacatcgtgtgagtagaagtgacataaggattatcatcagatgggggcaaaggcatattgagaatgttcgtatttatactcgaacgaatacaaattctagcaactgccttaaccaggtcttgggaatcaaaaatacttttccatataaagttatgattacccccaaggaaagctgatagaaagttttctcaaggatagtaccgagccttataaacacacccactaagaaagttttcatttaagagaaggttccatccttgcttaccaagaagtgacaggttatagtcatgaggagtacgaaaacccattctgccatcatctttatgtttagtaagacacttccaactcatccaactaattgcacgggtgttattagaggaaatgctccaccagtacttcaacatcatgccttcaagtttagaacatgtctccaagggcaaaagaaaaatagacattgtataactaggaagagcttgagcaacaacttttaataacacttcatggcctggtttgggcaagagtctcccttcccaactctgaatttgttttcgcattttttcctcaagaaaacccaagattgcatttttgtttcttctcatcgtgcataggagacccaaataagtacaattttcatctgcaatctccatatgaagcaaagc

SEQ ID NO: 3787 - DNA, 829 bp, Cannabis sativa
ctctatgacactgatctaaagcaggcagatggaaaatgggatgaagattttattcgttcagtttttaataccacagatgtcgatctcattttagccattccttgttcggattgggactttgaagacaaaattctttggcactacagcaaaaatggagagtattttgtgaagagtgggtatcgaatggctgcctcattaaatactgaacagcactagtccaacgaccattccattgtacagtggtggaagaagctatggcgtttgaaaatccctccaaaggtcaagcattttgcttggaaagtggcacataactggctgccagcaaatgccaatttagcaaagcgtggaattgcttcaggtgttgtctgtagtggatgctccagccatgtagatgaatccattgctcatgctttatgggaatgtaaggcaagcaaagtttattggatggggagtggtttctatgatgatctgaagcagatgatgggagaggataatctatccatgcttatgagaatagcttctgaatgggacaaggagaaattggaattctttcttttagtgtcttggaatatttggaatgtgcggaatactgtggtacatggtggctaccatccgaagcctgaggagatgattgaatggtgtgggagtttccttgctgagttcaggggtgacacaggcagcaggagcagtaaatgctcaactgaggatcacagatgggtgcctccatcaatggatcaagtgaccatcaatgtagatgctggggttaaacagggaggactgctttcgggactggggtatgttatgcgagactcggctggggcaattcttt

SEQ ID NO: 3788 - DNA, 1265 bp, Cannabis sativa
gggcacaaaacccaacacaaatcagcatataggttggttaagaatgttgatgcaaatgaaagccacaatgagaaatggagaactatttggggagctcgaattcatagtagactgaagatgctatggtagaaaattctttccaacaacctactcttaagaggtaaacttcttttgatgtttagcttgcaagactcgaactgttctttttgttctttggctacggaaaactcctttcatcttttttggaatcgtcatttcgctagagctaggttcggtagtatttggacacttagaaccagtggctcttgcattacagattgggatacgtggctaatctagtttaaggatgagggtaatcggcccatagggtgaggtttaatgtgttctcggagggtgctgcgattatatttgaatgtatatggaaagaaagaaacaaccgcatccaaaatgcaagttctactcctcttactgtgctaatgcttcaaatcaataggagacttatgaagatagaggagtttcgcacccctgatggaaacacactacctaagtggctcccgcctccacctaggtcgatcatatgcaacactgatgttgctattggagatcaacattctgttggggcacccatattcaggaatgaggactgggtatccgcgaacatccacaatgcgcttcttacctatagcgatcctttggttggcgagattgctactcttaactagggtgctaaaactgctaacaaccagggtctttataatgttatttttcaaagttactcggctggtgctgtggctaccgtggttagaaaaccacatgaaatcaatgccttgcatcataatttccaggaattagtggtgaagtttcacaacaatataaagcatttaaacgttttggaggtttgttggatccctagaaggctaaatggtgtggcccatggtgtggccaaatgggcaatcagttctaatcaatttgggaacattgatctgtctaattttgacagctccctactcaatgattgagcagatggttgtggtgtggttttgttgtttctattcttcttttctcatttaggttgctgtctttagtattaatgtctgtccttgtagtttttagtttggatttgaagtttttttctccctgtttcttatgttagttgggtttctcccagtctgcttgtagctgctttgttcttgggtgctctttgaggtacattataaaagaaagtcttaatttgcgcatttacgatataagttatatcttctacc

SEQ ID NO: 3789 - DNA, 1148 bp, Cannabis sativa
tttaagtttttttttttttcaaatatatccgatatatagaattatatttactgagtttaactacaatgtctattgatataattaatactagtgattagccctccatgtattgatccataattagaattagttaattaccgttttacctttctaattacctctttatcctttagtactattaattcactagtgaaagtataatttagatccaatccaaatttgtgcatcaagttctcagctatttaccaagttttttggaaaccgattataataaaagattaagctaaataaaatatgattaggatgaaaatgagacacatttttttatgtcgttgggacattaatgagccttagtctatgaggtaattttttaagctctttgatattgagtttttacagttctttaatgtattttctagtcatgaaccaagaaagtcgaaccctttgcatgaaatttatagtgccatatttataggcacacatgcttaataggccaaacagatttggatcctattagggtttgtacagtaaatcaaactaatggggtaaaaatacataatttaatatgataatttgagatgttgggcttggtaggagaggcctaattctgaagagtagccttctgtacgatgtagtgctattgatagtgacatgttaaggcgtgtgccattgttgggaaaaaggaatctcagagcagtgggtgttcctctaaaaggttgatttccttcttgatgcgtgcctttgtaaggtctggcagatgggacaagtcgctagatttcttaggattgtgttagagatgtggcatgtaagccacctctgggatggtctatgatcccgaatgcaatcttgatttccattctcggaagacccctgagggcatccttcttatttccttgcatttgtcttgtgaaattattagagttgaacctctctttccaggacctcgagggatccgggaggtagagtcacgtttgtatgaactgtttggtttggtatccacctgggagtagggccttttccatctatctgggccaattgatgggcccaaggcttaatgggcctcctaataagccatgtgtcatccgtctagaatctcaggtaacatttatcccaagctttcatctgcttgagagctgtggaggcttgcc

SEQ ID NO: 3790 - DNA, 1233 bp, Cannabis sativa
ttaactttctgcattgttgtttatgtttctttattgtcattgcattgtttattcacatttgaattgctaattccagctggtttatatgcaaattgaatcttcaaaggctgttcaatttagtttgtgtttaaagatttagaatttgaatgtgtgtgtgtgcaattgagtatgtcatgatcgtgaattatttgattgaatgctaaggtcaattaggaccttaataatctaatgtatatgttaagttggtgtagggattgagtcatctaattctaacagtggtattagagcaagattttggctgaaaattcaactcaaaaagtgatcaagaatcaagcaaaagatggagaaaattgatcctcaacagagagttcatgacattgaagacatagtagatgttcctttgaacgatccaatagaaatacctctaattaaatctttatttgcgtttgtgaaagtgttaacatgagtagtataaaaattgatgttgataggtttgatggaattggtgattacaggacatggagaagaaagattagatttctccttgcaaaatagaagctattgagagtgctaaaagatccaatcaagtggccactacaacaaaaagagatattcgcgacagtcttaaaaatgtttttttggggaaccattgctaaaacaattaagcaactgtttaaaacggtcaggaaaaaataggtattcttgacggttttaaacatttgggatgtataggcgataatttttaagtgggaaacccgtgtatttttaatggggattgctaacggtttaaaactgtcaggcaatgtataggcgacattccctgcttagaattaacgggtttcaaatttgaaatttcatttcccctgcatcttaagtttcaaaatttcatttccctcatcataaatcttatttttttgcctctgaagatataaaccccccagaaaaaaattagattctattttttcaaagtcatttgtaaattttattttatttcacttgctctctctcctccgtgaccactagctgaacaatcccactcctccactctctctcgctctgtctctctcctccgctctctcgtggcaataaaaaggtaagcacaacattctcttatttattgtttaaatttctattagtcatgatttggtttgttgatcttgatctttgtgtgtgcaaaagaaatccgaagcttgaaatccaaataaagttttgaggatcgtcaaaattaatcta

SEQ ID NO: 3791 - DNA, 1664 bp, Cannabis sativa
aaaaagaaaaaaagaaaaagaagagagaataatgacaataatttcaaaccacaaatactagcgctatatagttattacctctttggtccagtccgtccgaaacgttatccacaaaagtatcaatgtttgaagaacagttcctccaatcattcctagccatattccctagaaatatacatcagatagactaaataaattatattttaattaaaaaaaaaaatcaaaacattaaaacatattaatttaacaataataacaataaataattcttattaaaagaagagtgagaaagaaaagtgggcacatatgaagagtgagggagaaaagtgggcacgtgttagatacaatttgatataatatggtaataaaattatttttgagttaaatataatatttgtatatatatgataatttgaaataaactattaataagatataattatttttaataaatttataattaattataatttaaaatttattcttatttataatcaacctaaatgagatttaatatttttataataaattaaaaattatttttgaattaaatattcttacatactataaaatatttttttaatggtttcaatatattactcatttggctattaaaaaattgcatctatatatatatataaatatatatttatatcaattttagaagtattaactaatgatggataataaatgataaatttaagattttatgtttaatttatttaattaaaaaaatattaaaaaatatttatatcaaaatgtatatatggaaaatatttaagttaaacttaattttttttctgtttaataatatttttttttctgtcagcaacaattaaaaataagagaatttttttgattaaataaaaatgttaagcataaaaagtggaatgttaaaaaataatcgagcatgagtagtaatagtataaatacgtaccttagcacccaggttgaagtaaaatcctaaaagcacgcctaaagggattccaaccacgtagtaactgcctacatttatatatgcaactaaagtttgccatccgcacccaacagcaacccctattgggatccatatataatgatcaagtacaacactcacaaattaattaattatttatattataaataaataaattataattgggggttgatgttgatgtgtgtattaattgtttgtacctgataagacgggttgaaccccattgaggagaagagtgagggagagaagtgggcagagatcagatacagcagcggcaacggtttcaccatcagtaaaggcgtagctaatgacgtcgcgtaaggcaagcacaactattgccgcaatcactgagatcacgaatgagatcactgtcaccactataactgaaaacgctgctgattttggattccctcctcccagctcgttactcactctcacactgcatataataaataaattaactgtgccatttaccattatttacttaattcaaaaattaattacattaattgaacacaattgtacatataaatataatatgatgttagtatatatagcaaaaataaaagatataccttgctgctgcattgaacccgactgagatcatgaatacccatccggaaatagttgtgctgcatgcaatatttaccatctcaatattctttattaatatcactatttttttttt

SEQ ID NO: 3792 - DNA, 567 bp, Cannabis sativa
tttgtaagtaattattctatggttggatactcattcttcatacatgtttttttttggcttttgtaaggatttttgctgttatccagcagaagcagtaactttaatagttgtattggattgatcttttacttttgaattacctattagttcgtttgaatatgactgtttagtattaatttcaattttttctaagagagcatctttttgtaatgaattagattctttacttgataatattagtttattatctaatttttcttagctatctttgattcatgtttgtgctaataaaactgcatatgaattaacagtttgtacactcaaataacagttcgtgttcttaagataaatgataaattaatttgcatgaataatttttttattaatattaagagttagcttcacattcttaatttgttaaaataaattgtcatatatgtataaaataaatatgctaactagttttacgatgtaatttcactcattttatcttcaaatttactaatatcagagccacttatatgtaaaaataaattcatatatataagatgaatagaaattcattca

SEQ ID NO: 3793 - DNA, 1233 bp, Cannabis sativa
ttctagaacaacatctttgaattgaggactaagttttatgtaagaaagaaatggctaaattggatgagcagtagaagttgtgtggcaaacataatcactaaggtgaaatggtttctttatgttgcgaccaacttttgtgtgttggggattgtttgagggaattggttgtgttaatagagatggtagaatagtattattggatggaagtactgctcgtggaaaataatattcaatatcagtatttggttcttgagtgaaaaagggaatatattttcgtggaaaataacatccctagaagtgtaaatagtatttggttctatatccagcaaggtgtaggctttcattccatagggatagctaataaatatggaggcacagctgcgaggggtgaacttatgtctttgggagacaaaagttgaaccataagccaagcagctaaatgtcctcaaatggtcataatttggacgtttattgtgtaaaatttcataggatgtgagtcctttgagcaatgcagataatgttctatttaacaagtatgttgcagtttgtatgataagatcaataaactagaggtaagttagattgaaagcatagagctctagctacatttaatatatgttgttgcttttttttcactactgaattttgttgtggtctttccacacatgagtgttagtgaattatgcctttagaggcaaagaatgaattcatatttaattctttagcattgctagaaaaaactgctttgatggtgatagaaaattgagtgcaaatcaagttgtaaaagttcatgagaaccgtgggagcttcagcttttattttgagcatttaagtctaagtaaatcttgatttgtcatctacgatggtaaggaaatatttgtaaccttcaacagttataatgtggaagggaccctatatgtccgtgtgaaacaaataaaaaatattattggcaaagttattgtgagatatgaaagagagtcttttttgtttagccatgtgagaaatggaacaatgttattcagatttaacagaaaaagatgagtcaatctttttattacaagcattcaaaatatacatcaaagggtgaccaaggcgattatgccaatggtctacattattatttgaaaaaaaaatgaaagattgagttatattggccattgtagtagcatcttattgcagcaaataaagcttgccgtgcagcctagctatcctaatcacaagtctttgagaatg

SEQ ID NO: 3794 - DNA, 621 bp, Cannabis sativa
actggccacgacaccaatattatgggcaacattggtaaaagggtcaatatgcttcgggagccattcttacttgataatatcgacacaatcagattcacaagcccaagcattttcaaagtgaaaacgagaacggaatatcagtttagtattcgaatcctgtttagcaatagtagatagcacaagaggcctatggcgagacccggtaaaactcaaatgagaaacataagcattaggaaaaagatcaaaccaggcagaattacacacaaatcggtctaacctttcttggacaaaagtatcatcgcacctcttgttacaccaaatgaacttgggacccgagaacctcatatcaaatcaaaagcaataagataaagcctggcgaaaattattcatgaggtaccttgcatttaaaaactctaccatctttctcaaacaacgataaaattccattctagtctccaccataaacccaaggataagagttgttataagcaatacgctgcatcaaagtccaaaagtcaggacgaaaagaaacatcaggttgtccataaactccagtgagactgatttgctgaagtaacgagaacatcaatatggcttgtagagaaagtgagaagggtaaca

SEQ ID NO: 3795 - DNA, 978 bp, Cannabis sativa
ctttactttcattagatttacacaatgagtctagaatactaagagtcatgacccgtgtgttaccttgtggtgtcggtggcaccatttgcatccctgttcgggtgcgtgttgctatgcataatgtctagtgagctcaataccttgatttacctctttggtggaggtgtcaaggtagcacatcttctttgaattattttgttccgggtctcatttgggatcagctatcagagtgatgtttcttgtggcaaaaatcattgacattttgtcctctgatttagatgacactgaagagaacccatatgctagatatgctaggttaatgtctaagagggccaatcacttcgaagatatcattacctgtacagagcgtgtcaagaggatttaggctgaaatatttttatcttgagcggtgagcaacatgatctggttggtgatgcttgtgtgtatctctccaggcttagggcctcacttgttgaatcctagcaccatttgaggttccttaagagctctcttcctcctattcctgatgtccattcttactttaagtttgctgagccctccctgattgaggaatgggcagtcacttctgtcagccccactcccgagagcgcccagggtcaagatcagcctagaagaggcctgaaggaaataaaaaacatgtggcttgtgcttatcatagtttttatatgttcgtgggtatgactccacccaagcaaccagtgtcttccattacaacccgcgagcatgcaccttcctatctacctaggcagcacattcccttgtagctcacagaagtacccttcatatattctaatatttaaagtacgttgtctgctaatggcatccttaatgtgatgaacaccttcagggtgcacgctaccaatgatcctgctttgtacagtgccgaacaggaataattttctattgcccccactcaggggggtcgcctttagtggatactgttggaaattattttac

SEQ ID NO: 3796 - DNA, 557 bp, Cannabis sativa
tggaatgatataaccattgactttattgaggggtttccttgttcggaaagggtggacactatactgattgtggtggatcgtttgagcaagtatggccatttcattcttcttcaacatcctttttcagctaagattgtggttgaagctttcattaaacatgttatcaagctccatgatattatttgctccattgtttctaatagagatgttccttagccatttttaggctaaaatgttttgacaacaagggactgtgttgaagcatagcacaatgtattaccctcaaactgatggccaaactgaggtagttaatagctgcctagagacttatttacattgttctgctttcgagaagtcgcgagtgtgggctaaatggctctcttgggcagaatacttgtataacaccagcttccactcatcttaggattccacaccattcaaggtcctttatggaagagaccctctagccttggtgtgttatcgttcgggtggttcaccggtcatggaagtggaccagttgttggaggaacgatatgcatttctcgatgatcttaaaa

SEQ ID NO: 3797 - DNA, 637 bp, Cannabis sativa
ggccatagttttgtttcgctggcaaacctcacagggccttacaaaattaaccaccttctgcttcatgccagtccgaaacacattctcacggagtcactagtaagtgcgagccaagcaatctcgattttgagtagcttggtcttgttttaccactttgctaacttttctcatgatcttactcagagtattttctcccagtatttgaaatctaagttaaaaattttcacccatactggtaccttattaacatttttcttagtaaatatctcatgagcactccaagctttcatgattacaggtttctgttattataaaaattttgtattagagaattcaatcgctgtaacactaaaaatttcacctcatgacttcttcgcattcgcatctcccttgttagttccctgagtaatcttgcatggacgacctttgccatacccacagttcagagctgagagttaaaccttagcaaagcaaaatttttagagaaagttattttatacaaagttttctcttatctctttctatagtaataatttatgagaaatttataaataattcacatatctgatcaagagttcaaaacatctattattttccaccagttcaaaaaacaaaattatttggtgtttaattttga

SEQ ID NO: 3798 - DNA, 1877 bp, Cannabis sativa
ttttttttaacatccattaatgcaggactctaacgagtgtcactaataattaaaattttactagtgaaattttaagccaacaaataacactcaaaacaatatcacttgattgatttttttagattcatagtgaacatctttttttattaatacacattttatccattattatgaaaaagggaaaaaaaaaattaatcccactaagatataataatattttaaatcttcaaaagtgtcattagatgtttttattactattagaataaaactatacaaaaacatttgaaagaaataacaattcatgtccccacaaaaacacatgattcatgaaaattcccctcatacaatataactaatatatgatgataatataataaaagaaaatcaagtaattcagaattacaattgatgattgagaatttatgaataatgatacatagttatttttcaccacaaatcaacaaaataattaagttttaacactttaatacttaaaattttacataaaatttatttaaatagtactattccttgtacttattataaaactaataattaagaaggaatatgattaattatcaattctgaaattctttgttttgataaactatcctgagaagcatgtccatctccatattgatatataaattgtgatattctagcaagatttttacaattttgaagaaattgttttgagaaaggagagtccatattttcatcttcattatttatttccttccataattcacttattagaaacttcatatgatctcgagcttcatcttcagaaacacctgtatcgttcatgtaacattgaattgatttcggaatatcacctcttttcatttcatcctacacagtaaataattaagagaaagtaagtaattaaataaatatatatattaggatatgtaatttagtcacgagagaggtcgattacttgtagtaaatttttaaaaaatttcaaataattagtttaagtcaaaatcatgattccaacagtgtatgtatgtacatgtgtataaatatcgaaacaatacaagtgcaataagttgcttgaatatcatggttttgatatcttaaattatttaaaatttcttaaaaatttacttaacatctaaaaatactaaaatacttataaatagtgattaaaatatcaatcaatatccatttttttccctatatatgtatatattcggtgagaattaacttacaggcgatgttcccagatcatctgtaagtcgtagaatcatggatgcgtggtaaaatatgggtggataacctaattccagtaaatttatggcatcttttgtaacaggatttgtaagagagaaataagcatcaataagaataatcggtcctgatactgaaatccatgcattgttaatgtattcttcgaatgttggtttgtatccaccgtgaaaccatttcgcctcttgtaattgatgtttacaaaaatctgcccactgcatgcatgcattacgtgaacataataatgttaatttttcatagaaaaatattcaagaaaaaaaaatatgtaattaataaataaatatacgcataacatcaattaatcaatgtatactgtatttatataacatattttattttaaaaatatgaataatttattatctcaaaagtagttttcaaagtacatttatttatttcacatgcctattaaaaaatataaacaagtgtaataatgctaacatgatttcgacataaaatattatttagaattttttaaaaatttactatatatatatataaaaaattaagttataatttatcagaagctagaaaaaaaaaaaaacaccactataataatttgttagggaaattattgtaaaattttctatatgacaaaaatctttgt

SEQ ID NO: 3799 - DNA, 1265 bp, Cannabis sativa
tagccacctggttagtcccctagccaccacttcctcagaaggtgtgccacccatgtcctcatcaaactaccccgattacgatgcttcaggttggttggtggtttggtctatctccatcctactcccatacaatgctttcccataggccattgtgctctcaaggaaagaagctccaatgtaggaaatatcaaccctggcattggatagcttgatttcatagatgatctccaaagacaagccatcatactcgttcgttatggtctactggccatcaaggataatcttcagttcttctctactgagatcatttctttattactcctcccgagtgctaccactagcctgtaaacgtcagcaggaaatgtgttattctcctagttcctggtgttgagcacctactccaaactagtaactatgtcttgcttctgtttgacaagagcctatgaattggtaagggcttccccctcgccaaaatctcagtctccttagctttcagcttctcctaaagagcgccaaaggaccccatggcggtgttgtgcaaaaggatggatttttaaaaggcgttaaaataaaacaaagtcaagttagtgcaagaagaaatgtttggctaacatcccctctatggtgcttctagggccaactaacctctcaagaacacaactctggccaaccagcttttcacaacagttgcatatggttggctagcttttaacaacatagaaaattaagcaaagttagatttgtaactagcaaggccaagtcctagattttgctagatgatagcctatttggcttgccatcatcgagctccctaagctcatcatccacagtgggtaagaatctgtgcataaacctataagcctcgtccatggctgaatctgccccttagctcggcctttaggtgaccttgcccaaaggctgtgtcctcctcaatggagggtcaacaatcatgtgctgcctaactggtgcaagcctaagaggaggaggaagaggaggaagagatgatcctgcagcatcatcagagtgggtggaatcaactaccatcatcctcgaaagaggagtcatatctgtaaaaagaaagtaacaaagttagaacataagttaaaaatatttaatacaagagaaaagtagaaacgatggtgcaatcaactaccatcatcctcaaaaggggagtcatctgaaatatcatcagcggtctccttgtccttaccgctagatgttggaaaggggcgagtgggcctggaaaaatttctagcctccaagtc

SEQ ID NO: 3800 - DNA, 777 bp, Cannabis sativa
aaggtaaagcttaattaaggttagttaataaggttgggttaactaaatagtgttagaaaactttagctatcaagacaagtttgaaaattttcaaactataattggatatttttaagattcatcaaaacctttggctattagcaaccttcaactactctatgtagtagatttaattttaaggtcattttatatcattaattattattttattacttgacttctattcttttaatctacaagttacgtcattcaaatattgtacttttatatttttacctaacaaattcaacaagggagaaaaaaaagagagcaataaaaatccacgctactataaagtggtctttttgcatctctcaatacgtcaatcagtgcccataatcgaaagcaaagagaccactttaaattttttttgtcttttttgcaaagatgcatgtttgcgcctattagaaaacccattttggattttgtattggttttaaacagacacaaagtagcgtcagtttataactaattaacacaacaaatacttaaaaaaagtttgaaatattaaatattcggccaaagctcattctacaaatcctagaaaaaaccctaccttaaatacacacttttcttatttgaatatcaactgctagccaaccccttcgatctctctttctctttcttgggtctctccaaccaagttcctaacaaccaccccagacgaaaccctagtattgacgacccccatgaaccaattactaccaagaataggtgcccttatgcccaatgacccta

SEQ ID NO: 3801 - DNA, 899 bp, Cannabis sativa
cctcaaagaaactgtgcatctctcaattaaacacgagggacaattttggagtctaaacacagttcataatgagctttgtaaactcacaaggaaaaccaagagcatccaaaacctctttaataaaatcccattaaacggtgttataagctttcctgagatcaagcttaatccagcagctctgtttgtaactttttctttattattgtcgcactagattttgacaaaaatcatgatattatgcgctatgaaatggtcgtggacaaaaccaccttgattcatagctattaagtcaggcaaccctttttttatcctggagcaaattatttttgtagctaccttgtataatacataacaacaagcgatcgaccaaaaatcacctacaaacttagggaacttactcttaggaataagagtaagagttgtagagtttatctccttcaaaattctacgagagtgaagaaaagataaatggcctcactattctcagcgccaataacatctcaatagtcttgaaaaaatagctactaaagcctttatggcctggcgcctttatacctagaatagagaagacacattccttaacatcctccattgtataaggctccattatggtttgaatgtgtaactaacgagccaagattcaccattttttgttcaccttcattctagcactcattttacaccccaataaagtattatagtaggataaaaatgttgttgtaacttcctttggcttgtcaatcctaactccttcttccgttgtgactgagtagattcggttttgagatcttctatcacgaaggtaagagtgaaaaaaaccaatgttcttgtcttcctcttggagccatttaatcttagccttttgatgaagagtcgcctgtaatgttttttggacatca

SEQ ID NO: 3802 - DNA, 728 bp, Cannabis sativa
atatatcttaggctgaaaaggagcaataggccaatagaagttgctcgttgtgttgaattgctctcagggaaacaatgaagggagcttggtggcctgagttttagcagcgaaattagagagatgttccaagatcagaaaataagctcaaaaatgtaacaagaacaaccacctaacattgagcatcctcagttagaatcgtaagcatgtcccacctaaaaatagtcatagagagctctaaagattcaagcctgtcccacctaaaaatagtcacagagagctctaaagattcaagccaaaagcatggagcatactctcaaaatatataacacaaatgcaactccaagaacatatttgttgccactgaaaaccgacaacagaataggtataaccccaaaagaccacacaagaggaataagacatcacatgttaccccataacttatcaattagagattcatatcaatgaacattgcatggaaatgcatgagtgtaaatctctgtacaatcttaccacaaaccttagaagagttggtgcactctaacctgacacaacaaaaacaaacccaaaataaagcaagaagctggagtgtttctctatgcactggctcagacgagaaaaaatagaagaacttattgtaagatgaggtcgtggtggccttggaaatgagagagaagaaagaagtggtattgaggatgatcagagagtgatggcggagctgggtcgtaacg

SEQ ID NO: 3803 - DNA, 629 bp, Cannabis sativa
atgtatttcactagtaatttataactgttgtctgaaaattttggacaacaccaaaaaggacaagtattaatcaagcaagacaagaatactcacttgtaattatttgagtactcacttaaaattatgagtactcaaagttttgggctactaagaattatagtaattcagtcataatttagtatagtctacttttaataatagttttggtttagtttattagatttggatcacctttttatatagaaagcagatgtctgttgagattataccaccggtcagtcaagaaggatcgttattacaataattatacaatttaatgagtagaaacgtttaaagaataaatgtaagaacaattcgtctattcgtcttaattacaacgtgtgcgatttattaagtctcaatttgtccattcatattccaaacacgtgagctcacaggctctgtggtgttatactcgcataataagccttcgagcctattcatttttaattcatgaatgtttacaaccacccttgatcgtgtattcggatattccacatgttgacaacttaaaacatttgagtccttaacgagtcatcgaacaccaatcatttggaccatacttgtgtaaagaagtagtctttacttgt

SEQ ID NO: 3804 - DNA, 1053 bp, Cannabis sativa
agtactggaaatcgctagaaataaagtacgaactgaaaagtcacatcatctgaagcagcagcctcgatttgatacctaatttgatacgggattggcgactgtaattaaacaaactacttttactgtttacgagaggaatccttaatccccccagaaactagggaattactaaaaagagtcattataatactggagttcaagctcgtacttcgaagaaagcctattggttgtttcgaagcttagtagctaaagcgtacttgtttgtgcgtgttgcttacttgcgtgtgaaagggggtacgcagatttgggctgctaagtggaaccagaccattcaacttgccatttgcactctcctagggtgcgatatcgtagggatcttgctttgaatcagcaaatccttgtttttagttatttggttaagcgtgagcagcgtgggcatgaagctagcaacagcgagcgatttgcggttgtgataaataggtatgaagtatatgattatattagttgatgtgtgtgtaacttgatcttctgctatagaaacagtgaacccgtcctgatacaagttagccaaagtaatatgcttaacggatgcttttttcactagctgttcggagatcaggttagttaggtctactactgcttgactggagttagcgaagccgtaaaaggtggcagtaggggaactgctggaacaaatcctgctttttttaattcgggactaaaacgaggcgaataatcttttactatggtttcagagtcacagttgctaacgggcaaatgcgtctgtactagtgcttgtgcttgctcattagaggatgccccggtagtcagtagggggctaattacttgagttaaaagtagtagacgattagagtaatcttatataggctatttgcgcttaacgagttagaagatgttgccaatgaccgggtatcaagaagatttggatgcgaacccctcccatgagaaagagccccgatacgctgaaacctcttattccggtccttaggctaactacgactagtcaggaattgcgtacagagaagaaatgtc

SEQ ID NO: 3805 - DNA, 654 bp, Cannabis sativa
ctggccctgtagaaactcggtcttgcatggtggaagaagctgtgagatcccaagcctgctgaaggatgtccgcaaccgatttgcagagttggtagttgctggtgtgtctgacctgtcgacaccctctcggctggtgcaacaggtcccatacgggcccccttcaattcaaatgttatgtttactgatggatccttcaaagaggggcgttgtggtatggcaccaattagtttggatatgactaccctgaagtggcatgaggtttgcagtagtgatgaaggtgtttcaactttgattgttgaacttaaggcaattgttttagctttgcaatgggcgatcaacatgaattggtcttctgtaaccttcttctcagattgtttggtggcagttaactctttgaagtctaaaattctgccggattggaagctggttgcaggtttctttaaagcaattgaactagctaagtcttttaatgtctgttcttttttacatgttaaacgtgattgtatttccggtgtgagtgatctagctgtccaagctagagtgttgggagttgtggactcgatcagtgtaggggatggattgtcccctgtcaatcctaatttctttctttaaatgaatgaactgaggttctttttcaaaagaaaaaagaaaaaa

SEQ ID NO: 3806 - DNA, 793 bp, Cannabis sativa
ctactgacgtacaacattaaaagacttgtcaaatattccacttgcgcaaaagatctcccaagagagaatactgcaagctcccaaaccatggcatgtctcggaagctttggggtaaatgttatacgaattttcacaagggtgacacgtgcaaattaatcagtcaaaagtcaagagattattgaggctacctaagtgcctttcttcgtgttccgggagagttagacccctattcttgcggaacatgtttttatgagataatcttcctggatgcgaactgcaagagagatctacgtaagccaatgactcactccagtctagaaggtgggaccctatgctcccacaaggaacatgggtcttcaagcaaaaaacaccagttcggggtacgccttaaactcgcagaagctcagcccaactgtgacaggctacagacccaatgacagagctctttttcatataatgtcagaagttatttcccacgccatgctaccatgcagagcaggcgtgtccttgtgtactgtgcaataccatccgacggctaggggtaaggataattcaaatgagaacgccccaggagcgacacgcgtcaaaagcactaccattacaaccagtacaatctgacttcagtaaaggccacatgaaaaatgagccacctatcaatccaacattgggggttcatccccatgaatatccatcaagggtagtccatgttacaagatatgcctataaatatccccaaagatgcacaaggcagagagctttagattttgatgcttgacttcactttccattcttt

SEQ ID NO: 3807 - DNA, 912 bp, Cannabis sativa
tattgcgtggggttcttgtgaaattttgactttatgttcaagtctaagcttttttatgcctaaatgagttaagtcattgttggtttccttgtcgaatcgaggtctctagagtgaaaatgctcgcgcggccccataaatcctaattttggcacacttaggtgtgtgagtcccggcaccaaatgattgattaatgttttcaagtcccctagaggtgttatggggccctcaagaaggatgtcttaacttatttgacatttataagcattggtcaaaattgcaaggttgacttttttatcttttaaaaatcgagtataacatatacacttaactatttattactgttagatttatgatcaatagttataaaaacgttcctactatagagataaaaacaataattcctaccataaacatatcttatatataaacttcaatttgtttagttgtatgacatccaatttaaaaagttctttttctttctgaaaattttgttctttcttttctctttcatttattattgtttttatttttttatgttcttaaatttgtagtagatcatacaactcagttttgatctcttccatttcttttacaatataatacgacttgaaaaaaaggtagtgttcgcattatataatgatttctaggattaatcataaaatgcatatctcatgtaatttatttagttgattatgattgcaggtatgtcttacaaaattattataaaatttgttatttttaaccatgatgagttttgtacttagattttaaaatttaatttgaacttagataatcaattataaacttatccaatgtttatcttttgctctattgtatatattttatcaaaatgtatgatttgagtttttggatggtggtattattcttttttttttttgttaaatattaata

SEQ ID NO: 3808 - DNA, 1739 bp, Cannabis sativa
actgctgcaccagctgggggggcaccaccgggtctggaaccacattcgccaccatttctgaaaatcgattgagaatttcagccattaaaccagggacgtcacggttttttcctccatgtaagatcgagtttctatagtgccaaatcgtatcccacacaacatagccgcaaagtagaattctgagcctgtcatctcttccgaagttagagcaaaggttcatgattctagtcttcacatcctctccctggattaagtctattctgacgggtaaaggagcaccaaaccacaaagtttttgctaagtgacattcaaaaaacacatgaatcgggctttcaatactatcctcacagatgacgcacttcacattttccatactaccaatcttgtcgcgggttggtaaggccccactacacattcgccaaagaaaaagacttgctctcggatgtaattccttcgaccaaatcatcttccaagattcatgagtacagccaaatttatgctcattttcctgccagtacgcctccttaacagtgaaagttcccttaggagatctcttccaaaccactaagtccttgccaagtccgcccactatatcaatagtcacaatttgctttcccacagtatggccaaaaagaaagatcacataccttgtgttccattggttatgatcatggataatcaaatcagatactgttcttaagttcggagccttggttctcactctctccatagtgtttcgaaactcgtcataacccatccacggaatccatggttgccaccaaatattagtgtctctcccgttcgcaataaccgtgcaagatccctccaggattatctgtctagcatcaattatagacttccaaatactcggatccgaagccttcttttccactgcccagaaactgtcccaactacagaatttttcacgaaaaatcttaacccacaacttctcatcattcgaggccatctcccaagccaactttgagacgagtgccttattgatgtcttcaaatttgcgaaagcccaaccctcccctagcctttggttgacagagagagtcccagctcttggaggcaaagtaatggttcttttcaataccccctgtccaccagaacctcctcacaagtgcatccattttcctactcaaagttaggggaatcgtgaaggtagacatggagtacacaggcaaggctaaagccactgtattaacagcggtcattctccccgcgtaagacaaagtttttagcctccatccttcaaggcgcttctttaacctctccatgataaaaccaaaatcactagatcgtttctttgacagaaacatcggattacccagataaaacccagcagcctccgagcttcttatttggagaacgctttcaatctctcttctcctactaatggagcaccttttagagaagaggatactcgatttctctttgctacaaagctggccagaccagtactcatacttgtgaatgcactcctttatgcaaatggccgcctttttgctagctcgcacacaaaccatcgtatcatcggcaaacatgagatgcgagattggagtgactcctcgagcaattgatatgcccttaatagtcccagccaactcctctttctgcagtaaccttgagagcacatcatggcaaaatagaaataagaagggtgaaatcggatcaccttgacggagcccccgagagggcctgcacttcttgaggggtttcccattgagcaagacc

SEQ ID NO: 3809 - DNA, 1262 bp, Cannabis sativa
cccagcctattcttgagcagtaaacagccacttaaaattctccaaagtaaaattttctgtctagcatgtattttttgcttccaaaggtccttccacacttgcttttctgtctgaaatctgtgattttgcgcacaccagtacgcgcttttaactgagaaagttcctttgctactaccttgccaaaacagagtatccccgcttccaaagaggggtcgaattcgcacaatagcttccgctacttccggagtaaagcactggtttattaattgctcattccaacgaagcgtgccagggatgtaaagatctgagactgatgtgaaggcatgagtaacattgtaagtgaatgcatgacgaacctcttccgggctgtacctcggcacccacggcttggtccaaatgtcaatcttaccgtctcccactaagaacccagcattcttgatacacaagtcccgatttgcaagtatgcctcgccataccttcgaatcatcttgcttttcctgcacactccagaaatcctgaaccttacaatactttgcattcaatattttgacccatggtttactgctattctccccgtcgagcatataccacgccaatttagccaagagagccatgtttatatctttgaatttcctaaaacccagtccaccgtttcgtttgggttgacagcagtccgcccaacttctcagagcatggtagcgctccccatgatgtgtagatcccttccaccaaaatctagcaagtaagctatccaactcagagcaaattgaaacaggcactttaatagtggacatcgtatagcaaggaatactctgtaacaccgaactaataagagtgtgcctccctgctatcgataattgtttttctttccacccttccaaccgagacagaatcttatctttcaggaagttgaagtcatctcgtttcttagccgaatagaaaaacgggttccccaaatatttctccttcttatcaagctcttacatatttagaatcccatgaataagtgctttctcttccgccttaaccttgggagaaaacactatcccgctcttctgcttgtttatctgttgcccagacaatttctcgtatgtctcaaaacaagctttcaagttttcagtcttttctgtattagcacgaaaaaaaagatggcaccatcagcataaaacaaatgagatattggctgagtttctttaccaactttgattcccgatatttgtcttcttgcttcggatcgcaccatcaacttcgaaagaacttca

SEQ ID NO: 3810 - DNA, 1343 bp, Cannabis sativa
agttcacacgtcttgtagccatttcaattgtatttttcttcgtttgctcacttcacttcaatgcattcttcatgtttactttgttacctatttgtacacaataaaatattgcaatttaaaaaatcattaatttgataataatatatagaagaagtattaattatgtattctaatgaattagttaaacaaacaccattgtcgacaccaacctttcaattaaaaaaaagatacgtgtatgtttatgtgcagagagaagtctctattaatttcttttgtgaatataattattaatgctcatatactatgtcgttattctaatttaagttaaacaaatatcattgtttgagacaactaataacatttgatttaataattaattaccgatattgattatataataatacttaagattatgcataggttttaactaaaatacttagttttttaattttgacccataaatgtctaacatttaatttttaatgttacaaacatatgtttttttttttttttttctgttaattaattcttgtaagaattagataattttaagtatatatactacccttggcttgtgaaaatttcaaatcaccagctcaaaatgaaggctaagaaattacaaattagaaactttttgtaggtgcatcaaatttacctgtatacacctttaaagctttgtagtcatatttgtcatgcctgcttatttttaatatttttaaaagcacttttgtgtggccgtaaaagtaataagctaacttatacgaacgtttatttattaaaattgcgcctgtattaataaatttttacagagcattgaatatgatgcgactgcaaaaatattaattaatcaacttaaatttcatattcaaattgtttcatgcatgtggtatattttctccaaataaaaagatgtctaaaagttatttattttatagaaagttagttgtcatatagaagggtgttcttagaagtctaacttgtccactctgagagttgcctcgtgaaaagataaatgtcacctggaaaggagtccctagaattctatctagtccatccagtagagttctaagggaaaagcttgtcttcctcctaaaaggaattccgaatggcgctagctgttctcacctggaaaagaattctgaatagtctccaactgtcgctcctcctattcgagaagtccctttagagttcgcttttgtcctttgtccagaagcgcgtgtctcttatacggaaaagttttaacttgagttaagggagatatttttacgaggagtttgttacgcttgttaagtcataactgacttaataatttaactatagcaaccaccgactttgggatccat

SEQ ID NO: 3811 - DNA, 571 bp, Cannabis sativa
agtccaagtctgggtccaaggttcaggtttgggctggggtcggggtctgagtcgggggtcagtgtccaaagtttgtgtccaaaccaaggttgtgatttgggtcagggtcaaatcagatattcaaatatagggtaagattcaaagtcgcgaagttaaaaagtgagatcgagattactattatatatgatattaataataaaaatatatattttatttattttaaaaatatatacaatacaatattattacacaccaaacatattattatattcaaatataataatatataacacaatacaacataacacattaaggaaccttatagaataatcttataatattttgattacacataatcttgttcatgctatcattataggaaacatatatggtcctcaatgggttggattacttaaatcctttctttgttggtaacttggtattggcgatgatggagggagaggaaagatcttctccttacaaatggatcatattaagcatcctaattactttttctaaaaaataaatattacatatttgaaaaatacaataaaataattttaataaatac

SEQ ID NO: 3812 - DNA, 944 bp, Cannabis sativa
taactaaacaagaatcgacttgaacgagagatgcatatcacctcctcaaatatgaacaatttttatgatagaggaaaacctacccaatgaagatcagtataagcaggctcgtccacgaaaaacctcaacttttttgcctcttcctctgtaacacaattacatttaaaaaaaaatggtcattactataacatgatagagcatctttttcgactaaaggcactttttttgtttaaaaacaacatgattaagacataccagtgagtcgaagctcaataatccgcttccatgcatgagccgctttcctcaatgtatttttgaacaagtctttcctagctaacatggttctattatccttccgaaagacctatcgagaatacaaaacaacaaccaattattaaaaagaaaaacaaatctggcctattcctttccccctcgaacaacagggtttaccgactacattcccccgaacaaaacaaatagttaaaaaaaaaaagttttagacccaaaaatatacaggaaggaagagtaacaaatatcgtatatcatcgatgaaccaattagaacaggtacgaaaatttacagaaaataaaaaataataataatagtaaatcaaacgaaaaatcaccggatcagaagcgacgaggcgagcaatccgatcggagacttcgaattcatggcgagaaccagcccagacgatctttaattcatcaacatcaaactgagccttgctcctctcatgcgccagatgatctacgccctccattcccaacaattcacagaaacaaaacccccaaatacgaaacgaaattcagaagcgaaatcgaaagaaggctgaaccgacaatggctgagtgggagagaggaagaagaaagggatgaacgaagaaagctgatttcacagtggtcgatatttatagcagcaaagaagtcaaaaacagatttttt

SEQ ID NO: 3813 - DNA, 1308 bp, Cannabis sativa
aaaaaaaaaaaaaaagatccgatcacacactaaaactagaacactaaatcaaaagtcaagactttaaaatttattttttatttatttgtttattacttataaaattaattagacatattaaactgaaatgtggaaaatacaaaatctttcaaccataaagcttcaatccgaagaaagaagaatgacaacaaagacttgctagatcaatttggtatttggcaaaatgaaaaattcattgttaagaacatcattgagaattatttcaacactttgtttccttcatctgagctgaacgaagttgtgcttgcagtggttatagaaacaattccaagaagagttattgatgccatgaatgctgaattagaacgtccctttcaagaggaggagataattgttgctgttaaaagcatggcccctgcaaaagccctaggtactgatgatctaccagtgcttttttatcaaaaattctgatccaagttaagtggagatgtgatagctgtgtgcctgaatattttgaacgatagaggagatgtcattggcttgaatgacaccattattgctttggtactgaaagtggataaatcaaagagagtagaagaattctgtccgattagcttatgcaatgttatttacaaaattgtgtcgaaatgcatagcaaaccggttgaggctcatgcttgaggatgtgatttcagaatctcaaagtgcttttgttaaaggaaggctcatacatgacaatgctattattggctttgaaggacttcacaccatgaggaaaaatcagtttcggaatgggtctaaattggcattgaggttggatatggctaaagcgtatgatagagtggagtggagatttattaattctatgatgagacgtcttggatattcagatacttggatggataaagttatgtcttgtgtcacttcagtacattattcttttttgctgaatgggaaagtttttgggaaggttatccctcaacggggactaaggtaaggtgatcattcatcacctttttgttccttttttgtgttgaggctttctctagtttaatatacaaagtggagagggacaatagattgcgggggctggtctttggacgcaagagctttgggtttctcacttattttttgtcgacaatagtttggtattttttgaagccactgaagatgagtgcatgtgttttaaagaggtgttagacatgtactccacggcatcagggcaagtagtcaatttttagaaatcaaagatgtgatttggtgctacagtggatgatagcgatagaacgtgtcttgcgtccctaatgga

SEQ ID NO: 3814 - DNA, 552 bp, Cannabis sativa
gcataagtgcagatattcgcacttcacggattggattggattggaatgcgaattaaattagatcgattgttttataaacacccctaattgcaaagtacaataagttagaattataccattccaaactagctcctttctgttcctattgttatcctagctagattatgagcataatacattcagagtttaggttatgtttaattttactaataacattggaaagagaagatcgatctctcgattctctccacttatgtttaattttctccattaaaactttgcaatcaaattcaactaaggcaattggcattttaatggcagcacactctgcctggaagagtagtaaccaactaactatcacttgttccaaactcaatcctctttctatattgatctatagaggcattcacattcaacttgaaagcacttggtttgggcaaaacaggttacaataccagttatgaaagttttatatgagacttctttattagcttgaacccaaccaccaacaccctttgggatggcatcccaataatcctgcagataagagga

SEQ ID NO: 3815 - DNA, 1652 bp, Cannabis sativa
cctgagtacacatcaaccatcaacacagtcgatggccaaccaaggtcttggagtaaccttgaatctagactatgaacattggattatgagtgagcagatactcatgggatggatctacagctccatgacaaaattgattgccacataaatcatgggatgtgccactttagcagcattgtggagagctttagatagagctcactacatagtgaagatgtgaataaaaggactcttattcaaaccacacgaaaagctacatctcccatggctaaatatatgaggcaaaggaaaatgtggtatgatatgcttacacttgctggtgacccttatcgtgaggctcgtctaattttaaacgttaaatctggtttagggattgaatatttatctattattgtgcaagcaaaagcaaggcctaacatctcttggcaagaattgcaagatttgttactaagctttgatcgtaagcttgagaggttacagggtgtcaaggcctaacatctcttggcatgaagtacaacatctattactaagcttttatagtaagcttgagagtttgcaaggtgtcaatggcaacaccaaatctagaaatgtaggtcttgcaagctcgagtttaggtccccctataaatctggcggtaacaaacatggctacaaaaccaaaaagcaatcccaatccaagtcaaggcagagcaaactataattcctacccaggtggaaatcgtggtggcagaggtggtaatagaggaggtggttatggcatatcaaacaacaccaaacaaatctgtcaggtgtgtgacaagtattttcattcagcagcacactactacaatcagtatgatgaagcttctatgggacaagatcctaaaacaagtcaacaaccaagtggacaaggaggtggacatgctacttgctctccaaaagcgattgacaataatatgtggtatgttggtactggtgctagcaaccacatcacttcaaccatgtcaaatttaaattagtttgattacaatggtaagaaaaactaattgctggtgatggaaatcaaattaaaatttctcatgttggctcaagtaaattggagaccaacaataagaattctttggtgttgaatgagttacttcttataagaaaattaccaaaaatataataagtgtctttagattaatagctaataataatataattgttgaatttcactctacctcttattttatgaaggacaaaaccacaaagaaagtgttgttccaagagaggcttagagatggattatattagctagccactccaacaagaaggtcagtttcaaatccctcatgtcaatcctcaccatcaattcctaaacaacctcaaagttttagttttgtttctactttgtctaaagaaaatgtaactcaatcaagtcatgatgagtcctttatctccaagcatgatgtatgacataaaagactaggacacccctttgttagaatgttaaaacaagtcctagcttctcaaaatgtaccccttttacaacaataaaaatattaaattctgttatgcttgtcaattcgggaaatttcatgttcttctttttaagttgtctttaaatcttgcttccaaggttttagaatttgcccacactgatctttcggggccatcccccatagtgtctaa

SEQ ID NO: 3816 - DNA, 706 bp, Cannabis sativa
acaaccaacaagtgcatgaaaaattgtttctgcactactgttgcacaacggacagataccgctaatcggtacatgttttgaaaccaattgagcacaaggcaacacgttaaaagcagcacgcagtatgaaatttctcacatttagtggtatatttagatcccatatctttttccaataactagaagaattatctttagaaaaactattttttaagtcatccaagtacctataggtacttttaaccgtgtacaaccctgacttttcaaacctccagtaccaacaatcctcgtgaatggaggagctaagggggatacagagaatagccatcctgtcatgagcttcaaacaaatcttcgagaatacaaacatcacattcacacatatagctcatattacattcacacatgctatatgaatctccgtaatttataaattacgtttatttactcacttataacgaacttgaaatttatgttgatctagattagtaggatcataatcctacttattacttgattaagctatgtgtcgccatttttcaaacgcattggagctacagaccactgatttgtggtgatctcacacttcaagtttggtgacaatcgaaactgagatgcactcatgcgtgtggtgtgaagttttgacgtcaaaaatttgaggcggcattacgaccaatttcggcgaccatttgacaaatggttggtact

SEQ ID NO: 3817 - DNA, 707 bp, Cannabis sativa
atgaaaaaaaaaattaattaaaaatctctcttgaaagttgaactagatagatggtttaccgaaacaccctcttgtagagtgtactatatagactttgcctacattatgacatctagtactatagttttagtttttaatttacacaaagaaaatgtaacactctcattctatgatagtctaatcatatttcatgaaagtgttacataaaatgataataaaatatccattgaaaaacttgtgttgtagtttgattacctatctatttacacatacaaatattttgtaggcatttggaggataaagaaaatccaaagaaaaaaagagctacacatgtgggctagacgagtgatgaatgaattggttaagcatactacttcatacaagttttatgacaacactggattatatcctcacaaaaaaactaatcgcggagaagaagtagtagaagattttctaaattctaatgttgatccgaactttatggtatctgattcaggcaagaaaattcctatttacccgagttttaaatattaccagaaaagaaaatcatttgtgaaacaacttacaccaatactaatagctgcaaagatgggagtgagtgaaatggttgagaagatcttagtcgagtttccagttgctattcaagatgttgattctgataacaagaatgttgtacttttagctgttgaaaatcgacaatcacaggt

SEQ ID NO: 3818 - DNA, 2559 bp, Cannabis sativa
ttttttttttttttttagagatggacttatatgaaattaaggctattggtggagacactagggcccaacctacttctgaacaaaatgaaagtactcctctaaaaaaagaaagcttaccgaaggttctacttttctatgttcccgactagctaaaattatttgtccacacctgagagttgttcgtgattttctttgggataaggatgagccgaagcatgttgttaatgatggtgattgtcctaatcctttgactattgaagagtgctcagagaatgatttgagttttgttggtcaattcaaccacaccccagaggaagagcttagggtctgactagatgggttgaatacacaggtgattggttgggccctagtagataatgttggttcttgtttattttctcacacatatactcatgtggaggaggatgtctcaccttctccacaaaagtcatgaaaggagtagtttggaattatatagggttaaggtagacctctgcagctcgcgaactgaagtccttggttcgattgtgctcacttgacttcatttttctgactgaactaaagatagatgttacttcactagtacgtattcttaatagacttcacttttactttaatatttgtgttcctattgttggtcatgcatgtggtattattttaacttggaaatctggctatgtgtttgaaagtattatttgctttcgaaatcaaatttcggacttggtttatttagaccccttctcacccgtggctcctaatgtgtgtttatggtcctccttatttccatgctaaaaagaagttttagactgagatcatgaaggttggggatatatttggtggcccttggttaattttgggcgacactaattttgtttaatgagtcagggagagaaggttctaaagggaaggaccattttaagttttcaaccctatcattttgagcttaatgaattctcggggtctacttaatttgccaatttaaggagacaagttaacgtgtgataatcacaagtttggcaatgcacatgtaaagtcaacacttgataggaggcttattaatgaacgttggaacttgttatttctgaaagcggtcattcgcttttttagactagtaactctaatcacaggcctatttatattcaataatacttgtcttgatagggggcaatgcaaacgtaaagtcagcacttggactcaatgcttgtcacataaatgtatattgaatttatatgatttaggagtacataatacatatatgatatatcattactcatttataaatgttgcattcgctttatatgaatttcgtgatatgtgtacgcataatttacaaataaatttaatacacttatatgacaaattattttgatcaaatatttttatttaaaataagtctcacttatcttgttacatagatgtatatcgaatttatataatttacgagtaccatatatcatttcataaatgttgtatttgtttgataatgggtttcgcccaaatctgcataaaaccaaatcaaactagtagttccaaatggaactatcattaatcactaataggtgacttcaatacatatttttttaactacaataatactactaattatattttaaaatattaactttaataatcataatatatcatatatcattttttttttttttttgaaaagtcaataacatatcaattaaaagatgtaaatatgaaggtcacggatgaatatgaaataactgttttaacctcatcaacgatgattttcctttctaaagggtttaatggtgtgtttacatgtcagattagagaataataagaataaagaatgaaattcattaacttgtttacttctataattttgttaaggaatcataatgaaatatgtattctgattccaaaataatgataacacatcaatataaatgattcctacaagtcaaataactaacgtattctaattccaatttatcaatccaattctgtcttaaacacactattatcaataaaataaattccatcttttcaatgtgtgcatatttccaagggctttgaatcaccaaaaacatgaagaattctatctttttagtgttagtgccattgatttaggtgtgatatgattccttctattaattattccatcagacatttattaaggagaactatgccacaaccactaactttccaacccttttaagctatacataaattgtaaccatatttctccacacgtgctcctgaatctggttaggaagtaaattaatcctccagattccagagaagggaaaaagaaataacacatttcaattttcaacacaaaaacttggtgtaagcacatttgagaagcagggttaaatttatttagttggaaagagaacaaattgagtttaacaatttgctcaaattcttaattaaattacctttaatctttctcctctgtaaatagaaaacatgacattttctcatcacccaacacaatcaatcccccccaaccaatcaaataaataaaaagtaaacagtgaaataaactcagcctagaattggtctcttgtgttcttcaaagttcaa

SEQ ID NO: 3819 - DNA, 918 bp, Cannabis sativa
gtgtgtcaatcttgggtatagtgatatccacaaaggttacaaatgtctgagttcaactgggagattatacatctccagaaatgttgtgtttaatgaggatgagtttcccttcaaaagtggttttttgaacaactatcaaaccgagtcatctgttcaagttcctatccctagttcctggttcttccttccagttcagccaccagacagtagtaattcagataaatctcaatcaccacctcctgacactgaaccatatgataaaacaccacaatccaattcatctgatacaagtcacaacttagctgattcaacagcaccatcttcctcaggtcatagcaacaatgaccctgacccctcagaccaggttgacatctcttcaaacttatttgttgagttaaatattgaaccaccaggtatcactaactactcaacatcagaggttcaagttcccactgtcactgaaacccagcaggtctctcattcaaatcagtccaagcaccccatgacaactcgatcgaagtctggagtgtttaaaccaaaagtgtacattggggaagcaaattggacaacacatgtaggagaacctacctctgtaagtgaggcactcaaacatccaggttggaaaggagctatggatgaagaatgttatgctcttcgcaggaacaaaacctgggttctggtgcctcgatctgaagctgtcaacgtggttggaaacaagtgggtattcaaggaaaaaactaaatgcagatggaagctttcagaggttcaaagcgaggctggtggccaagggctttcaccaaagaccaggcctcgattttggagagactttcagcccagtggttaaagcctcaaccatacgaatagttctaacaattgctgtaaacaaagggtggacagttaggcaactcaacattaata

SEQ ID NO: 3820 - DNA, 507 bp, Cannabis sativa
ttaaatattaaattttatataaatctatataatcatttttaaggaatatagctaacaaactgtaaagtaacacgtctaaaatatactagacatcaatatatagtaaataacaattgttgattcgttgaatctgcatggggcatgatactgccacgtcacatagtggtggcagggccagccttaagaataggcaagttaggcccgtactcaagcctaaaataaaaataaaaagtttcattaacttttcttttaagtaaaattaaatttattataaacaataaatatctataacttagttagttgaggtgtatgatatattttacaattataataatctcatgacactaatttttaatatttaagtctcaattctctcttagatgaaaaaaatcatatagagatgatccattcatcataagagaaaatttaagagtaaagacacaaatcataattaagtttacaaacaagactgaaaattcaagtgccatcatcatttcttctatgaaa

SEQ ID NO: 3821 - DNA, 1470 bp, Cannabis sativa
cttgctcttgtacacaagattaaagcatgttcaattgattcatcagcagcttgacaaattggacaaagtgtttgaacatctaccctttttattcttagctgttgcaaagtgggcaagcattctctacccgcgtgccagacctggtttttaaccttgggagggacttttaatttccaaaatttcttccagaattttgtttgctcgtcctcctcttggttccacctgccatttaacttttggagaagcttgtaggcacttttaaccaagtaaacacctgaggtttcatagctccagttcagcctatccctgcctcggctaacattcaaagggatgtccattatgagcttcttgtcacgatctacaaacaagtcatttaaaatctcagcatcccaacttccacctccaatttccaacagattacacacctttgttccaatcaaactcgggtgagttgaggtgacgaaaggatgttcttcattcggcagccacggctcatggaggacatcaatatcctcaccattaccaacacaccaacgggttccttttcgaactagatcttgcacttcaaagaggttgcgccacacaaaacttgggttactccctagttcagccgtgaagtaagtaccatgaggaaaatatctagctttaaagattttagcaaccaaagagttaggccgagtgagtagcctccacccttgtttaccaagcatagctaaattaaaatccctcaaataacaaaaacccatgcctcctttggatttatgagaacaaagacggtcccaagagaaccaatgaattccatttttcgctttatttgacccttgccaccaaaacttattcatagctttctccatatccctagtgatctccaatggcaacaagaaaacactcatagcatagcttggaagagattgagcaaccgttttaatcaatacttctttaccagcacgagacaaaaacttattctcccaaccttcaatcctctttcgaaccctttctttgaggtagcctaaaaccgctgacttgttcttgcttaaagtgcttggcaaacccaagtacagactgccttcccccgctatcgacataccaagcatgttgcttatattgtttctagactgatgatctgtattggtacaaaagaaaattgaggattttgcataattcactttttgacccgattctgtttcgaacttgtgcaaaatttctcttattcttgtagcttccaacatggtggctttacagtatagatagctatcatcagggaagagcatgtgagaaatctggggagctccattagccactttacacccatgaatcaaacctcgactttcatatctatgaagtaaagccgagaggccttccgcacataagatgaatagatacggggataacgggtctccttgcctaattccccgagtaggaatgatcggtcccatctcgtgattcccatgaaccaccatataattagcc

SEQ ID NO: 3822 - DNA, 667 bp, Cannabis sativa
aagggcaatcaatcgaagtcaaatttaaaaggccagtcaagtggaacaaattcaagagttgccactaaaaatagtgctactactgcaagaaagaagggaattttagagatgggtgtctagcattaaaggcaaagctgaagagagatggacaacaaatgaaacacaagaataatggtgaggctgatataacagatggtcatgagtatgttgatatccttatggaatccaactctcattcatgtagataatggatcttggactctaggtgttcattctacatgacacccaacaaaaacatgttcaattcattctcactaaaaaaataattccacaattctgctagctaggaaacaacaaagcttatgacataaagggaataagaactgttgtcatcaagaatcttgatgacaacttgaaacccctgtaacaggttaggtatgtccctaaactcaagaagaatttgttttcaattggcctattttataagacaatgtattctgttaagattgatgatgggactatgagaataagtcaggggttataagttttgatgaaaggtcagctcaacaatggcctttgcatattagaaggtaaatctatcacaagaagtgctgctctaacaatggatagcttgagcaacaattagactagactatggcatctcagg

SEQ ID NO: 3823 - DNA, 737 bp, Cannabis sativa
aattctcaaagagaggaagagaagaagtagctgtagaggcagccactgttgttagtctaaaaggtaggcgcatatattacagtatgatctctttctttcatgctatacatagaatgagaattatgaaggatgatggtaaggggtttttttgaataaattgttcggctaattatggtaccttagacttgaaagtatattattatgttaaaatgtgatagaattagctcacaaaatttaaattaacatgttatgtaacaatattttactatattatgtaatatacatatacataaattactacacattttagggtatatatatttggttatatatggaatctatatctgcaggcctgagacttttacttgataaataaaattgatgctaacaatctataaagagttggattgtcgttactcttatttatccctcttatgaacatctaaagatctttgtgatattttatctataatctattaaaatatatatatataatatatatatttataatcataaaaatacataatgaattttttaggtgttatagtctacaacaacttcttgatcacaatattagtgaaatattggttgttggccacaataagaattgttggccaaagagatgcaaaatgagatttatgaagggtcgtataaatgttattttatttttattttttaaattgtcctgctaattatattagcaaaaacttgaaagtaaattagtgttggcctagagt

SEQ ID NO: 3824 - DNA, 625 bp, Cannabis sativa
acaatgtatatttcttggctactcctcatcacataaaggatatctgtgtgaaaatgcacaaggccgattgttcattgccaggcatgttgtatttaatgccacagtttttccagcattctcaaaggcatctaatacacaggtaccttctcactctacttttccatctgctcagttttatacatttcctaatataaatcaatgtcctaaccccactcctattggtctcaatcctgttgcaactaatgacaatgagcacactgtcccacctatttcccaaaatggccaaaccgatatgtcccacacacatcctgcagcatctgatcacctttctcccactttagcaaatgtccctctcactactcttcccactgagttatccagtccaaacactgtaccccctcctccaccatcaataccaaatgaccaatttcccatccctctgtctgcacctacatcagttcctaccagaactcatagcatgcgcaccagactacaaaatggtatttcaaaaccaaagtcttacatagcaaccaaacatccactacccgaatcccttttaccctcagaaccaagaactttaaaagatgctcttgccaatcctaaatggcatggtgccatggacagt

SEQ ID NO: 3825 - DNA, 753 bp, Cannabis sativa
atagtcatttgggaactcccttccaagctcaactatcattccacaagattcattttcgcatgaacaagtaaatgttcgggaacaacaccaggaaacacctaactttttaaaaacagcttttcaagaatgatattaaagataatttcatttagaagaactataccaacatatcaatattttataaaattattgttaatttttcttttttgatgaaagctcttaaatgataagttgaacgctgatattgctgtgatggtgtggcacaatcattcagtgttagttataatggtcgttttcatgtagttaatcgactatagtttctttctttgattaatataatttcagaagtcttcctttattattgcctcgctttcttcttcccttaaacatgtaaaattgacacttggcagttggcactataaatgtttaacgatcgtttttcttttcaactgacttttgctttctatttccctttaaatatatacacataaatatatacacttggcactattagattttaatctaggtagtctagcttaagagataagaaagaaaaggaaccagaggtggtgccacttttagaaacaccacttttaggtggtgtgttcgaaagaatataaagaacaaaaaaaaatgtcatattttcagtgacggtgctagacacaatttcttacttaagtacaagcaaaaagacaataaataacatttccctaactcaattacactaaaaatataaacaaagatcacaaagga

SEQ ID NO: 3826 - DNA, 1302 bp, Cannabis sativa
cttacctttgagctgagtatcaataatacagagcattttcagagtttcttatcttggtatcagagctaatcgctcgcgcggcaatgtcttctgggaccacccaaacaggccacgatgctcaagccacacagacaggtattgagggtacagtctctggtcaaaccagctcccctcctaatgtcaatggagtagcaccaagcagcctcactggacatggaggtttcactcactcaccattcggtaataccctttcccaaccttttgcattcaagcttgatcgaaataattacactctctggaaaacaatggtttccaccattatcagaggacaccgtttggatgggtacataagtggactgaaacaagttccacctgagtacataccggcaggagttgcatctggtgatggactccctggctttggtgtgcggccaaacccagaatatgagaactgggttgtgtacgaccagttactcatgggttggctcgatggatctatgacagaatccatagcaacagaggttatgggttgtactatagcccgaaccttgtgggttgctcttgaaaacctttttggagcacactcaaaagctagaatggatgaacttcgtgacaacatccaactcactcgaaaaggaggtactgctatggaagattacctcagacaaaaaagaacatgggctgatatgcttgctttagcaggggatccctaccctgaaagtcatcttactgctaacgttttgcgtggtttagatgtagagtaccttcctattactgtgcagatcgaagctcgggaataaatttccaggcaggagctacaagaaattcttctcagttttgacagtaaactgggacgacttcaagggcagattaccaccaacaaacaaatcaactctaatggagcctcaccatctgctcatcttgccaataagcagaatgacaactcacagaattcaggaaaaaggcctcactatccaccaaactttggcaacagcaacaggggctctcacactcgagaaggcagtagcagaggtcgtggaaatgggggcaggagtggaggaagaaactccaaacccacatgtcaggtctgtggaaaatatgggcactctgctgcatattgctacaatcgatatgatgagagcttcatgggaaatccacccaacactggacagccaggaccaaaccaagagaagaaaaatccttcagcctatattgctacaccagaaacagtagaccatgaaaattggtatgctaatagtggaaccacaaaccacatcacctctaatggagatgacatgtcat

SEQ ID NO: 3827 - DNA, 973 bp, Cannabis sativa
ccataggtagttatccatgcccatatgtgaatgccacaaaatataccttggccttccaacatatttgggacaagacaaacaataattgtttggtgacatcaaagaaaagtttgcagacttatgggcatttagaacgaagatcttttctcttaggaaaatagatacttcttaaagcagtagttcaatctatcccaacatatgccatgagttgctttagactgccattgactatttgcaaccagcttgaattattgatgtctaacttttgatggggttttaatgacacatgttttaattgaaagctactttgtacaaccaaaattgtaggtggtatgagttttttttttctcttttgtgcactttaatcaagctttactcacgaaacaagcttggagactcctagacaacccttcatcccttctcggtcagctgataaagagtcactacttccccaacaattccttccttaacgcaccacacaataacactctttctttgacttggcaaggtatcatttttgggagagaacttatggctggggtgcgttgggaaattggagaacgtaggaacatcaattatggatcacccccacagattcttaaccatataattttctctccaatcagttatataggtcctccaaatgtagtagtggataatctcatcactgaggaacgtcaatggaacaccattttacttgatgaatattttttgatgatttatgtggacagaatttaaacaatacctctaaacttttttctgaacgatgacaaattaatttcacatcacactactttgggcctctatactgtctaatcgagtatcatcttgcgacttctcttgataaaactaatcattcttcaagttcatccttagcctcctcctggtggaaatacttttggtcattaaagctacctcagaaaatcaaaatcttcacgtggtgagtcctccatgatgatctttcggttgttac

SEQ ID NO: 3828 - DNA, 1066 bp, Cannabis sativa
cagaagccgagaacaacgaagagtaatattcaaccataacctccttcaacccattatcccagtccacccaaacaccatgttggttcttgagcttagagattgaattgttctttttcctcttgttggccataagatggaagtatttactattgtggtcaccctctttaagccaaaattgtttggccctttgtttccaaaaggtctctctttggtcaagaatagaagaaagctgatttttaacctcatcatatctgctaaccgaggtagagtccctacggtttttcagttgattaagttcacttttgcaagtttttattcttttcttgaagcacccagtaatttctttcccccagctactcagacttgtagcacataagttcagcttcgccataattcccatattactatcccgaccccaacaatcttcaataatttgaaagcacataggttctttaagccacgcattttcgaagcgaaagcgatgatacggagtgtacttactttgaataaccggcactagaaacaatgggcagtggtccgatgtagaatgttcaagattgagtaaagaagcatcgggaaataactgcatccatgaatccgaaaccaacgcacgatccaaccaagcttcaatccacgaactggttcctctgctcttctcccatgtaaaccgataaccagaaagttccatgtcagaaaggccgcaatccgcaaggcaactttgaaagccttcgataagccgaataggatagggatgaccaccatgtttatcttcctgagacaacacattattaagatcacctatgacacaccaagggagaacggagtcacctgctatcgaacgaagaagagtccaggtttggtgtctattcgcacgattgggattgccatagaccccagttagtctccagtattcgtttcccattcctttcacggacaaatcaatatgatttgtagaaaagcccaataaatgcccatcctctttatccttccaaagaaaagacaaccccccacttagaccttgggcctccaccacaaaaattccttcaaagcccaattgtctccccac

SEQ ID NO: 3829 - DNA, 936 bp, Cannabis sativa
ttttgtattcttctttttcttagtttatactttctttattaaattttagtttggacgtgggatataataataaaatttgtaggttagcaaaatacaaccatttaggataaaaataatttggaaatccaacccaaccacgtgagtttacattcatttaccatagagtccaaaaaacatgcaccacatttacatttgaattacacattctcagttgagttagaacaacggattaaaaataaaccaaggaaaaaaaaaagtaggtgggcagcatctatttttgacaaagggttaacaacaaaaactgatattcatagtgatggagtgcaggaacacagtgctggaaaaagtgcaatcaagcctaagaaattccacctaacactacaatatagagtaaattttctgaacattgcacaaacatagactaagaggcaaattatgaattgaaagtctacctgcaatgttgtaatgtcaaaatcatcaagactaagatcaacaagtggcacagctgtgttctgaatttccagctctccatccttgaaaataagacaacttgaggttagaggtaaagattgtggtggaaaatgctatcagtcacaaaagaaaaaggaaattgaggaaatacctcgtaatctgattctgggatttttgggttcactgcatccaattgttcactttccttctccttaaactgagcagcattgtaatctgaatgtaaatttatcgagctcggaacagtcatattggttgattcttggttgatatcatcaacaaaacccatattggagtcaatgtgacccaaagcacctccatcagacttcaaaggcgggtggctgtaatctattggaaatcctcccatgtttgccatcagggacgagaaacctagatggtcctgatccataagagacacatcttttctttcaaattcatcctgggcta

SEQ ID NO: 3830 - DNA, 2512 bp, Cannabis sativa
gaactatagcaattgctatgtaggatccctataatgatttaaaggagcaggaaattataaaaactgcattttagttttctaggagggtacttgaacctcagatatagcaattgtggagcaaacatcaagcctaatcacttgagataccctattgggtcatttatcgttttgtaaatatagttttaaaactcctttcactataacattatataaatactttttcgagcaatccgtgtgggataaaaataatgaatagttctctaggatacaataaactacaatgaaagcatgtcatgtagaaatatacgcaatgacacttcaatcttcgaacatgagaagtttcaatcttcgaacatgagaagtatcaatcacatttgagaatgtggcaaaagaattaacaatggcatattgcattttaacctgaagaaaagaagtaatgagcgggtaagccaaattggtcaacacacgagcaaggcagtgactcgtgcaatgagtagctttatattaataatgcataacatgcagcaaaaatcaatggcctagatgttctttgcatgccaaagtatgtcttacaggacacaaagggctaggagaactcaatattcccaaaaataacaaaaggcgggcaaaaagagaaacttgcctggcttatgttcttcagatccaaagcaacttggccaaagttctcccacaattgccagctgttgcgtctgccaagtcaaaaggtttaagtcaatatatattttaattgtgatacaaaagagaatttctgtttacacacacacagagaagagagagagagagtatggtaatcaattgagagaggacagaacttaaacttcaaggcctctttataagcaatgaaagcctctttgcttcttttccgtaacaaatgcctgcaaaagttaaggttaagattatttaccaagaaacacagtagcataaaacattctataaatgtttcccataaatataatcacatacaagattcttatattagtaaataattggacaattttagtcaaagaaactgtaagtcatcgtcacttgttgataattttatacaatggaacaatggcacatgcaaatatgaatattaaaaagcgataagatataacagaaaaacagcattaaagaatccataacaattacaagaaaaattaaatgtttagattgacctgaaaacaatgtcgcgttcttatcctaactcttaactttctcatctggcttaattgattgccctaaaaacagacgcttaacatgcatgcatttttctgtttgaccaaaatgaataaaaataaaatacttgtcaaatagttcaattggttgggctagtcattgactcagggttcaagtttcgtatccataaagaagtaaaagaaaaaaggctgcattcagatactaatcctgtcagcatcaaccaaaatctcagtgcacaataaaaacatcactatctagtaccctcacgggtacctacatatcgattaatatagatacttgttcctcaaatgttgtagaataaaactaggaacctagttttttcctcctaaattcctatcttgtattatcacaatctgctatattaagatgtcaatacaatatcaagtatcaacgttgagtacaaagactagctttactgtaaagacaaggaaacatacaaacaagcaatattattccatgcctcgccgttttctggatcaagttgaacagcacgagtaaagccatccaatgctttctcaacatccttagcctgtaatttttattcagcaataagtcaataaatttacgagataatagcctaaaaaaccacaaatatgaaaaaacaataatttacctttaatgcagcagatcctagtgcaaaccaaccatctggatacaaagaatttaaggccattgcagcctccctgaggtatattcaagtaaacatcatcgtactcgtgtcataataataaacaaagttaatcaaatatgcataacaagataaagtggaaagctgtttgaaacataccaaagaaccactgatgcctcatactcccctctattatatgcattacgtgcgagagagcgctgtaaaataggatacataaagagagacatacaaggtactcaatagaaagttaatttagaaatcttatcaccttagctcgagcagacctattacttgaaacttctaatgctttttcatagcaggcatcatcattcgtaaaatcacccaacgagcacctaaaagttaaatgattgtacaagtcaaataaattgctccttatgaatctttcactggttgatgcaagcagacaacaaataaaaggaacttcagaaaaatctgcactgaaatagaacgtcaagacaaactaacaaaaacaaatacatatatatatatatatatatatgtgatccaagttatcactatttcagagaagacatagttgcaaaattcaggactgtcaccttgtgctcttgcttagcatacaatttacttacataaaataataaatctaatcagattcccaac

SEQ ID NO: 3831 - DNA, 580 bp, Cannabis sativa
taattaattaacagttgaccaaacacgtgacatccatagctgataccaaagaagaggtacaccaaggagtggttgaccctagacagttaagacttggtggattcaagtactatcgatacattggctcactcacagtccctccttgcactcaaggagttctttgggccataaacaaaagggtacatatatatataattattgctatacttaataatattattattattagtttccatctataaattcctttaaaatctttcgaatgtgttctcagataagcacagtttccagagaacaagtgagactacttagagtagctgttcatgatgtaagacatatataatacttatacagcaaataaaactttggttaattgaaaatactaagtaataagctacaatttttgtttatttgtaaattttacagtttgcggagaggaatgcaagaccattacagcctctaaatgaaagagatatccacctatgtggccccatgtttcaactcgaagacctaaaacactaatccatttatataaaacatatgtatatataaagtatatctatttatgtatattaataaa

SEQ ID NO: 3832 - DNA, 611 bp, Cannabis sativa
tgctgctgagtgctgactattttctcaacaaaacaaaagtctacattactgtattagggagcaaaagaaacgacataagaataactaaaaacgacaatatctccagtcagaaatattaacttggaaaacgacaacaatttcgtatctgctacgtcccggaggaaatttcctctgtatatgcagaagtggtcacaacaatattcgaagtattcgtcttttctagttctcagcttagtcctccgattcgatccaaaatctttcgttgatggcaaatgggttcgtcatttgggctttattttctgcactttcgattataattctgagatttgcttcgcacattaccaatggcagaaggagcagaaagcgagccgtggggttcttccacccttacaccaacgatggtggcggtggagaaagagttttgtggtgtgccgtcaaagccattcaggaagaaagtcctgatcttgactgcgtcgtctacactggcgatcacgacgcctcgcctcagagcttgatgggtcgagccgttgatcgattcggggtgaagttgcttcacccgcctaaggtacccatatttctcctacaaaccattttcagtagtagttctcaat

SEQ ID NO: 3833 - DNA, 1210 bp, Cannabis sativa
ttttttttttttttttgtctttcccttctctttaactactctttttctctctttcttctttttttttttcactataagtttaaaattaatttctagccacgtcatgactcctttaattctaaaaataatatcattgtgatctacgtttcaatgtgtttatttcaaaatgtggaaaacatattttttttactattttcctagaagaaactatatagttattaatatagtaatttttttttttttaaaatttcagttaatattcattttaaaattttatgaattaaattttattatattatatgattattaattatctttcaaaataataaaaaaaattattatattaattagtatttaaaaatggtagcttgttatatacataacaagttagtttcgaaaataatttttatgggtacctaaatatattttaaattataagttaccataatataacttaaaaataactaattaattaatgtatacaaataaattttggaggtaactaaaatgtatttcaaattacacgatataaaaataatttttttatttaaaggtaattaattagtttcttattaacactatgagtaataagcaaaaaattacttttaaaaatacagaaaaataataaaaaaaaaatgaaaaaacatctaatacgtcaagtttaactggcgtagcatgtcagtaatattaacatcattattgtaaattagataaaagatatatattattgtaaactccaaaaaaaaatatttggtggaagaaaaaactaaaaagatcccacaaatatattttctctgacaaaagtgggtaggaaaataaaataacatggaaggaactataaactatacttctgctatttttgtttggcagagataaaggaaagaaaatttatttttttgaccttttaattattagtttataatatataatattagtaattagtaattaggcattcttcattgatgaaaaaacaatttcccaaaagtttttgtggaaaccacctcattttttttactttctttttctgttcgctttcttttttccttaccaaacctgtaattttttattttttatattttttttatcatttatgttcacttttcacttcaaaaaaataaataaattcctctcacttttaccgtttaccagacatatagatattagatagggttaattaaaaaagtgatacaattagagagagagagagaga

SEQ ID NO: 3834 - DNA, 1184 bp, Cannabis sativa
  modified_base (985)..(989): a, c, t, g, unknown or other
  modified_base (1104)..(1112): a, c, t, g, unknown or other
ggagccaagacgcctgaatagaaatccaagggacacagagatttgagaaaaatagaagagaaacaaccactacaagaaatgtcatttttaccatcacagttcgctattgtgccggtaaaagtaactttttctagcgcatttcgcaaactgcgttggcaggtcaaagttttaccagcgcacatttgcagtggctaaaatctaacttttaccggcgcatttacgcgctggaaaaagttatttttgctaacacttttcatttgtgctggaaaaatttctaacaccaacgttgatttgccaacttcttttaccaacgcattagaagtaaattccattttagtagcgcaatacaaaacttttgctaaaagagatatttcttgtagtgaacgcgccaaggcctaagctcttgcctgagaaggactaccgcaactcgctctcgccatccccaaaaatcgaaaggaagatagtatagagaagtccaccttcatcgccttccaccaatctatgagaccggagctacccaggaccaccaacctccgacttgagacacctcaaaagagacgtccatccaccatattcagcggtcacttgcctgaaagcttgggcatcgtagcacgagtctcaaggaagagaaagatggcaaacacttatcacctccactcacaccagctacccaacggaagaaccttcgccttctacctgctgcagcaagagccaagtcgctaggcgccaccagctagaaccagccggcggtgcccaacccaaaccctaaagtgtgaaagaagaagaaaatggaacaaaccctaatcttagagagagagagagaaagatatggcggtattatgttcttagagaggagtaagtttttggaagtgttcggtgtgaaaaatctccatctatttctatcaatagctcaatctctttttggaattttttcatttttacactttgaaacatttttttcttttgcatttttacgaaattctannnnnaaacccctattgcaactaacggagcaacctaaatcgcaacaaaaaatcgtatatcaactcacatagaaaccaccggagaaatcactttacaaatctaaaccgtaaatttgaaaannnnnnnnnaaagttaaaaaatagtatatgaggaaatttttttgttttttttgtttgagaaaatagctaaatctcttttta

SEQ ID NO: 3835 - DNA, 1301 bp, Cannabis sativa
ggaatagtcattcaattgactaatggatctaatgtctatcctcaaagagtagtggaagatgttctcgttaaggtgaaaaacttagttttttcgactaatgtttatgttctagacatggaagatgactctattccatgcactacactggtgttattgggtagccatttatgtgtacgacgagtatgaaattagatgttaagttaggaacataaacaatggaatttgatagtgatcaattacatttcaatgtatttaatatgataatccaacatcaacaccaaatgtattgtcaagattgagctagcgacgttaaatttagcacaattataaattaattttattttgtagctttaatcattccaatttttatttttgatttagtttagatttgggtaaattctagtttttagttttttattggaaccgtgaaaaatgttaaaaaattgaaaaaatgagttagataaaaagcttcaagaggcctcaccgcgttgagctcataccttggttgcagtgagagcctccaatttttggtagggtcacaacgctgcggccaacctttctcttcactacagccactgcccgagcgcccaagcctaacttaattcctacctaggggaaacaaacccaaaaaaaaattaaactcttactttcacgatttcaaacccctccaaagaaagagcaaaaacaattctaatctctcaaaatcatatatattttttttggagttcttacgaaaatactaaactttggacaaaaaatttacaattttttcgtcatacaaaattttttatatataaaaataatgtctttttataaaacaaccataaaataacaaaatcgaataattaaaacaacaataaaaaaattaaaaaacaacagtaagaaaagtaaaaactttattatttacttttaaaaaaaattccgccacacaataaaaaataaaaaaaaaagtaaaaaaaataaaaaatgtgagcatatggtataaaaatctctttcttctatgtgatctttcttcaccaaacaaacaaaaccccgatttgacccgcaataatcaactcaaactcagaaaatattctaaccccgatcagttcaaaaccccaaatccgtacaagctgaaacacaatctcttctccgaatctcagaaaaaaattcaaacacaaatcactatactgctccaaaacgaacaacaatggctctcaacttgggtcactctcagacttgatttatacgacaccattgtctatagcgtgttttcatgaaccaaactctgtaagttaattcctttgcctttgtcttgggtg

SEQ ID NO: 3836 - DNA, 556 bp, Cannabis sativa
ctttagacacaatatcagagaaaatagacaataaataaaattattggtgggatacacgaattaattggacaatgcaaataataaaacttacagtcagggaacaaataagccttgctaagagcaggacgttcataaggtgcaacctgaaagtacaaaaaggtgaaaaggagtcaaacatcacaaagataaaagaataacgaaaaggaaaacttttgtttcttaaaatcaacaaaataaatgtcttttaacaaataaacatgtaagaacatatcacttaaaactaaacatcaacatcatgtttagatacttatgttggaagaaccagttcctaaagtggtgggctcatcggctatttgaccgcctactgcactcgaatctcattcagagtgatattggagcacatgtggatttctttattttttaacttgagttccttcacaagcactacaacatttaaggtatataaaacaagagcttcgcatagttcaaattgcccaaagtgatgccatcatgattcggacttcttaatacctatacttaagaagattttacagaa

SEQ ID NO: 3837 - DNA, 772 bp, Cannabis sativa
tttttgagttaacaatatatattttaacactgcttccaccaaatattttgaaagattaagtataaaagtacaataatatttataaaaatataacatttaaaagtattaaatatatcgactatcatatatactatacaataggataggacattaaaaataggatgattatgatcatgtctaaaaaaaattaaaaaaaaaaaaaaaaagagagcatgatatatagaacggtgggaagctttgtaaagggatatagataaatatataaatgaatttcagtccattattatagtgctgatagattgtaaatgtgattcggtgcaatataattcaaactgttgattaagcaaaaagaaaaataaataaatattttgcctctatttgttctatattctatatgtagtatgtttggatattgttacatattaaagattttgttaaaatgcaggaatgatggatgcaatatcaaaggatattttgtatggtctttgttggataattgggagtggtcttctgggtacacatctaggtttggcctattttttgttgattacgaagacaagctcaagagatatccgaagaaatctgtccaatggttcaccttgtttttaaattaattgataacactaaaattttacaatgaaataaatatgactgcttgaaaaaaaaaaaaatgtcacataaatacatgtaatattttgtgtaatttgtttgtcaatccacatactatcattatatatttataagcaattttacgttaaaccctttaaaaaat

SEQ ID NO: 3838 - DNA, 1182 bp, Cannabis sativa
aaaccatatggtgagttcatgagagctcaaccacagaaaagttacaaaaacattgacgcgcggtggctccgtaccagaggatggacttcggaggtggttgacggtaataatgtacctggacatcaaaattcttccgtatatggaaagaagggctaactttgatgtagccaataatcaaggaggagggaatcaaggaaatatgattgacaatcaagacaatggtggacgtggtggcagagggggtgtagtcaatgtggataattttggtaagaataaggaaaaggaaatattggatgttgataatggtgggctgattatttgtgataagaaaaaaaggaaagttggagatggaggtaatgtgggtcatatggagcaggcccatgagggtagtggactttcaaaaaatgcatcattggcgggccttggcaaaggggctcgccagacattatgaaaatgttgagttggaactgtcgtggtctggggcctacacaaaatattcagttccttaaagagcttgttgctcaaaaaaggcctaaggtaattttcttgtgtgaaactttatgtaacaaggagaaaactgaatttttatgtagaagtttggagtatgagggttgttttgttgttgaagctactggtaggagtgggggacttgggcttttttggaagaatgaagataaggttactattgattctttctctaccaatcacattgatagtttggttcactttgaaggatatggaaagtttcattttactggtttatatggagagcctaaccgtagcctaaggaggaatacttggcaacttttacggaccttgtttgcccggtcaaaagaggcatggtgtatcatgggggactttaataatgttctccatcatagtgaaaagattgggggcaaaccatatccaacttggcttattgaaggttttcaggaggtgactcaacaatgtggattaattgaccttgacttgaatggacatccatatacttgggaaaagagtagagatactccccaatggattgaggcaaagcttgatcgtacaatggttaatcatgattggttattaaagtttcctaacgccaagttattcaacatggaggtttctccttctgatcatagtcctttatttttggatatggaaaatcggatagctgttgaaagggtgagacactttcgattt

SEQ ID NO: 3839 - DNA, 1082 bp, Cannabis sativa
tattaccctttatttaaatgtattgatcatagcactttgccggtataataaaaatttactatcaaacataaaaagaaactatgtttttattggagtaaaataaaagaaattaatacattttttctatgtctacatagtacatacagagaaggtgggactttttcttaaaaaaaaaaaaaagaccaaggcaaaattatgataaatggacttataacaaattaacatgtcactcgagagaaattaaagccaaatgtttcgagaccatgcatttctccaaacattaactacagagcatatcaactacattctacttaagtttgatgtgatccatattagtggacccagtacgaaagtagagtgacgccacgacatgcgtaattttttttaacttttccttacaaaaatatgaatagtttcaatcatcttccatctttataaaccaatggtactctccttcttcatcatcaagttgaaaacaataaacagtacactttaattacaaaaactatgaagagaaacgagctagttttcatccctatggccggaaaaagtcacctggccccagcagttgagtttgcatatcagttactaaaaaaagatgaaagattttcagtaacttttcttctgataagctctgtactcgaacagactccaacgccaccgcccactatttcccatccccatatacacttcataccagttccaaaacccttggaaattccctcaccagagctaatgaaaaaatcctttacaaactaccttctgctttacattaagagtcacgcttctctaatcaaggacatcatagccaaccgcttctccgcctcatcctcaaatcgcctctctggcttggtcgtcgacatgttctgcaccgacatcatcgatgttgccgtagaactaggggttccttcatacttgttcttcacctgcggcgcggccaccttgggcttaatgctctacctcacaagccacggaaaactcgatggcactgagccaaattccgaacaccaccacatatctacctatctcaacccagttccaaagaatgttttacctgattttgcctttgacaagcaagatcg

SEQ ID NO: 3840 - DNA, 547 bp, Cannabis sativa
gggatatttctggaccgctacctaatcttctgtgctgttgattgcagaattgttcctttagttgatagctgttagataagcatcagtatcatcttgggataaaaattgtaatgcatttattctagatgaagacaactcaggctcaggcgtggcgtttaggcatgggagacatgcagatcttgcctgggcctcgccaccggccacctatgaagaggccattatggattattgtgttggtttctatggtcagtgtcttcttaatatgtgcttacatctacccaccacatagtagtgccgcctgttatatattttcatcacgaggttgtaaggctataatttcggattggctcccacctgcgcctacaagggaatatactgacgaagagattgcagctcgtgttgtaattagagagattctgaatgcacctctgcctcctgttcaatcagaaaatcctaaagtagcatttatgttcctgacccccagttcattaccttttgagaggctttgggataaatttttccaggtattaattatttgacccaactc

SEQ ID NO: 3841 - DNA, 991 bp, Cannabis sativa
cttgtaatattaggctaatatattccgctacaatgaagaaacaatgaagaaaatgctgaattccacttacacctatcctgaatcagtgaggccacacttatcagatgacttttttagggatggttctaccaatacgatccaaagtcgaggtgatccacttcctttaaaaacttcattaaaggatatagagatgcctatgccacctcctgctctcgctcccctaaagcaacatgagataaggtaagcctaaatatcacctttgatgtcttgtctacctcagttgaaatcatttcccttgtagtctgtagattttttctatctttaattatcatctgtctcttcattcgatttatctttttcttaccttgtcaattacacaaggaagaccgtgcaacgtttctgatgtactggcagatttggttgaggctgtgagtccccttgctcaaaagcagcaacgcttagtaaaacttagtgaactagaacaagctttggaagttgccatagaagaacctgctttgcgccaggccctcagcaatttgattgagggtgcattgttgcgaacacaagttggaggaagggttgaaatagtgtgtatgagagcaccagcaggtggtgcacttgtagtaattgatgatgacgggctcgatatgcactatatggtaataactacaatcaacttatgcactatattttaatcagaaaatggtttgaattgtaattgattcattgtttgttgacatccagacacagatgcattcgctcactccatttggagtagacctctgctcggagaatatggtagaagacaacatgacatggaatttcgtcgctggccttactgttgcacgtgagatacttgaaagctatggctgcgttgttcgtgtcatatcacctcggatcaaggatgctgctcttggagcaggtggcactcgggttgaactttggcttccatgcttcgccaccttgtctgatttcgacggtcctactcaaa

SEQ ID NO: 3842 - DNA, 1565 bp, Cannabis sativa
aaaaaattaatacaatatttcttaacctattgaaataatagaattttaaaaactaattataacaaaagtaatataaatattttattttttaaaatatttaatttaaaaagctttacgaaaatagaaaaataattatatagtaagattatataaaataaattcatcccattgtagtatcttttattctaactaaaacatcaaaagttacataaaaaaaattatcccttattatatttgttgtctataatttttctcaaaatatacgacaattcaagagcgaaccagatggcagtagggcccacctaacaagacacatcaccttaattactttcagagcctattttttttttttaaaggaataacgacaaacagtcatctctaaaagggtcttactggacatagagtatctcttgttttttcctctctgcgagtgaagtctacttaaagaaggtatgggaggattgatgaaacataacacgccactcgaagattaagacattgtacatgcatttaatgcaatatagagaagatcatccaacatcttactctgatagacgtgcttaagggtttaaaccccatcatttcctgatttcacgagaccatatacatcaatcaactactgaataaatgagtcgccaagtcataaataagaaataagtcgaatctcaccaaacacctatagacaacccaaaatccatcataaaagtaggtaattatgctctaaaattagatttgagaatttgtgcaaagtatggtgcaaacaaacacgataatagtgacattttaccagcattataggcctataaataccccaataatatacagaaaggggatcagttagaaaaactctctaataaatactggcatcaatacagtgactcgtagactaaggcttattaatgccccaaccacgtaaaaatcttctcttttaatattcattaattatttcatacaactctaattattggttgtcaaaaacttcaatcaatattttagtgctttaattgatagttgtaagaagcttaccaaaagaaaaagttgtaaatagcctcatagtataatggtagaaaacaagaaatgcttcacgtccacaacaaccagatgacctaaaggatctagatggggaaaaggcagcttctagggtggatgctaaaggaaggagacactaatgatgcagaatactcgaaccaagaagaatatgaagattatgatgaagaaaactatacaaaattagttgagctaaggcaaaaggttgttgaccataaggcaagaaatattgactgccatgaaaagggcaatggaagatgtaggtatccaagtggatccagctatagtcccatcagtgcaagagaaaactgaggaggagccctctcagcccgaggaagtctaaaaataaaagaatagggaacctagtccaatcaagtatcctctaaaaaggcctgctccagagggaaaccccaaggctacacctggaaagagcaagaaggctcatgatccaccaaaagttcgttctgatctcccaaaagcgaagggtccacaaggggatagatttcctaaagggaaaa

SEQ ID NO: 3843 - DNA, 4031 bp, Cannabis sativa
aatttctttagaggggggagtaacttgaaataatttgtttatataaaaaaaaaaaaaaaatttgtttagaaagacggtcaaattctttattttaagagagagaataaatcagtttaacgccaaaatcaagtcagattgccaagaacaatgatttttatttaagaaaaaaaaaagtacctgattgcctaggaggggttgggtgcagtgatggccccaccaaaagagggtgtcgtgatggagcagcattctcgcctgttctgcccaaaagactgtaaatggaagtagagcgcccttgacgtctagaaccaaaaacttctacaggcatcacatggagagtttcattaggaaaattgtcatctctaccaaaaacctcaatatggtcaaacacattaatcccattgatgccctcttccagccgcagtataactccatcttcatcgtcctcatcatcttcttcatcttcatccaacacttcctcatcaaattcatcatcatcaatctcatgatcatcttgatcagtgtcgggatgtggcaagtgatggacttcatcttccatgtcattatgctcctcatcatcctcatcttcatcttcatctacttcatctccatcatccccagacatctcttcatcatcatcatcgtcatcgtcatcatcgtcgtcttcctcctcatcttcatcaagattttcttgcacatgaggttgaatttcaaaccttatgtcaatgccattttcaagacccctgacatcttcagaattttcatgcataaaatcatcttcagtggtgggagcaaaacctacaagatcttggtcatgatccatatcatctgtcacagcctcagagccagcaaaggactgcacagtattataagtctcaatgtgctctggaggcacagaatcatacaaggattgagaaaccgcatccattgattgggatgagttaccaacattatctgccctcccagattgactttcatcagggtgcttagcattaatatcactctttactgcactggaatcagtagaatggacatgttctttactgacaacctccagagccttgataagacatgtaacaactttaggtgagtcaacatggtccaggtccaacactttgagagttcgggtcaatgaaccaactagaccaacatctataaaggtagcagcagcttctgctgatatatatgaaccagtaggtgtacgggcagccagagcatcattgagcagatcaatgaaagcttgtatgctattgttgggtgacctataaccattacctgagccaacaaagtcagtaaaaatgtgaccaatctctgtaaaaacccttttccttgcctctgaagaacgaacacatgctgccactaaaaattgactagctctgcttgctagtttctgcctccaatcaccatcaactcttttttccttttttgtactacgagcatatgggagaaacttaagaaggatgtgatgaaatattccaccagtgcatatggaagtcaaacccttatgatgggaaccccttgatgtgctgacttcagcatctcttcgaagcaaaacatgagcagaggaagcatacatcaataaaatctctgtcagaagcttcaagacaaatacaaccttagcaagagatgcagaagcttccttgttgatggtttctttatcttcagaagcagtagcaattgcttttcctttctcttttcctttaacagcagcaacatcaatgtccatatctgttactaatggattatcaagaggtacatctgtgactatgtcatctttcaagggaggtacataagcgcacacagaatccaaaagaagctcaatcacattgacaaaactctgaggatattttctatgggctttgacactttttatatttgaatcattaactttgccattcccatagccagaactcgctgtatttatattacccaaagcattcttcccatcactaagaatgagtttttctttctccacagatttatccttctctttgcttttatccttgtcacgatcctttaataatacaacatatggcctttcaccaaccatctccacttggcaaacagactgagatgcacgcataaaaatcacaggatcacgggaaatggcagaacttaaacttgatagaaaattgcgaggagaaactcttccatttgagtgcctgtttgcagcagcgacaaggctatgccttatctcaaattccatagcctgctgaagtgtttgaggatcttccaagacatgacgaatgattgtagcagcaatattgtcaaaccctggaaagaggctactagttggcagtgatagcagtaaacttaaacctccagcatcaagaaaacaaacagctacagaatgtgttctggtaagagtagcgcatagctgcaaaacagcatgcattgtttcaaacggaagctggttcttaatacaagcacatgcaatctcaatcaactgtttctgttccttcatttctatatacttagaagatactcccaatgcagactgaaacttgttctgcttatcctcatcaatgttaatggacccatgctgaccgctaataccatcctttttcaactgctctgaaatttctgaatttaatttttgatcaacctgcaacagccgatcaatagaaagaaaagctgttgtaacccactttggtacttgacacttcaacctactatctaaaccagattcccattgagaaagcagatctgaggcaacttttaccagaccactctttgaggcaacttctcgtgctgccacatcatcttgaaaaattaaagcaagaacatggaaaagagcagataacatggtgccatttccaccctcagcagtcaaactacactcctttactctgtccacaataaatgatacaatatttgacctatattgaccatcattttgggaacacatcattgccagcaaatctcgaactggaaaagctagaggttctttcatttgcaaaagctttgtgcatgtagataataattcttcaacagggggtagctggaccatctcctcttctagctgaggaacactgtcatctgtatcagcttccttagtgtccgtatcagagttcccaagagatatggcaagggcacgtgcaagttcatcgtcttcatggacctcttctgggtgggagaatagccactccattgctaactccacactatttgatccaacttgtcttaaagcttcttcagctctagatctagaaaatcccatctcaacaattgttgaaatagttgtctcatttggaggtggggcagtaatacgagcactggtattgctgtttacactcttcacttcaaccccagagtaaatgtgccttatgatagaaatgactgtagtaataaaatcataactacactcgatgaattgtggatgagaccaaacaggaagcactgctttcagcaccatggattggaggaccttcacaaaagtctcagcatcacgtggataagggacatcaccactggtcaggggctgcacaagtaagtgctttgtaaaaggagacaaaatgaaagatgacgtcaccaggtgatccataaatttaccataactagctaaaggaccataaatccacgagtggtcagtatcatccttctcatcacgcttcaaaattacatcatcagtgtccattggagatgctggagccctattgactgtgaatagcaattgactagtagcttcaaatgtggtcaaaactgattgcataacaccaagtccatacaagcaattcagtagaacaggattacaagaatctgctctctccaatagacttccatcaataaaatcaatcacctttccatagtagcggcactttgttgatacagacacctcagatctggaagcattcacatgaccctcaaaattcatatgatccaatgcaatggcggcaaacgaggaagccacgaccttagaagaaggagaaacattcacaatatcatcccgccgacgagagggaagcaacattaccttccccaattcttgaaacaaatgggtaatgtgaaaagaaagagatctcaccatgtcacag

SEQ ID NO: 3844 - DNA, 2457 bp, Cannabis sativa
aaaaataaaattattgaaaatttaacttagggtcatttgacaaaacaaatggttcaattagtaacttttacaaaacatagtgttcaaaatagtaattactaaaatgtaaaagcagtgcaattattaatcatatgtattttgtttatggaaaaagctagtgttctcttaacaagttttgaaccggtctagtctcttgaccatataagcatgttctttgactatatatcacttttgtagagaaagacaaatatattaggtagcttagtatatatcactttatatttatatatacttatattaatatgtacatttatatatgtgtagtttagaatttatataattgtacgtattaatatatatttataaatttgaacaagttgtattgatgtattagttttctaaaaacaaagtcaagcaaaaacgacttaaaaagaaaatccaacattttcaaacttaataggctctatatataattatattaaatattatactaaacattttcaaacttctaacaactttgttatataataataatgcccaccttacgttattgatgattatttaaagagcatgcaaagaataatttgattattaattcaataatatttcaaaagaaataaaagtataatataatttcaaaaaattgtgatttgtttatgcaaaagcatgttgcaattttatataatattgtggttgaatgggcatttatgtgtataatataatattatttcatatcgatattgtataattcttatatatacgatgatgaatcattttcaaagatcgtagttttaatatttattcttataattaataagtataattttgtttcgtcttaaaactacttaggatatggatcaaccaagagtaattagcgagaaattgacctattttccagaaagaaagatcggtcaagaaagtcacggtggtattgtgtttgagggttcatacgagggaagaagtgttgccataaaacgacttcaacaagctaatgttaaattggttcgtaaagagattgagagtcttataaaatcggatgaacacgaaaatattgtgagatattatggtgtggaacaagacttggatttcttctacatagctctacaacgtggtacttgcaatttggatgattttgtaagattgtgtggtgatgaaaacaacaaagatgatcctaaaagaaatctatttggagatgatgatattaaaccactcaccaaacatggtcgaccaactcagttcttattaacattgttgaggtaataataattaaagatattaatttcttcttcaaaacccatatcatttataattaattaatcatcatgtaatattattagtttaattgttatgagattgtatatacataaaatacttcttaatatcactattacttttaattaactagtaatatcaacttgcaaaatattaaattattagatttttatctaataaataataatgaaaaaagaaaaatgtgactttcaattaataattaattgataaaaactatcttttaaattatatcaaaaatattttttatataaaaaaacataataactttaatattttgcataatttttttaaattttgagatttttacactaaatactgaaatttttaactttttttcttttttaatgtggagcggaatatttttaaaaagactgtgttttctttttaaaaatactgtagaagttttatactgtgtactgtgttaagtttttactgttgctccacaattggtttttagttgttctactgttgtttttaattgttctattttgttattttacggttgttttagattgttttataaaaagataatatttttgtaaaaaatttcgcgtggcagtacaattgtaaatttttatcaaaaattcaatattttaataaaaacctgacaaatgatattttacatattttaagtacatgtagaataatattgtgcaatttaaataaaaaactatttttgttaaaaaaaattaatactttatttacaaaaagattttttttatattatatatttttacgatgttctatacaaacaacacgaaaacaacaacaaaataataagagtactataatataaaaatatatcaaaagaccgtatttttttataaataaaatctcaaaaaccgtaaaaaaatttaaaatttcgtacaaccatattttttatatatatttttttttttgaaataatttgaataatattatataatggacttatatatattactacatgcagtgatattgttgaaggagttaaatatttacacaagttgaatataatacatcgaaatttgaagcctgaagacattttgatatttaaagggcctggacgtgttcgtgcaaagatttctgatatggccataatcaaattacttcctcataatatttattctataaccaatagttcaacaggcaagtactctttcaatttttactttacaataattt

SEQ ID NO: 3845 - DNA, 820 bp, Cannabis sativa
aagaaaaaaagtaaaaaaaaaaaacacaagcaaaaacaatgagatttatggctatatttggatatcattatcatgatcatgattaattacatatataatatatttagagtgtgtttccattggaaagatatagtgtattgttttttttttttttttaaaacaaagatagtgtattgtttaattataaaaaaactaatatttcaaattatgtaattatatacatagtaattgtataattataaaaaaaaaaaaaattaacattctaattatactcttcatttcttattaaaatccttcgtgagaaataaatatgtattaaatttttttatataaatattaatgactaaatatactattattttctaaattaagttatttataattaccagcttaattatataatcaattcaataaatttaaaattgtaaataagtcgattgatcataacacaagtctgctcagtcaaaaattacatcaaccaaaacaattacgctacaatcaatggccccaaccataataattctctattatagatattttattttatgtattggtaattaatttttgttactcaaccgttttaattataactttaaattattaaaaacagaaaaaataaatattagaggttcatgtctattgacatggtttatcgttttgtcttgtctggtgcttggtgagttttgttcttcttgttttcagtgagatagtgagtgtaaggtgttgtcttgttgctactggagtggatcgtgtgaagtatactggttggtctttgtctattttttttattatcgaacgggttctggacgaaaatggcttc

SEQ ID NO: 3846 - DNA, 4062 bp, Cannabis sativa
aagaaattgagacaagagatcctactccgattatcagcacaaatcctcagcagatcatcaatcagtgtactcaaatgcaaagttcaaggaatccaattgaagatccttcagatccatattatctccatcatggagataatccagggaacatcctggtctcacaaccacttacagggcaagataattacatctcctggagtcgagcgatgcagcttgccatttctgtcaagaacaagctgggatttttagatggttctattcctaaacccccttctactgaatacaatctttataatgcttggattaggaataataatattgttatatcctagattcttaactctgtttctaaagaaatctcctctagtttgttgtatgatgaatccgcagcagccatttgggctgacctcaagatccgtttccatcaaagaaatgggccacacatttacaacctaagaaaaggtctgatgaaccttagacaggaaaaccaaaccatcagcatgtattacactaaactgaagaccatatgggaggaattgtctaattacagacccaattgtacctgtaatggttgcacttgtggtggtgttaaaagacttcaagaacatcatcacatggaatacataatgtctttcttgatgggtctatctgacaatttcactcaaatctgtagcaacatactactgatggatcccctgccagaggcaaaccgtgtgtttcacttggtgactcaagaggaaaatcagaaaggtaacaacattaatggacagaattcaaatactaatcttgcctttgcttttcagaatgacaaaaatcctcctccaccaagatctgactcacagggaaacaagaatcagcaaacaaaaagaaataggcctttttgtactcattgtaatatacatggtcacactattgagaagtgttataaatccatggctatccaccaggttttaaaagcaacagatcaaaggatgctagtgcaaaccaggtgcaaaccagcaatgaatcgagttcctctgaagaaactcacaccttacttccacaactcaatgcaactcaataccaacagcaactgaatctgcttgcaaatcaactaaatggtatgaacaatactgacccgagttcctcttcaggagctacaggtataattttatcaaatcattgctttactcccaataatgaatcttggattatagattcaggagttactagacatatttgcaataacattaacatgtttcaatatgtttgtcctataccaaaagtgaaactaattttgccaaataatgaatttctttttgtccaacaaagtggatctgtttgtgttaacaaaaatctcatattaactgatgttctttatgctcctcatttcaagtacaatataatctctgtaagtagcttaaccattttaaattctatttctgttaagttctctactgataactttcgaatacaggacaaactccaacagagggagattggcagaggtagaaatatcgatggtctttacatcttggatactgctcaatcagaaaatgtcctctctgttacagcagaactatggcattcaagattgggacacctatccgagaaaagattagcccttttgagtaaacaattaaagtgtactgttaagaatgttcacaaacattctccttgttatgtttgccctttggcaaaacaaaagaaattaccatttcctaataaaaattcttttgctcaaaacaaatttgatcttgttcattgtgacacttggggaccatatcatgttccatctcactctaactataaatattttcttactttagtggatgaccacactcgattcaccttggtatatttgatgcaacacaaatctgaggtttattgtgccacaatttatttcttatgttcagaaccagttccaatgcactatcaaacgttttcgatctgataatgctcctgaattagttttcaaggatctctttggtaagcttggcatattgcatgacttcacctgcatcgaaacaccagaacaaaacgctatagctgagagaaaacatcagcatctcttgaatgttgcccgtgacttattctttcaagccaatatgcctataaagttttggtccgaatgcataatgactgccactttcttgataaatcgcactcccactcccttgcttaaaaacaaaactccctatgaacttttatttggaaataaaccagattattctcatttgaaaaattttggttgtcttgtgtttgcttccaccctcacagctcatagaaccaaatttgctccaagggccaagccttgtgtgttcttaggctaccctcaaggtgtaaagggatataaactctatgatttaaatagcaacaaatttttatttccagaaatgtctactttcatgaacagatttatccttttaagactcttaatactgaaccaaatgatgttgatcctttttctagtatggtttttccctctactatagtttctaacacacctgtgagtgatttccctacagatgtcaatttcagtagcaacacaaatgacaccacacaggaacaaatggaagaatcgaatgatgctggacaacacatatctgacagcaataatgcatgtcctgctgctagtgaacccacattaagagaaccagcattaagaagaaccactagacagacgaaaccccctgcctacttgagagattatgactgcaattccatcttgcatgatcaaccttctacacctcatccccttagtaagtttatttcctatgataagctttcgaatacttataaatcttttgttttggctgtcacagcactctttgaaccacgaaattacaagcaagccagtcaactcaaagtgtggaatcaagctatgcaaactaaattatatgcccttttgaagaacaagacatggacctatgtcaaacttccaccaaacaaaagggctataggatgtcgttgggtctacaaaataaagtttaatagtgatggttccgttgaaaggtgcaaagcaagattagttgctcaaggtttttctcaagcaagaaggcctcgatttttttttgacacattctcacctgttgccaagatggtaactttcaagcttctacttgccatttcagctattcaaaattggcacacattgcaaatcgatatcaataacgcgtttcttaatggagatttaaacgaagaagtctacatggtcatcccacctggtctctccctcattgacaatgacagtaatgactcaaaccttgtatgtaaacttaataaatcaatttacggtttaaaacaatcatctagacaatggtacaagaagctttcggatgctctcaccttggaaggtttccaacaatcacaagccgactatacattattcaccaaaggttctggacctaatttcattgcacttctagtttatgtagacgacatcatcatcgcaggccccaataaaaaccttctgcatcagcttcaggactccctcaatcaccggttcaaattaaaagctctaggacctctcaaatactttcttgggttcgaaattgcaagatcatcagaaggcatattcctctctcaaaggaagtacacccttcagctattaacagatactggttttgcagggagtaaaccagctaaaaccccaatggaccccaaaacaaagcttgatgacactgcaggaactactcttgatgatccatctgcttatcgacaacttattggccgtttgttatatcttacattgtccagacccgacatcacctatgttgtaaacactctaagtcagttcatgtcttctcctcgtacacctcatatgcaagccgtgcatcatctccttcgatatctaaaaagatttccgggaaaaggactcctctacagctctacttccacactacatctaagaggcttctctgattcagactgggcctcctgtcctaccactcgcagatctacatcgggtttttgtatattcataggtgattgtctcgtttcctggaaaaccaagaagcaaacgaccatttctcgaagctcagttgaagccgagtacatggctcttgccactgcaggcagtga

SEQ ID NO: 3847 - DNA, 1001 bp, Cannabis sativa
acaaatcagggtcgtgacgagatattactgcatatggcccagctacgcaactactggctcaagcactagttgctgcagcatgaaaatcaggtgcggctcggttgccttttgttgccttttgagggtatattataagtattgacagtttatttctatattttaacaaaaatttacatcagtggctactttcttttcaattgaccttctgaaaattcttttgactttgccagcatcaaaacagaaggtagaagaagtggtgagttgagctcggcatttactcagagcatgtagcgatcccagacccattaaagaaagggccaacgatggcgaagtgaagtatttttcaaggtgtaaaatggacagagaaccggtcttttgaggaaggtaaattaggtgtgtgtttctttaacatggttagttataatagatacttacacacatagaatgaaattcaaaactataagcctttcttattgtgaaagacttgttctttttggttgtgttgtacatactatatttcttttgtaaaagaaaaagtaaaaatttttaacttaaggataaaattgtagtttatttttatttgtaagatttttacatttatatgatttgtttaacattttttgccctcttctaaattatttctttcacacttcaacttcaatttttccttttaatagtttttatatgtaatgttagaatagcaatgttgggcttttatccctatgtatgatttgtttctagagttttgttagtttggacattattatgtttttatttgtttagatcacacatattatatgcttatagatagagaatttctaaaatatttaaagaactaaactaaaaacacgttaaattcctctatttttcaaagctttttttaaattcactattcaagctctacatttatagaatattatttatttttctaaacatattttattaattatttgaggttttaattttacttttatataaaaatatgtgtaaatattaatatt

SEQ ID NO: 3848 - DNA, 999 bp, Cannabis sativa
tttaaaaaaattgtatttaatcaagttttttactaaattatttgatcttaataaaagttagcatagtaatttagaaaatacaatgaagtgcctaatctagtgggcattacaataaatacccaaaaattattaaaaaaattaaaaagtataaatattctatagttttttcaaaacttgtatggatttgattttttttttttttttttacaaaaatacactttatttttcacattaacaacaagttgtttttatattgatttatatttgtattataatgtttatgccttattttcaaatataattgataatatataatcacttttgaaaatctaatgagataaacactatgtgaattctttattagtataaaaaataaataaaatcaaaatatgggttaccacttgttttttctttttcttttttttttagttgaatctacatagtttgaataaataaataacttagtttgtctttctacccttctagagtagtgcatgaattttaggtggaaacctactagcaagcaagtgaaaaacgtgtatatgtgactcgcagttggcatgatagacaaacttattcctatgcctaagatatatatatctcttcaaaatgtatatttttttatcttgaatattattattttataattttatataagtgttgccacattatttatcataataattcatgctaatctatcaaaatatgtaataaatttggggtccaaataatattattactcgggaagttctttttattttattttattatacaaagcaatcaatattaagtaaaataaaaataatatatcatatacactagtctctataaatactaggacttatatttgaggcttatcaatatacacaagtctctaaacacatagtatatataagaagaacaatatacgatagctgatcatcgagatgcctgatcctccaccaccaggtcacccacatcatggtcatcatcacccgccgccacccgatccagcaccgc

SEQ ID NO: 3849 - DNA, 2320 bp, Cannabis sativa
gtgtcgatggtgaagaaaagctccacagcctctagaatgcaccatggtcagccagcctgctccctacaagtgtatgggtggccaagagaagctctacagggttttctgtacacttctacacgtggacagcatgatttaggctgaaattgggccctaaaagcccaatagaatagttgaataatatctatgttcaagggtatttttgtcttttgtaattaattaatttaatatacaaatatctagggttttgaagtgtaaatgagggttttaggcttcctatataaaggccttaattctaacctagaaaacttaagttcagtttaagcctaatactagcctccaagctctaagcctaagtttgataactctcctcttctctattttctctcacacgcccatacaagcattctcatcacttaagatttgccaatcctaatttatactttgtatccttaagggtgctatatgagatcccacctatagtgatctaaatagtattaaccctcagtattaatacagctaaaaggagagtaggtcattacccactatcaaagggggccaaacctctataacaaatgtgtgttctttaatttttcattctatttgtgtaacacgtggcaagcatcagatacatacgaccccactgtcggttgattactttttgagatcaacactaagcaatatattaaacaagtaataataaaataattttgttcctttattgataaatgatattcaagataacattgaaatagagttttagttggaaaacaccaatgccacatgggagtacagtttgccaataagaaggccaagccatctactcatcactttaatcaacaaggggtccgagtatttaagagggatgatgaaatgacaaaccaaccaccttggccggccctatggctagcataggtgagccaactttcagatactacatggcaagctaggtgtttggtgcacaactttcatctgtggacagcaaatcaatcaacgaattgggccttaacagcccacaaaaatagagggaaaatattagcaacttccctcttttgaggggcaatttagtcatttgacatttattaatttatgtaaataatagctttacttacatatttttaagggatattagggatgtaaactctactatataaagggcattagtcaaaccttaagtcttaagctccaagtctgatactcatcgcatctctctctcacacacgcataggccttctctatcacttgagattttctaactctcactctcacattataatcttaagagagccactttagatcctattactattgtgatctaagttgtattatctctagtatcaatacaaccaaaagaggaacaggtcattacccgctaacaaagggggctgaaccattataaaatcttgtgtttatttacttttttgttcttattgtgtaacacatggcaagcatcaaaattaaatctaacttcggtgtcggttggccaaatctaaggttaacattctcttttcgcttctcgaaaggctccttgtatacaggttctcactggagtctagtgttggcttagatcaatctatgttcatgtagttttgctaacgtgcaaagaagattgcttaagagcactccgatttccaaaaaatccctagtaatcttacatcgagctggcctccctacaaacacaaacaaaaaatcagccacctttgaatctagataaaaataatactaagtataaaagtctgcgacaaacaagggtgacaatcaaagtctattctaattccaagcagtgaaaatgcataaaaccattttgacttccaatctcccatattggaaaccgtgccttcaactctattaacctctaagttggcccacttactgaagtagtaaaatccattatcgtgaccaacattcttgatgtcataaaaatagtagaagtcctccttggtaggttctccttgcgagcactccatatacatctcatagaacccaaggaaaattctataattgttaggggtgagttggaagggagcaatgtcataatacatcaaaatgcatttgacaaaagaatgaaattgaaccacgactcaacaacgaagaatgggaattgaaacaactttaacattagtcaggataatcgttggactagtaaaaggaaggtgcaaatgttgtattgacactgattttgtacaactagtgttgatcaatttcaacctttagaatgttgtcaaattagacttccttactcgcaaaaccaaatcctagtaggaaaatggttattcaagggatgcatcctctctagaaactattgttggaattattttac

SEQ ID NO: 3850 - DNA, 1464 bp, Cannabis sativa
tttatagaaaaatattttttttgacgcgttatagaaaaatatttcataaagtattataataaaaatttccaaacactcgatgatagtgcttattatagcattttattacaaaatatttattttctcattcaatttacaatagttataaataatattatcattataaatttttaaaaattttgaaacagttaaaaaacgagtttgaagttttttaaatacgtgtgatgcatatataaattggaataacaaaaattttaaagtttggcattgtaatgataacaaacatcgctataaaaaaatataaaaaaattatacaaacatgtatttttagatacaaaaattaaaaaactaaaataaaagattcacagtaacacttaaggatagcaacaggtagggtatgaatattacaaccctactctcaaaaaagttgtacccataccctaccctattattctattattttttgcggataagatacaggtattatcctaacaggtataggatactcacaggtaatcttgccctattaaaatttttaaaaaatgatcagcacaaatataatgttgtgcaaaattattaaaaatttaattaaatacatagttatcaaacttttttagatttcaatatccaaattgatgtccatatccgaccatgtaattatgaaagtgtaaagccaaactacaaaagtagtttatgaaaaagaaaattgttatcaaaatgatagtggtttcattttattattaagtgcctcccttttttccattatatattatttcaaaattacactgatttgcaaattgttagccatattaaaccaattctagagtgggataattgacagaatttgcaaattgttagccacctgattataaacaacaaattactataaacaactctaattaataattgtctaaaacatcaatcaatataaacattaactattaattaaattttgaaaataataagtagcaataggtaattgcaacttcacagtcaaatacaagatatgaaataaagctttagtttccattttatgtgattggatgtactcaattattatctcgaacataaaagcatttacatttgtagcatctcgaacaagagccccaatactaaacataatatttactcaatatatatataaatcaaaactttattataggattgaaactttgatatagctgctataattctcttattaatcttaatccaaattatctccatacagctagacttggaaatatctatttagtagatgttatagaattttgtatttattacaggagatttcaattctgtacttctccagccacttgtaatgtaagtactaagtcatgtttaataattggcactcatattcaatactatatgtacgttattaatttttttatgtaatatttatttcaagcaatgaattttatggaatcaatgattcagtcagaaattattttacaaaaaaaaaaa

SEQ ID NO: 3851 - DNA, 693 bp, Cannabis sativa
atatatatatgttatagaagcaatcactatcattattatacctcatcatcacccaattttataataaaattgttcatgtatatctgtttatatgtatatggtttggtgtaaaattcactgtataatcaatattgttaaaaataaaagctcgtgatcgtaagttgtttattaaaagaaggaaaacaatgaaaactgtggacttgtttgatgtttaaaatataaatgattcatcaacaattgtctacatatgcatgattttgtattaaactgtaaagtcaatgtcaatttgtcaacatcaaagtgggacttgtttaaaagttgaaacttataaccaatgcttgctttgtgtgatttgtcttattagcatactttatacttttctcttttgtgtgtgaattttgtttttttcatggcaattaggtattttattaatttattaataccaactgctccaaaagtattgatatttcggaatatttacaaatagtatctgttttgacagggctaccgtagttttactttattaatattgtattttaaagggagattgatgtaatacactattttttttttatttatattttgatgaattttttttatataaattttcatttttttttaagaaaaacaatttcacgttattatttttttagcaaaatgtcaaaataattttgttccgaaacaataaaaaaa

SEQ ID NO: 3852 - DNA, 2409 bp, Cannabis sativa
agagtagtggcaaaagctagacacctgaatgttttaagatgagcataatcgggttgtttctgaaagagtaattcataaggagttttgttgttcaggttggaggagggagttcgattaacaagatatgtagctgtcatgacacattcagaccaaaaaataagagaaacatgtgcttgaaaacagagagctcgagcaatattcagcagatgttgatgctttctttctgcgattgcattttgttgaggtgtttctacacaagaaaaatcatgcataattccataattggcaaacaaatttttgaaaacaagttctggtgcattatcagaacgaaatttcttgatcttacaaccaaattggttttcaacataggccaagaattgtggaataacagtgtgcacatcagatttattctttaaaagatatatccaagtaaatctagacctatcatcaacaattgtaagaaagaatctaaaccccgagtgagattgaacatgataggggccccatatatcacaatgaatcaaatcaaaattattttcagcaaaagtaatgttgttattaaagggcaatttcatttgtttagccaaaggacaaatgtaacaaggaatatctttgtgtaagtttgaactgttacaattcagttggttatctaaaagtttcaagcatttatttgagggatgtccaagcctcgaatgccaaatatcagccttgacagcaagaataggagaagcatgaggttcagaatccagaatgtacaatccattttgagattcacccctgccaatcttcttcctgttgacatggtcctgcacaataaaatggtcagagaaaaattgaacatccaagttgctgtcattaagaagacagcttacagagattatattatatttgaaagtgggtacataaagaacattattcaaaactagatctttggagagaataatggtaccactgtagttgacagtaagactcacattgttaggcaaaattaatctagttgggacaacattacatatgcattgaaaaagatttttatcataacagatgtgtcgagttgccccagaatcaagtatccaggaattattcaatttcatattagatatgcttgtgagtactatacctgggttacctgttttatttccattttcagcattggaaatgttagattgctgtccagccaagagagtgagaagttgctgatactgtgttgctgtcaattgtggcagtaaggcttgtccctcattcccactgttagcatcaacattggtttgcacttggttggctgctgcttctttatttttgtcattcttgtgatatccaggtggataaccatggattttgtaacacttttcgatagtgtgtccaagaatattgcaatggctgcaaaatggtctgtttcttttggaagagttcgatctgttgccttgattattggttttgttattgcttttatctccatggaaggcaaatgccatgttcgaatttgggtcagcagctgcattaacattggttttctggttttcttcttgagtcaccaaatgaaatactctatttacttcaggaagggggtccataatcagaatgttacttctgacttgtgagaaagaatccgaaagccccattaaaaaggacattatgtactccatgtggtagtgttcttgaagctttttaacacctccacacgtacatccattgcacacacaactaggcctgtagttagatagttgttcccatagagttttgagtcttgtgaaatagatgctgacagattgattttcttgctttagattcattaagttctttctcaaattgtatatatgtggcccattcttttgctgaaatctgacttttagatcagtccaaattgcagctgcagattcatcatataaaagactagaggaaatttctttagaaaccgaattcaagatccaagaaataacaatgttgttatttctaaaccaggcattgtacataacagaattagaagagtgaggtttaggaatagtaccatccaggaatccaattttgtttttgacagatatggctaattgcatagctctactccaagacatgtaattgtcttgcccagtgagaggttgagagactaagatattacctggattgtctccatgatgtaagtaataaggattcgaaggatcttccagagggtttctttgctgtgctcgattattttgattgttagtagcagtgatttcttcgattgttgcagaaacaccatcgtcgacttcttgcaattcagcttgattatcggtttccatggcggaaacagagattggacagatcaggaaggaagcactgatcgactaaaggaaagaatcatgaaatgaagttcatggaagaacttcaaagaagaaaagagaaagaggcttcgctggagaagacgacaca

SEQ ID NO: 3853 - DNA, 755 bp, Cannabis sativa
gactgatggtaagaagggtccttgaaatctcaaataaaggaggatggtctgactttttattattattatttgaatagtgaaaaataaaaaataaaatccaaagagaaataaataatatgtgtggagattgttttggctggctgctcataatatatatctgatttctaccattgggaatctctgaccgtgtctgttgtctctgagcccacgccaccccacaccaaccagaccaaagtaacccactcattttatactaaaatattatattttatttttttaccgttaagaatagtatatgtcagcctaccttgtttcatagcccatatgctaatgtaacagtagatttatttatttacttctagagacaggaaatgtgtctcattgtttggtttggtctagtcatttgattttggattaccagatatgcattgcagagtgtttcttcatttgtttattaattattaataatttgaactcattgggataatgaggtaaagagatttagtcagattttatagacaatgaggttctctttggaatttgaagtggaagaactgaaaatacggtacattttttttttatttattcattggaaattgaaggattttggtgagttatgaaaaaaggtttgaccgtataggaagaaagtattatattaccaatgaaaaaacatctttatgtgtgtttgttttattttattttatcatatgttattgaaattgcaaaattggattgttctttcccctgggaatatt

SEQ ID NO: 3854 - DNA, 687 bp, Cannabis sativa
aaagattaatgatagcagctcaaagcaagaacagcacataaatgatccaacaaaggtatacctcacttctttctatatccttttagaactaattcaaagttaaagttgcttacatgttttacttgaccctttcatttttttttttttggcataaagcaacttaaggacgttaattgatgcttcaagcttctttgtttattgatattgattttgagaactcacgtacagtaatatgcttgaaactacaattttttcttttctcggcacagttatgatgcatataagattcagggcattagtgggtaaattattatggagtgaaatgagatctgttaattgctccttaacagtattttgccagtgggattttgctgtaagaaagaatatatagaggtagaagttgaatcttggaaatagtaatagaatttgatgagcttgaaatgttgaagtctttttccttctcctccatccgtattgagtgttgtcaagtctacagcgagcttgaaatgttgaagtcatttctttctccatatgtattgagtgttgtcaagtcgacggtgtctttaattctcctgaaagttttaggacctcatattacaagatttagattctgtcttgcacttggtcaatggactattggctttacttaattactaagccttctcctttccaagctgctaaaccttt

SEQ ID NO: 3855 - DNA, 698 bp, Cannabis sativa
cgtcttttgttgtttggtagaggagaaatattataaattttgtgagataaataaagcattgttgccacttaaactttatttttattttattttattgtttagaaaacttaatctactaaaacaactttcaacgtagcttgcactaaaaatgcaaatgttagttatggggactaaaaaatgagaatccacgtgtactttttttttttttttttctaaaaaaaaccactacttcatcaaaaataattagagttaagcacataaacatagaaaatcatccatccaaaactagtttatgaactttggctgcattcacatctaattcgatcatattagttatacgacaagcatcaattaaagaattttcaagaaaaaaataaataataaactatcaaaattctctaacaaataacttaaatcattaaaaaaagagactcaaaattaagttgtcagactcaaggtaatcgagtaaaaaactaggactaaacctaccatgaaaactacaacttttgcataaaacactataaatttattttcacaaatttagcttaaacaacaaaaggactcatattatacttctacaaaagatcaattgtctttacatagaaaaaatacattctatttaaagattttttcaaatgatgaaaatacaacgccacttgtagtaatgtactcgagtggatctcgttgcaatgagccta

SEQ ID NO: 3856 - DNA, 1956 bp, Cannabis sativa
atttttatggatattatgacaaaaattattaaaattatggtttctttcttagaaaagggtatttatttatgagaaaaattaaaaacaaatattaaaaaaatggggaaaataaaataaagtactcgggaaagggttatcctattttttttttcattttttttatataaattaaatatgatttctgaaaataaaaatataaatataaatggtctatttttaagagaaaaaaaaatcataattttaaccatttttatcatagaatccataaaaaatatatatggtctagtttttttttatacaaatatatatgttttatttgaatattattttattcataaaattatgtttcttctgttatctaaactattttctcttattattataaaatctactttcttattaaaatttattgttcaaatagttgctgtagaaaataaaaaggaacgaatttactgaaataaaaattgggttgagtcgcagactaggtagctctctttaatacatttgcagcactacccaaaattgtccaagcacactatcaatctcgttgtcctcaagataaaatagctcaattgaactactgtattggagctctattttacgaaaagaaccgtcgaaataccacacccaacaaaaattactgcttagaatatatattgtaatataatcttatataactgtatataatcttttttctttttctatgatattgatgtattatatagggaatgcacaaaaggttgtaacgggaagaaagacgtttatgattaacgtgagattgtgagaacgatgctgagaattaggacggaaaaacttctttgtttactaattaagtaaacatgtttaattcgagaggcacaacttgttatcaagcttggtattcgaaggtgtattggctcgggtcagtttactaacatcttgaatgaaccctggttgaatgatgatcaacatccctttattatttcatctcatccagccttggtcaatcaaaaagtttctgcacttgtcaagactactatcaatgaatgggatgaagaagttcttcgtgatgttcttacggaaagggattacaagcttgtcatagctatcccccttagtcaaacatctatggaggataaatggcactggtataaagagtacatggggctgttctctgtccgaagtgcatgccagctgattcaagatagcaaaccggtgaatggacagcctgataattctggtttttggcggtgcctttggcaactcaaagtccctccgaaggtcaaaaatttcctctggcgtgcgtgtacgaactgccttccaacttgtttccaattatcattaggaaaagtgccgattgaagtcaagtgtccaatctgccatggtgaaaccgagaccattttgcacattcttgttgagtgcccgttctcttataactgttggaggactgctgctatttctcaaattgcatcggctgcaacaagctttgcgggatggtttgatgatgggttaaaattatggaaaaaagaggaacaaattggagctacaatgttatgttggtcaatctggaataatcgcaacaactccgtttggaactctaagcaatcttcagttgaggaagtggtatctacaacatctcttgactttgtttcttggaataatgcttaaaagcagtcctttatatctccttctggccacggtcaacaagggagatttattgagcattggactaaaccaaatgatccttatatcaatgttaatgttgatggtgccattttttcaaatgaggaatgtttcggttatggattggtggctaggaattcttccggttatgtaattgaagctgtccaaattcgaaaaattggaacttggagtcctttacttgtggaggcaatgggtttgaaggaggctcttagttggatcaagaggaaagattggcatcatgccattatcgaatctgattgtcttacgcttata

SEQ ID NO: 3857 - DNA, 1521 bp, Cannabis sativa
gtactgaaacataattatcaacaaacaaaaatgaccccatttaacaattggaatatctcttcatagaatcatagtgataggtgatattactattgccagccaaaaaaaaaaaatatggtttcatcttgccgagaattttcttctcttttttttttttttcttatgaatctgatagaagtgaagtgaagcttccaaaactattgagaagttgttcgaaagtaataagaagcgaattcaaaagcactgagaacctttgagaaagctttcatctttacttgacagcagtcaacgtactcaaaaaactttcaatacgatccgaattaaagattaagctaaaactacgacaagtttagtcaaactgaaaatctaatgataattaagaagaataacgttgaaagctgtaatccataaaattaaattgaagaagagaaagcttgctcttcatagcaagaattccagctttcatccaataaggatttaaattttgcaatagaagaaaaagtaaatgaaaaaaaaatacaaaatgaaaatcagtccacgtgaaaaacaaacaccccaacagggaaagttatcaaacaaaagatttaaaataaaagattttgccgaaatggaaaaacagaacacccttttcaaaataaaagcaaacaaagaaaaccctgttcaagaaaagactgtttgggttgcagtaaaagcccaaaagagaggaaaaatgaaaatgaaacagaattatccaaagagaacagaagccgcctctgttctgtttcatttcttttaattttctggcacattttctcttcctttctaactgactaattcaaagttagagcctaagcaccactaacaatacctgcatttaactaaactcaatctcggaaaatatcaaattccgaaaccgacacaagaatagagtgatgagagagcagcaagtatgacccaaataactagaataacaagaagaagacgatgatgatgatgagctaagagacaacatatacagtggccaaaggaaaaaaaaataaaaaggaaaaagttaacaaaattaccaactccaagtccaagctcttcttctaccacttttatctctcttctctacacgtttagagagagagtgggatgtaaacaaatattgggtacgaatacgataatatatttattatagtatttctcgtgagtctcttccaatagttaagctctatttgggttctgatgtgaggactttatactatagattcccttgggcttcgacttatttatatagcaacgtaatcgtcacccgatgccgtccatatttctctctcttttttttttccttttcttttttaatttttattatattccaaattacgattctgcccatcatttttctcttcgaaccacttgcataggacggtgggggtgccgatgcactcccaaataggtacaatttatcctccaaaattaaaattctatcgaataatgattttaaatatttgtattttctactgttttgggaaattatcaattatttttctgctgtttttt

SEQ ID NO: 3858 - DNA, 819 bp, Cannabis sativa
caaaacaaaacaaagtctagttttgtaattttccaaactttttgagggtaaagttgtatccacatctctttaaatacccccaaaggtcctttcacttctctttaacacacaccacattgagtaataatattattatcatcacaaacagagtttcaattaataaaacagagaactaatagccatgggaaattgtttggtttcggaagagaaagtaataaaggtagtgaaaccagatgggaaagtattggaatacagatcaccaatcaaagcatttgatgtcttatctcaattctcaggccatacactatcatcagctgaaacaacaactagtagtggtccaatactactaaaccaaaatcaacatctcaacccagaaacaaagcttctaggtggtcacctctactatttggaacccgttccatcgcccccgaaaaagaagaagacggcgaaaaaggttaggtttacagtgccagaaaaagaagtagaatataccaaacccgagctagaaactactactactagcagtagtagtagtagcaaagttgtgaggattaaattggttataagcaagcaagaactgcaggagttgttgaaaaataccaaaggtggatcatcagttgtttcggtggatgacatggtttctaaattttgttctgatgatcagaaaatcaaacttgatcataattgtgattatgatcaaggtgaagggtgtaattggaagcctgagttggaaagtatagctgaagtaaattagcaactaatgatggtgattatgatgataattaagtatatatattttgtagtttttgttataggtga

SEQ ID NO: 3859 - DNA, 1664 bp, Cannabis sativa
cttgttctcttgcatggcttgattgattttttaagtaggctgataaggacctatactctaaactcaagaaaagcaatggaacagtagccaaacagtaggagaatagaagagtgatattgaatttagatcagtaaagctagttacaagctattggagtccttgggctcctgtgatgcaaagagtgaatactcaattcttgcataccctctctatttccttactcagatatttatactatcatattctctactcaaactcccctgaatacaattgtagacatattttgtattggaaatcaaatcagaataaaatcaaatcaaaatgatttgataatagttgcatgatcagtgtgtaaatgtatactttcctagtttgtaggatttaatttgttttgtatttattagctttatttgtacaatcctgttatttgtacatctccccaaagaacaccaggaatgttccaaagtatctttgggaagatgttatcttaatggcaatatatcttactaattgtgtacctagttgtccccttcggtttcaaacatcattctcgatacttcatatttctcatccccatgtttccaccaacacctcttctagtaaagacctttggttgtgtcgcttttgtccatatccatgctcatgattgcagcaaacttgaccctagggctatcaagacaatttttgttggctattctcctcctcaaacaggctattggtgttactttcctctcaccaaaaagaactatgtttcatgtgatgtgaggttttttgaagacactccatatcatcctcctcccttgcttcatgaggagcacactcattcagagcaagaagctcagtggttgtccctagagttagagttaccactagatttcctactccaacttcttctcattctcttcttcctaatgttttagtctgcagactcgacaagtcaccctatggagaaatctccttgagcttggttcgatcgtttttcaaaggtggtcgagaatcttgggtacactcaaggacagacttttgtttgccaagcatccagagaaagggaaagtaattgtcctaatagtttatgttgatgatattattaaaattggtgcctcacttgtggcggaggaaaaccttgataacaagggataaagcacaaacactgtaaaacaaagcagttacaaagaaactatatcaatgttttccacactctacacaaatcaaggaaggaaaactccttaaaatgtttagtcttaaagactgaagtagctgtcgagattccagaacctaattttctcccataaatgctttgctgaactttcaatactttcaaaggaaggagttctagtcgacaaaggaagataccaacagttgcttggcaagcttatctatctctcacacactcgaccaaacattgccttttttgtagttgtgtgagttagtatatgcatagtccttgtcaaggacatctaaatgctgtctatagaattttgaggtacttaaagcaatcaccaaggaaagggccatatttcgaaaaagctagggattttaaagtcaaaattttcacagatgctggttgggctggatcaattgttgcaaggaacagcgcagaagcagggtacaaagctatggcccatggagtgtgtgaaaccatctggttagaaaggttacttgac

SEQ ID NO: 3860 - DNA, 943 bp, Cannabis sativa
tatttattttctctaattattatttatgtacatttaaatatatatttattattcacatttaactacacaaatgtgtcagttcatgtctggccagggtttatccaaccacgaataaaaccttcactaattttgttttcaactgctctaaagtatatttataatactgtttttttttatttattttgtcaaccaaaacattgtttgattataaccacaagtaataacaataataatttatatgaatataataatctacaaaatagctcattgattagtcattattgtctctttttagaagggttcatttggattgtacctatattaatttccattttaaattatacaaatagctcttgacattatttctaaagggaatcaattattattactatattataatatgtgttcacaatcacaatatataaatgtaaaaatcacagcaaggcaagagctatacatgcacaccaaaataaagttagaaaataaaacggcatatactaactataacatatagttagatactaacctaaactcatatatttacactagaaaaaaaaaaaacaaataattaaaatgcagttacaacccaggaattaagtcatgactaagagatcaaatataaaacaaatagtataatgataaaaatataggctaacacagtattcatctcaaattcaaacaaatacaaatccaaactctgcctacattaagagtttttagtgactcacaatcatgaggtctctagtgtgggagtcgggagaccgtaaaaactttttttaatgtctctttatatcatttaatttatttataatttattaatttgtatatatatatatatatatatatatatagcatgtttgagaatttttcattacaagggtatgtaaatgagattacaactaaaacacagcaaagatactatgatgagaataagaaaaataac

SEQ ID NO: 3861 - DNA, 1272 bp, Cannabis sativa
  modified_base (595)..(596): a, c, t, g, unknown or other
ttttttttttaaaaaaaaagcctgtaataataacataagcagtgcagtacaggttataaagatcaaggactacatgtttgaaacacatcccttccaaactacctctttatcacttcctaaagaccttggagcaaggtctttaggaagtgataaagaggtagtcaatttattggactaagttagaaagggaagatctgtctcactattcactactacaaaaatgactttttattttaatttttaagtgacatatacacaatttgtgtcggttaaccttagacgtacatactcatattttttgcttcaattaagaactggggccaaaatattattactttgatttagaactgacgcaaacaaatacatataaaaaaggctaattaggatttttgttctctaaactttgacaattatcaaattatgccccttaaacttttctggccattaaacattccttcttgactattaaaattgttagatttaaggactttagtccaattgcatagaattttactaattcaatgattctttatgtactaaatcatgctctctagactttgatatctacctaatcatgcccctcgaactttgacanntaccaaattatgccccctgaactttcatccacacactattcttactaaaattggacaaatgtccttataatccaacaatctcaatagttcagattttttttaacaaagatcagggggcattatttggtacatgtcaaagtttagggagcgaaaaatcctaattagtctaaaaaaaatagtttatgcatcggtcaataattggcgttaacaagaaaaaattaaacaaaatgtacacgagcaggttaatcctccgccttctacagatcaaaagaccacaaaaaatttgtttcaaatgtaagatccaccccgcgtcgtcccccacctcaaatccaccacctaattaaaaaacaagaaaaatacccaatccataaaataaaaatacattcaagatgttaaataattggacaaaagtaaagaaactaacctttaaaaactccgtttgagagagagaaagagggtaagggtggcggagatgtaactaggctccacgatgttcgtcaatgagagagctccacatcacctaccaaaaaaatgagaaagggagaattagagtttcaaatctatgggatggatcaagaagaaaggaagaagaagaaggtgatgatgggtggagttggatgacaccgggagagctaacagttcaagcgtagcttagaaagaaagagagagagagaga

SEQ ID NO: 3862 - DNA, 1707 bp, Cannabis sativa
ggacttttggttttgaacttatggtcagtttcaaaatttcattttatggtagaagagtactgaattgaagtggtatttcaatgctcatatgaagaaaaccattgctggctagcttcctaattagaacactggcctgttgagtgttgaattcatgttgtgttgtcattagattggacttttccacgacttttcaggttggtttttgatttgactggaggccatcataattatttatcagtttgccaaactattgaagtaggcttcaggaataaagttttgtgtgattttaatattattccagtctctggtttgggcttgctaattatgcaaaatatttctccatgatattgttatgtttttagacatttctgtcgtgattgatacaaaataagttatgtcccctttgatcttgatgaaggatgaatagattacatattctttgagttttttttgcttagtatccattcttattttgccattgtagttaaggaattttgtttgagtttgttatactaataacctgaagagaagtagcgaataaattttgtacttttttttctcacttagtattaactttgtagcttttttctcatttaatttttttcttactgattcagtgataaaagcacatcactaacatggatgacttgaaaatttcctggtggataccacaataacaagtagctaatggtgtctctgttttaagttttctattctagactagtcacaatttcaatggtggagtcagagctcgagcttttggagcagagagaatcagatttcaaggcggagaaatcggtattcacttctgaactccataattcattttgataaaaaaattgaaagcccaccaattggagaaagatcactaagcaggtgttgcttgaagtattcaagctttaatacatcgtttattgctgccatgtctgaaacaattttcgttttgctaatttgaattgaaatttgaaaaccttgaaaagttgttcttgagagagagaaagaggtttattaaattggttgagagtggaaggtgagagtggaaatgtatttatagatggcaaaagcttttaaaattcaactgaagatgaaaagggaagactttcaacatgagtatcataatgtcgtgaatctgtgaatctgtatgcaatggatgcttttattttagtgttagatttgaatttttttctctctaatggatggttttatggttcaatcaaaaggttcctaatgtatcttataaattgggtacatttcttgattaccctttattctaaattaacaagtgtcaatcccttgattttttatttctttacagtggtcatggcaaattattgtaatggactttagcttcctactatttatgttgaccactagatatattgtaagtatctctatatgttggcaaaccagtgaacaatatattagtaaaataaagatgaaatctttttaattatttattgatctaaattgattgttgcagagaatgaaatggccaaaacttgtttggttgtcggcatctgccccattaacatcagttattctttcaactcttcttgtctttctactgaaatcaaaatcacaccatatcttatttgtaagaacttattacaacttttcatttcgtttcatagtttaatcaagtagaaatagaacgagatttatttgggtagggtgggaaaaagaatttggttgagaacttagcatata

SEQ ID NO: 3863 - DNA, 1392 bp, Cannabis sativa
cttttccttgttattcactctaccaataatatcaatcaccaccgcatcttcgccaccatcgccgtccataccggcagttttcgcattcggcgactctaccattgatccgggcaacaacaacggcctaaccggcctctcggcgatcttcaccgctaaccaccctccatatgggaaggatttacctacgcagaagcccaccggtagattctccaatggaaaattggtcacagacttcttagtctccaactttggcattaaagagttcttgccaccctacttggatcctactctctccgaagccgacttggccagcggtgtcagcttcgcctcggcgggggccggcattgagaacggcaccaacactgccttcagaggcgtggtgagcacggctaggcagttggagtattttgatgaggccatgcaaaggatagagagatacgttgggaaagataggtgtgaggagttagttagggactcgttgtttgtgttcagtactggctttaatgacgtgctctacaatcaagcattgggcttattgttcaataatcaaatatttcacgacagttcctcaagttcaaatgatgcttctaactaccaaggtattttggtacaaacacttggctcatacattcaggtacgtaattctgtcctttttcatagtatatatgtgtagttttaactattctataaatatgtatgtgaatttatactaaacccttcattccatttaattatgtagtagattagtttaccgattaatgttatataggttgttaattaattgtaacgaaaaaaaaaaacagtaattttgatgtgtttatctgcatgcaattaattattcctaaatattagcctaattattagaaggatattaaagatgttttaaattatttgattacatgaattagtacgtacgtaaaagaactctccagtttatttttagtaaagagtttaatacgagtgcatttgctagctatgcattaatgtatattagaagtatttaaatattttgacaacattgccctatcttccttttttttttaattttctctaaatatatattaatatatgtaactacatacatgatataaataaatataatgcagaaattatactcaagaggggctcgtaagtttggtgtggctggtctggcaccagtagggtgcttaccattggtggtgacagcagggagtatattagcgccaagcttaaagcacatattggagcgagtgtgcgtagagccactcaacctctattcccaagcctacaataccaagcttcaagcctttctcattgcccttcaacactccttgcctgcctctaaaattgcctactttaatgcttatgatcctctccttgacatggtcaataacccatttaactatggtacgt

SEQ ID NO: 3864 - DNA, 1891 bp, Cannabis sativa
  modified_base (864)..(865): a, c, t, g, unknown or other
attttggaaccaggtaagtataaaagtacaaacaaacaaaacccaaaaaacatcatcattctcataccaaatttgattccaattcctttaataataaaaatatcatttttttcccacccaccaaagaacataccttaaaaatttcaagttttttatatttaaataagtataaagagagagaaaatatacactaacggtatgcaattgttgccgcatatatccattttcacaaaccagctgagacacctgtttttgcaagcgatcattctcctccatcaataacttattcatagctgataattttctattaacagtctgaagccttgaagcttctttcctttgtttttctctacacctgtttgtttaaaatccaaatccaaatacaattaaagttaccaactttaatgatctaaacacaaaaatgatcaaaacccagttgtgtaataaaaaaatcatcaaatcaaaccttcgattttggaaccaaactttgatctgtttaggctcgatgttagagagaataggacactcccggatcaactgttgtctacgcatagaacttggttttggacactcagcataaactctttcaagagcttcaacttgttcggtggtgtaacggacatacttaccgttatcaagatgtttgttaatactacttccactactactctccctgtgttggaccacagccatagccattactaatcttcaaaaacccaccaagaaaaaaagagtcttttacagagaaaattagatggggtggctttgttttgttttttttttttttctttgtgaaagattctttgtcctagtaaagtccgtccttaagaaagataaagaaaatagagagagggagagagaganngagagagagagagagagacgtaaacggacgagtaaagctttaagaccagagagagaagattcttggtctcgtcgaaacactagtagcttgtagtttaaggtaacaaaatccaaaaaatggggctaaaaaacaaagtctgtaattttatttttattttaatgaaacctttgtttattggttgatgatgaagctatgaaagaacacagtagcttcaaatttaggtacccagaaaccaaaaatggtgaaactccataacccaaaaaaaaaatcccaactttagtttcttcagctaatttcttcttcctttttccttaaaaactatgaaaaagaacacattttcaaccaaaaaacaaaaaccccactaaactaaccaagaccaaaaacttaaaactcaatttttgaaaaaaaaaaaaaaacagagcagaagaagaaatcaaaggctcccctgaggagtaaaaaagccacaatgtgttaaagcattagaaaagagctggtgagaatcaagcaacccagaaaaaaataaggaaaccctaatcataatcatgttaaagaagagtgagcagccatagtattgggaagaagaagaagaagaaagctttgatttttgagtttttgtaagaaagagagagaaaatgaaggaaagagagggaaaagacagtgatctctgtggtgaaaacagtgagagaagaataaaagagaaagagagagttagagagagaaagcacgcatatcgacaagagagagagagaaagagaattattaaataaataaataaaatagtaaaataaataataaatataattattttttaaattaaataattttcggcgcatttacgatattgtccctaatgttgttgagtgaaatgacatattagacccctcaatagtcatagtcatagtcttagactgttgtttctgtcaatctgtctcattcaaaacgcttctcttctctcagttaaaaaattaaaaaattaaaaaaaaaaaaaaccaaatctaccttggcagtaacaaacaaatgtatgat

SEQ ID NO: 3865 - DNA, 538 bp, Cannabis sativa
ttgtaggttataaattgtacgttgcaacaaaaataacatatattttataaaatgaatttaacttctttttcgatggaaagctgatatagtgataactatattcatttacaaataaatatccttttattttgtttatgtttttattttattttattatggcgtaaaaatgacgtaattaattaaacaatgatatggatcgatctaggtttaattaccgaccaaacacagtcgacacaaagtggggattagagggaaagaaggtatatagcgcgtggtagctatcattattctcatctgggaccttagttgacagccttgggatcgaaggcttggatattaatcatggcatagacgaagtataatcatcttcctgtaattgcagagagagagtgctccattttttatgataaaatatacataactataaaaaaagatgctcacagaaagaatatttataaattagaattaaagtgtgagagagaaagagagtatagtatgcttatgctactgtagagagatataaaaaaaaaaaaaaaaa

SEQ ID NO: 3866 - DNA, 1048 bp, Cannabis sativa
atcttaaaagactaataataatatgttgcaaaaccagccccaaaaatttatctaatgcaacaagattattaaatttttacaccatgctaagacaatctaattcgaaacaaacattatgacattggaatactgttgatcttaaagcaagggtttatgcaatcttaagatcaaaaaaataccttcaacgcactaagctgcgaaagttaggaccattctaaattcatcccgagctaccatactaaggctgcatgaacctttatcgacataaagagcagcatctatgttaatgttgaaaaatgagctttcgagctaagaaatctgttgtactttgtgctatatttttattatgtttttttaagtttgaattagtttcgttaatctaatggcatgtttatttaaagagaatggaaatgaatggtatgatattgattccctttactaaattttgcagggagaaaatagtgggcctatacaaattagagagaaaacaaatggaaaagttctcctcttatttttataggaaatattttttcctttcctaacttaatttatttttattttattaattaaacataaaaaagagaaatatgccttttaaaaatctacaaactgaaaataattacatgttctaataatgacaattttttcaaattaaagcattccgattacctattctagttatgtaaataaaataatataattctagttttcttttcgggcagtttaataaatagcataataaaatattgtttccaaaatattgtttccgattattttttattttaaatcaagtcatttctcccatcaattattttgattacaattacagtttaataacacgcatagataaagctttccatggtaattacataataaatgattctcctctttattatctttcaatgaattactatctttagaaatatttcacctttttatctattaatacgtgatgattcatttgtttggaacaaattttactacaatatttctatatatgaaattagtgtatatattaaagaatataaatactggatagtgtcggggg

SEQ ID NO: 3867 - DNA, 1573 bp, Cannabis sativa
atcctgaaccatcttgtctgcagtttcattatgcaagccatcaggttgattttgaatccgagtcagcttagcttctaactcttggataattttatccatgtcatttacattgcagtttttccacttcgccaattctctccttacagagttactgttcttcagaaaacgatcagttgcttggttcatagtgttttaccagttagctttaacaatctccccacattcattcgagagagcccaagcctcgaagtaacgaaaagggatgaaacctttatgatgaaacattaaagtatcaagcaatatggcgccatgatccgaagcaaagattggaaaatttttaacaccagccttcggattatcgttgatccaaagaggcgaaccaattgctctgtcaagtctttctcgaatcagattaccattgaatcttttgttttgccacgtgaacttacaacccgaataacgcaaatcaatacccccactttcaatgagaaagttgttaagtgtcgagaagtccctccaagaaaccggcctccctccttgtttttcctcaaaattgccgatgcaatttagatctccaattaagagccacgatgatcctcagtagagaagagatatatgatatttaactaagaccatttttaatccaaaatgtaaaatttatattaaatttgacacaaaaaaaataagcttgtgtaatatttttagctcattatttataattgtccttcaatatgtaagatataaaataaataaaaataattaattatattaataattaattaatattttattgagaatatacaaaaattattgttttttttttatttttttattatttaagtactagtaatatagtgaattaagaagataaaatttaattaaagtcaataaattatactaattactgaaattttgaagaggctctaaagttaaataataatataaagagcttagctaggaagataatattgccactaattaattgtcgtggccgaaaataaactaaggtatatccatgcatgcatgcatgcacatgcatatatatagtgcgtttattcataataatgacaattcactgtttaaaacttgaaaaattcaccaatacacgtagatcgacatgtactatattgttaattttatttattaattaaggtaacagcagcttaattagtttaatacacgctaattagctttgaaaatggtgtacactgtaccgatattacctaggttagcatgtgattaatttcatcaataaagagcataaatctcagaggtttaattatatttatttatttatttatttatttctatgaatctgatcaaacgttgacatagcgctattgaaatcaaacacaacaggatatatatatatataattcaataataattaaattaaatcatttacgcattgatatatatttaatttgtatcatgactcgcgaggattaatattagctctcaataatttgatcttaatcaataatgtggaattatatatgtacacatgaatatgaaattattaaaattaattaacttaattactaactgcaactaatactcttgttgtatatat

SEQ ID NO: 3868 - DNA, 1361 bp, Cannabis sativa
aaaaggttgagagagcatacaatccaactgcaacgagctaacactttgactttaagagttgcccaccttatgtttgacgaaaattctcaatcaaaacccaaagagatcacacaaaagtcccaagaagaaagtaaccttttttatcttcaattttgaggaaaacccaccaatggattagactttagagttgtatggtgagtttgtgtatgaaaaaaccataaaaggtaaataaaaattgattgaaagagggattattagtaggcgtggtcaacaatggcaacaacagagaaagaagagaatagaaaacaaaggaaattgcttagctgtgggatcaatttctctttcattctttctttctctctctcaatcaaaaaaataaaaagacaaataaacgccaagttattaaaataatatagttgtcattatcttcaccaattttttatttaaaatttgtatataataagaaagaaagaaaaaattggagaaaaaatttaaggagaaaattaaagaaacatatttatggtttttgaattattaaaatatatataaaggcaatttattaattaaaatagttaggggcatttagtaatatttttaatttttaattttttaatcacaaaaataaaaataaaaatgtgtttaataactatttttataaaagtatcttctataatttttatttttattttctatttaagtcgggtccaggtctaaatttggagtctggggtcgggactagggttggagccgaagtctagatcccaaggttcaggttaaggtcggagtacaaaatattgataaaaaaaaaaaaattaaaaatattttgaaagtaatttttttttcaaaatttttgaaatttgattctaaattaaaaaatttaaaagtaaaacagttttataaaatatatttttataaaatagttttacttttctaattaaaaattaataaaaaaatattactaaatgcaccctatgttaaattatttttcttaattttaatttattctaatcgctttttttttaattttttattattatttttcatgttaatttcatatttataatttttttgcatacataaaaaatattttatttcataattattttaaaaataatatttttgaattaaaataaatgtacttttacaaataaagtttgaattattaaataaatagttttttgatatttgggtattttttttcattttttattaatatttaaaatatattttatttatatctatattaagcttttttggtatatgacacaaaattgtatacaatttatgtaaaaaaaaattaataaggggtgcctttaactgttaaaaaaaaggtgtcttcaataaaattttggagtcaattt

SEQ ID NO: 3869 - DNA, 549 bp, Cannabis sativa
agctgttgtctttaatgcttctccatagaaggactcgagtaaggtagaatgagtgatcatgcttcttaccatatccttaagaatcttatgtcttctttcaacaacaccatgcatgctaggtgacacatattgctcacacaaaatattgctcacacaaaatattttataattatcacatatttatcactacaaatgtgtttgaaatctagtaaaatattcacttatttctaagtcaattaatatatacatccattacaaacacaaaatcttggtattcaaataaattattttacacaacagagtaaaaaaaataatagtatacatctttttttttctttttttaaaaaataatattgatatatatattataactgttatgttatatatatgtattgaacatactttatttaccttttaattttttcttttttttttttacttttttaaaaaaagataacatgacataacataacataatttttctatttaactatggcttttaacaaatacttacctaatacctaccgtttaaaataataataataataa

SEQ ID NO: 3870 - DNA, 1372 bp, Cannabis sativa
cgataaggcagcatggcaaagatcagtgccggcggaatcccaatttttttgaaagaaattcggattaaaaccgtcagggccaggggctttatctccagcaagctggaaaagagcggttttgacttcatcaaaagtgaaaggagagttaagaaacgcagtctgaatgggattgagatgcttagtaagaccttgcgtagcaaaactcatagcttccaagttagtaccttgggaggcaaaaagaccagtgtagaactgaacgaaagtggtaaggatatccttgaggttggtaatttgagaattatcatccaaggtgatggacttaatatagttggtgcgtttccttatggttgcacggttgtggaaataccgagtgttcttgtcacaagctttaagccaattgacacgagatcgttgtttccaaaaaatttcctgtttaagcaagatggaatcgagagtacgttgaagatcattggcttttttagcgttggactgagaaacaaaaggacccgccagaagctgctcgatatccgattggatgcttttaatgttgcgagtaaattggtttttatttctaccccaagtggacagagaaaaggaacaattattttgtttggagatgaagttggagagagggttagagtggttggtagtggtaggatcagtaacccagttgttcttaagaagctcagggaagtcaggctcgagtaaccagtgattatcaaaacgaaaaagtggggttacgagcaaacaggttagggctgccctccaacaacactttcagagctctatgatcggagccaaagaaacccaagtgttgaagggaagccgtggggaataagttagtccatttttgattgacaatggcccaatctaaacactccaaggtggtgccatgcttccaagtaaaacgacttccaaaaaaggaaagcagagaaagagagtatttacctatgaagttttgaaaagaatgcatggaatggggtggaggtaaactgtgggaattgcggtcattgaaaccaaggtaatcgttaaaatctcctactataagccatggtgcaagaggggcaacatcaaaaagacgatgcaataaagtccatgaatgagatttatcagtaacatatggggaaccataataacaagacaaatgaaaacttatattattaatagtaattatacagtcgatatggttaagggagtgagacaaaatattaacagtaatatcatccttccaaaacaaaagcaatcctccccctaagccacttctaggaacttgaaaaacattagcaaaaaaaattttagccctagaaacaaaagtagaatacatagaaagtttggtctccataacaaaaaaaagctgaggctggggctgctt

SEQ ID NO: 3871 - DNA, 842 bp, Cannabis sativa
ttccttttcctttctcttttcttatttgcccaacaaaaaaacaaacaaacaaaattgattagcttaaaactaataatgagtcccctcaaacaacacgtacatgttacccccaatgtagttgttgtacctcaaaaactattgtgtgataaaaaatagtgtgccaaacttgccctaagaaaattaataagggtgttgttggaaagaaaaattaaaaaggagtaaaaatataaataataatacgttttttgttttttagaaatgtaaataataatacgtttagatgcatctttataaataaatagtttttggggacataccccccacatgctcccttccctccggaaacaataatattttgccattttttataccaaaattttacttcaaactatataatgtgtcacaaagttaaattttactaatagtgaaagtaagagtaataaattttgtgagaagatgttaatacgcaacattcataatattttgtattatttccagatagaataacattaattactcaattttatgcaccctttttaaactaatgtcaaaaaacaaaatgtctttaactctacaaatattatcaataaaggttctcatgttcggtcaatactgtcattattattttttttttttttaaaaaaaataaataaataaactcaaatttctgtacgttattcataattcaagtctagaaggctaaacagtactgtcaatgaaaaaaacttttttttttatactctttcttctatttacggtcattaaaacgtagtatctagtgcagaaaagcaatacgaaaagttctttcattattttcttctgaagagtaactgagtcaaatt

SEQ ID NO: 3872 - DNA, 2652 bp, Cannabis sativa
tatatacaacaatccaacatttaacttcactaaaatttctaaattcaagcataaaaattatgattaaatgagtcaagtaatcattaatgaaaatttccatattaaacactcttgtttatatcaaacacctctttgtaaccacatggggcaaggtaagcattagacacatcacaaatacaattaagttgccaattaaatttgggttggaaacataaaataccatttatataaaaaattagaacacaagattaaaaaatgattagcaaatttgattgttttcatattagattgttaaataatctttaatcaaataaagcaaagtgcatcaaattaaacgaaatcaaatcaactcaataagtaaaatcttgaaacaatcgaacactttatacaaataaaaaagaagaggggaaacccaatgtagcgatcagtgaagagatcgagttggtcgatgaaggcataactttagtttaattcaaaatccattgatttgagaagttagttaagagcatttctacaaacatatataaattaccgcatagacaacaaaggaaccaatgagagagagagagactaccttgttcttcagtgagcttaatcttggaagatcaaatcttcgtttaaactaaatggatttgaggtttgagatagtgaaatgaaggcactcactgagtgccaatggtgaagcaacctaaaacagattctcttttctttttcaagtcgtgtatataaaggataccattaaacccttattaaacaaaaattcaaacttcttatttatgttatttatgatttaagtaattacattgttatttcttaaattgtagtagaagatcaatagttattagttggtggactttatttagatatttatatgattttaacacttagtatatttcacagttttttttatacttgattattggaggtttattaaatccttggttgaagttgttattagggtttcctaccattttatataagctaattagtcattttgtaaatattaaagtttaagagatacaatttaacatatggtattagcaaaattaaataaaattagacaaaatttttaaattcaataatatcaatagttcaacggaatttttaataatatgaaaagttcagaaacatgatttggtacatattaaagttcagaaacatgttaaagttcagagtttctgaactttaacatgtatcaaattgtgtccctaaattttcatctacgtaagactttctttagtaaaattagacaaaagtattccttaaatcaacaattttaatagttcgagaaatttttttaacaatctaaaaagtttaagaaatatgatttagtatatatcaacgttcataagtaaaaatccaaattcaccttttatatactcatgtaatgaaatttatcccattttttaattaatggttattccattttctcaaaaaaaaaaaaaaaaaaatagatcaaatggagtaaaaattgaaactatttgatctaaaaaaaaaattgaaactatttgtgatttttttacatccataaaattacaaatacacatcaatattaaataaaattaatttttgtatatagtttataatataaaaattatattattaatttcaataataattttcatatattttttttaagataatgtatatttttattttattttattgtcataagattttaacaattttttattttaattttaatatttaaaatatattttatttttgttatatatatgtatcttataagaataagatttttaaaaaaaaaaaaaactagtatatatatttttgtaaaacaaaaactagtatatattaaagatataaattttatataaactaataatattatatttttttctttttttctagaagaataaaaatattaaaattgagtatcattttaagagtgtaaataaaactttacaataataatacactagctaatagtgaatagtgattgtggagaccataatagccttttagtatatctccaaagttattgaaaaatctctattagtttaggaataataactatgaagaaagcattgtcctattctagttggggaccaagagagaaactccaaggtaaaaatttcttagataaagaaatatgagaggaaaccaatgtaaacactttgataggaattttgtcgatatatatgtatttggcctttgggatcatcagaaaaccagtgtttatatgattatgtaaagaaacaagaaaattgaattaagcaattgagaggctcacatgtgggtcagatcatatagtgccacacacacactcacactcaaactcagcatgtgggtcacgcgtccccattgcccatatcacacacacacacacaccacacccgtatgacatccaacaacccaatccaatttaatataattcaccgccaagttattcagactgcataaatgaataacaatcacaacaaaaagcttaaaatcaaaatagtcattcaagattgttataatgggttctatctctaaagttggtgttatattttcacaggaaaatagttcttttagctcttttttggataaattattggatttagattgtatatgtactcgttaaagtttaagattatttagttaaggtacatctaattttatcataaaaccaattaacaataaaaaaaa

SEQ ID NO: 3873 - DNA, 1095 bp, Cannabis sativa
tcctttgccacttcaagagccaaacaaacagtggcagcttcaccacgaagaacatctgaaaagtccagctttgtcatatgtacccaaaccactttacttaagtagtctttagcaacaactacaatacgtacatatgtgcttacctcctactttaacatcacaatttaacttgaatcagtcttaagaagagggcaccaagacatcactgtaataagtatgtacatctaacaatattcttaaaaattatatacatacatttcgcttagtttaaattaattgactagtaaagttaaatttaagagtaatactataccaaatttatcattattttaaaatatttagtagtaataaataacaacaaattcagtaattttgttttttttttctttttactttagcacccaatgcattatttttttactgaaaattgttaaaatttattcaattattgcacacaaaattaaatgtatttttgtacttctattcaaaagaaaataataaataacaaaatatattattttctatctcttgccttaaaatcaaaattaaaataaataaataaatacaattaaaataaataaatacatacatatctattaaaattatttcgtgaaatatattgtattaaaacaataggttttgtaaataaaaaaacaaaaattgctgtaaaacttatatgaatcactgattaataattatgatcatgggcttgcctaagttccgtactcttgtctcccaaagaaatagcgatcaatctgaaatcttaacctgaaattgttcttcaatacatcatcatgcattcatgcccaatacgatactagaaatattattactcgtataatatgagtaaacaatttattattggaggataattataattaatacccaaaaataaagcttagaattcatatttatatttttggattgtactcatcgaataaaacttattaattcatttgatttattaataatgcaacagacattctatattattaagattttaaattgaacaaacataatatactataccaataacttgtgtagacaattttagaaacagagtatattctattctcttttattgtattattgtat

SEQ ID NO: 3874 - DNA, 1964 bp, Cannabis sativa
gtacctccaatccccatgactcccgcacatgcaagctgcaactagaatcccacattacctaaagaactctccaggacagggtctcttcttctatgcttccccaacaaaaacaatcaagctacaagccttcgcaaacactgataggggagcatgccttgacacaagacgatccataacaagctatcgtgtcttcctcggctaatccctcatctcctgaaagtcaaagaaacaacaaatcatatctcgatcctcggctgaagcaaagcatcaagcaatggctcatgccacttgcgaactcacttggctcacttctcttataagcgatttcaacatcaatatgactctgccttcaactctctactgtgacaacaatactgctatacatatatctaaaaattcagtatatcatgagagaacaaaacatgttgagatagattgtcatactgtccgaaaaaaagtcaatcaaggaatccttcgaatgagtcatgttgcatcaaaagccaacttagcagacatactgacaaaaccactatttcctactcatttcaaagacattctatccaagttgggcgttcgaaacttctacgctccaacttgaaggggcctgtcaagagttagttaggaaaaattagttaattttcaccgtttttctgttatttcagttagcaagttttcattggcttttgcctatatatatatattttttctattatgtaaaaacagaatgttcaattcaataaaactctttctctctaaaagtgctttgttcctaatactatataaacaaaattgttcgtttaatacggggatcgcttgttatagagtttgtaaaaataaaattttaaataaatgtatattttatttatattaattattaaattttatttaaacacaatttttaatagtataaagttagacttattattataagcttatttataaagcatacacatgtgatgttcctagaagttagagcattaattagaagcacaatactaagagatggtcttattaattaatagaaaactattacatgtaaggcatatgtatgtatatattaataaaacagaaactaaatcataaatagacattaagtataaacaaataaaaagtagagataatgcttattttataatagagaatgcatttgtataatataattattaatattacgtgatgataataaggaatgatggtgattagtattaataattagctaaaactttttaaagaaatgataaatgtggttgctgatctcagtaggtctttcttcattgatgaagtgtccaacaccttccatgacaatgacctcttcaagaagaggaacatcttttttgaatccacctttgtgtatgtaatctttggctcccaatgaattgtatgtaaggtctacatcccctacaataaacttcactgctacttttactttatctccactccatggtgctgtcaattcccagtttctgcagtaattgaaaaacacaacatcatcatcatcgtcctgataaaaattatgggattccatctcaaaattaattgataatgagtttagcaactcgtaaaactaaccgctcattaaaaataacggttaaagtaaaatatattatatgataatgatattaataaagacctgtttatgtttcggtaatagttgattccaccagtgaagcctttgttgtggaatttagttgtgtagtaatcaaggtcttgttgagttaaccaagaaggcaagttagctggagttgggctatcttttgagtgtggaaacccttttccttttggcagcataagtgggccaggatttctatatgtaaagaattcccttaacacttcttgtgttcctatttgggcaaactcaccttctatttctccaatttcctgcattgcattattatttattcaccttttattaaaaggaaagatataataaggacagtctaaaatccttttatacctttatattt

SEQ ID NO: 3875 - DNA, 793 bp, Cannabis sativa
gtgtttataatgtgtgtattaagggtaagggcttgaggctaactttttctatattttttcaaatctttgtatgtctgatggtatattcatagagaacaagagtgcaaggtccaagctttagtgttgatgaaattattggtaatcttctaaccttaagagtaacatgcatataaagtttataatatagcatccagtaatatatcatattgaattgactactttgatttttataagttttgttcgctatttttattgtggtatagttcctccaaatgaaaatatcttaaaaagttgttcccgaaaagttaggtgtcttttagatgttgttctcggacagctaacttgtccattccgaaaggagtctcatgaaataatagttgagtttaaaagggtgttctcaaaaactatcatgtctactccgagtttagtcttcaggaagctagtccttctccggaaatggagttcctgatggctagtctttcctcttggaaggtagttccagatagccaactccagctggctctatcctattcggaagcttcttcagcaaatgcatttggtccatgatcccggaagctcgtatatggtcccggatgcactctgacttatggtggcgtggagatcttattcatcgaagaattgatttagctgtttattgtttgactaacttaacaacctcgtttcttgtagctaccgactttaagattttgatcctaagcctataaataattcacttatcatttcagatacacaaaattgacgagttttaaaaggagactttgagtttgagaga

SEQ ID NO: 3876 - DNA, 1263 bp, Cannabis sativa
ttattaggcagacacacattgaaagtcggatggcatgtctatgccacaagtgttgatgagcaagctgagtgaaatgggaatgttaatgttgattccaagaatgttagccttaatggctgtgcaaaggcacacagcagcttcaagatccacaaggccatcaagaaccgagcagcaatggtccgcgggcaaccctatccccgtccccacagccccatgcagcacgtttgcacacacccctagctttaaggcatctctagggcaactcaccttcattgggttcatgatcatctgcttattattattattattattattattactgtttgggattgaataatgatcaggcctaatggcctgctcatctggactactagtactacttgccatgaggttcatggagaggacaagagaaatgattagggttgaagaatattgtcttgtggtggaagccataatatgtaattttgatgaagttgtacttgtgtttatcatattattatggctggtatttatatacttgagtcccagccaagtgtgtgttggctctttattttgtttagtccaaaattattatgtgatgtgaaaagtaaggctggcaatggttgagattcctcatgatcaaatagtggcctaattcatcttgacaaaacaaaaaagtggacaatccatcgagatactcataaactttaatttgtgcatattaatttttggtttgtttggatcacaagactgaataagctggggttttgtcatattttaacaatacccgtgaaccttttcaaaaaccatatattaatcatgattggttggtcttctgattccattttggtcacaagatgctactgggcacataatattataaataattataaattataatgacaaattagaaattattaaaaactattatatataaatatatacataataatttatattgctggctttgagtagtgtatatatatacacaagagtagtactgttcgaagagttgaatttattgattacaagtggattgaaatgactgctagttatacttttttgtatatatattgaccaataatatgtaaaagctcttaagtctaagttggggtgtcaaaccacaataacaaagggtataaacttttgttaaagtggtaacggactccatataattttattcctataaggccaattgtgtagttgttcacttatgtatgagccttgaggactgtgattcctcaactcatttatatgaagattaagtttatatatttgtatatt

SEQ ID NO: 3877 - DNA, 574 bp, Cannabis sativa
aaaaaaaaaaaaaagaattatttaataataccgtgtgccataaaatatagattgcaaaataataataaaaaaacatagcaacaacctacactagactataaatagatattaattcttttccattatagcatattccatcccaaaacatatctccatgcaaaactcataaaatgaagtttagcatttttatagttttttctctttttgtttttgtagggactgtttctggagataaaccagaatgtggaagggctgtaggtggtgctgtttgtccaaataatctttgttgtagctattggggtttttgtggtagcacacctccctattgcaaaaatggttgccaaagtcagtgttcaccttcacccccactgcctagaaacccagaaagaccagatcacagatgtggacctaatgttggcaacaccccatgtaatcccgataggtgttgcagcatacacgggtattgtggcagcacagctgcttattgcgaaggatctagttgtgactatcagtgctggaagagtccaagcccaccaccaccaagtccaccacctccgagcccacctccacccag

SEQ ID NO: 3878 - DNA, 1218 bp, Cannabis sativa
gatctcttgcaagggaatgtgttttcttgtaggaaacacatatcctaagagagtaaggggcgtcaaagtgtgtctatacatcaagggtaaaaaggaaggggtgggcaaagcaagcgagacctgccagtggtgtaacaccctaacctataagggtgctacgtgtgtacttttataaattagtttacaataataaactaacagtttaaaaaattgtggtttaattaagactttactaattattttttaaaatataaattacattcttttaaaagttaatgagttcagggatccccttattataaaattttactaaagtaccattgtattattttattacaaaatactcatacatgttcaaaatactttaaaacatgatcctgtcaactaatcacgatagatagcggggctgatatgtacatttattagaaaacctatgactcatcgtcaatctatttttctttttccttacctataccacaaaacacctatgagtcacaaaaactctacaagaaaagcaaaaaacacaaattcatgtacaaagtataacaataatcaataacaaccatatattcaagcatatagtcagatagattatccagtataacacaatactaataattcaataatttttctaataagacaaattattctcgatacttcataactctcatttccaaatgagacaactaatatcactatcgttgcccaatgagactaaaccgattagcaagaaacctaacagtggtttcaaaaatagagtaataactccttcgtgttaacgataattaccgtatcataattagtcatgcaatgtggtataattaacttttcttacctcagatttaaattgaggtgtgcaagccaacctaagtggaacaacgctcgacgatctcgggacctatatcacgataatggcaaactggtaaataaatcaattaatctgttttaggtattaaactcaaaactgaaagtttttctattgataaatagcattgtaataccttaaatattgataaaacataaaaatttaggcgctgaaaaacaccccagatggttcattgttttcctaaacggttcaccatttttttgggtttcagccctggaaaaacagttaatcgtttttacagtaaaaacggttaattgtttttccctgctgaaacggctaaacctggtttaacaataccaatccaaccgaaactcctccaaaccctgccaaac

SEQ ID NO: 3879 - DNA, 1249 bp, Cannabis sativa
gaagtgtgagaaagtcattgaaagagcgtggtttgaggagacaacgggtaatagggagaatttacttatgagaaagttggctagaacgaagaatgagttgaagaaatcgaaccagaatgttttttgtttttgtgatagaaagttgaagcaacttcagttatagcttgggttaacccaaaatctccctattaattatgctacagttgccctggaagctgatcttcagatggaaatacttgatattgaaggaaaaatgagcagaatttggcgacaaaaatcacgtgaaaacttgcttcaattcggaggtggtaatttgaaattctttcatgcctcgaccattatccggagaaggtgtactttcattcggactgtttgtgactcatcgggctactgattaagaagaagagaagagattgggggctacttccaatatcacttccaggaactttttagctacactgacccgtgcattgatgatgaattggaaactctatttgtcgacaaggtgacggaggctgagaatgacaacatttgccggatatctaactcttgtgagatcatagatgtggtttttaaaattcatccactgaaatcccctgggccagacgaattcttaggtattttctttagaaaatattggcatattattggtgattcagtttgcaagatggtgaaagatttttgtatgcctgggatactgaatgggcaaattaatcaaacctttatttccttaatccctaagattttaaatgatgcttgtttcgaccagtttagacctatacacttgtgtaatttctgctataaaatcatctctcggattcttactgaccggttaaaaggaattttggatcatcttgtctcaccattccaatcggcttttatcccaagctgatagattgcggagtgctcccttcttgctcaggaagtggttcattctatgaaatccaagaagggtaaagtgggtgtaatggcagtgaagaccaacatgaacaaggcatatgaccgtgtggaatggaaattcctattgcgagttcttaaggctaatgggttcagtagctaggcttgcactcttttaatgcaatgtgtcacttcggtaagctacttagttcttttaaatggtgcacctttggctcccttcaatcctaagcacggtctccgtcaaggcgatcctttattgccttttctgttcattctatgtagtgaattgttatccaagctcattctgagtgcggataaggatggtgattta

SEQ ID NO: 3880 - DNA, 792 bp, Cannabis sativa
taggccaggctcacttttccttttctttcctttttgatacccgaccctatcttactaaagtagaataaaaattaaagtggtgcatcaagcacaagacctcttaaattccacaataatatataatcacaaaccatttcctattatcatactaaaaaacatataaagccacatggataaccaacatatattgagattaagtcatacccacttataaaaactaatagcaaacattgaactcaaatttaaagagaaatatttgttgtttttgaacagaaaagtgctagataaaatatgtacctaaaagtaaacaatctgaatacttcaaagccagcaactagccaaaccaaaccaaaaatttcagctagaacaagaaatactaaaaattatgagtaatctctctttcgactttcaagttctaatatatgaataatagttttcaattgttgaaaaaaatagaccacaaaattcacaacccaatttatactagaaaacaaaattgttaacgcaatttgtaagtgccatattttctattgtagcaaattatgtttttgtcactgtctactggcttgttagtttcatctaattctattatacgcaggtcttcatttattgacaagttagaagtatctatttttctaggttaattttatatcttgccatgtgagctttgtggtgtcattttaacaactatatcagctcaattccagatatgatgagctagttttggaaggttaagtaagttataaggttgttagtagtattaggtttctctactagggtatactttctttt

SEQ ID NO: 3881 - DNA, 1731 bp, Cannabis sativa
ggacagatgccttagccattggagatggtaagagactcttaatctcccatgttggttctgtgtccattccctcttttcaccacaactgtccattaaatatgcagtctgtcttaagtgtccctcgcattaccaaaaatctagttagtgtttcaaaactaactgaagataataacattttctttgaatttcacaagaactgctgctttgtcaaagacaagacaacaggaacagttcttctcaaagacagacttaaagatggcctatatctccttggtgatgtctccaaagtgtctcaatcttccctgccaagttccaaagccaacaatgttagatctaataatgtgtacacttgtactactgaatgtaattgtaactctgagtgttatcactcaacacacagttgtaatcaccaatcaatcaatacaaatgcttttctttcttctgtgtctactcaatctgcatttcatgtttctcaacctactaatcttgatttatggcaccaaaaattgggacatcctgctcagtctacactacagcagctgttaccaaccatccctcacataggttcaattaaaaacatgcaattttgcagtgcatgtcaattaggcaagagtcatcgactccccttttttgtttctcaatatagagccagtcaaccattagaattaatacatacagacctctggggtcctagccatgaaccatccatggatggattccgatattatattcatttcttagacgattacagtcggtttacatggatctatcccctcacagtcaaatctcaagcctttgacaagttcattacctttaaaagcatggttgaaaagcaatttggattgcctattaaaagtgtgcaggctgatggtggtggtgaatacaaaccatttgctaggttcttggctgatcagggaattctattctctcatccttgtcctcacactcaccaacaaaatggcagagcagagaggaagcataggcatataacagagactggccttaccttgcttgctcaagcaaatcttggtttaaaatactggtggcatgcttttcattctgccaccttcatcattaataggcttcctactccagtattaaaaggaattagtccatatgagtgtctattcagagataaacctgactacaccatcttaaagagctttggttgtgcatgttttcctcacttacgaccatacaactctcacaagattgatttcagatctcagcaatgcctttttcttggctattctgctgcacacaagggttacatctgtgaaaacagtcaaggtcgtatttacattgcccgaaatgtggtttttaatgaaaaccactatccaggcccctctcacaacaacaccaatactcaggtacactctgaacacaccactcaattttttcctactgcatccttttcaacttctaatacaaatgttgttcctgtgtcatctggtgtctcaactgatgtctccaatggtggcttcactggtgtttctgagccaattgctccttccccacaacctgatcctgtcccaaacactatcccaaatacattaccctctgcctccttcccacaaaattccccagataccaatacatgccctgcatctattccctctccacaacaaaacaccacagatattgcccctgttccattaatcccaactgttactgttccattaatcccatcttctatcccctctaaccaaaataatatctcagaaataccac

SEQ ID NO: 3882 - DNA, 766 bp, Cannabis sativa
gggtgtacgttaaatttaacttaagctgggtatgggttacgacgaaagtagttttcaggcttttaagcattagaaatcaaagtccagaatcataaagcctacactacgtacgtacgaactgttcattttccttttattgggtctaaaactgggcccagggcccacattaaaagtaccaaaagtaggcccaaaagtacatactatactatacaggattatacagcccagtaagtaaagaagcccaatacgttccgtttgactattgattgaccatttttctttgtataaaataaagcctccagagctatctgggaacgccacgttccagagtggtcgagtcagtccgacacagcaagcactgtgtagtaaaagccacgtttaattcttcttcttcttcttctttccatttccatttaatattatctctctctctttctcaactttttaccttctttgtgtacaaattttggagccatcttttgggtcttttggagaatattcagagatatgggtgatgcagtgtttgaattccccgagaacggtgacggtgataatcgggaaaatagcagaagagggattcagagtcagagtcggagtcagagtctcgtaatagatatataccctttgagtagctactattttgggtcgaaagaggcaattctctccaaggatgagaccatggctgatcgtgttcggagattaaaatccaagtattattatgctctcctttacttattaattgggtttctttttttttttttattaa

SEQ ID NO: 3883 - DNA, 1266 bp, Cannabis sativa
aaaatataaaatttgaaaaatatcactaactaactaattgtaagatgctacttataaaagttactcagcaccactaataatcactgtcaacccacttcagagtaatataaaagaaaattatcaatcctcccaaaaagaagaaaagaaaagaaaaaaagtaataaaaggcctaactgtcacctcgtaaacataagtaagaatgtaggtgggttgtaacggaataagagtagttggttggtgcatatgagaatgagatgagagaatgtgagttggtttgctttggcggctttcgcctgcttttcacaacaactgtcaccacctcctcacctcactctaactcctcccaaaatactatacctttttcgtctttactttacatttatctcttctttattattattgttgtcttttacttctcttccttgtaaacttcatcctcaatccaattccaatctactacttgtttattaagtaatcttgccccactcccccaataaccaaagcttcaatccttccttcattcttcaaattatatattatgtcttcttttcatggggatttcggacctttcttaattcaattgtatgtccacttaatctaaacattattctttaattggtgcacaaagcttatccaaactgcggcgcaaaagttcattataattaattaaaacataaacaaatatacaaatttaaaaatgtaaagacttcttattaactaatcagaatataccatcttaatacaatgtacctactacctaagcagctcattcattcatgatcaaggatcatgactctttattttagttataccatgatgtactaatcacacttatcacgtgagcacgtgccgccatatgggcagagaaataaaccaattaatgagatgttaagctaagtaattaaacgccggccacaactaaccaagttgtcaaatctatttcccttttgacacgtggatctctcttaacaagggtaaaaaggactagtaaagacggcgaccgcccaatcatcaaaaaagccaaaaacatgtcaaattttcatttttcattttatctatttattttcacggctgctttttcgttaagctaactaacaccaaacactttgcataaattttagaagcctctgtatatactaatactatatatatagattgggcatcacagggtccaaaaaccataacccaccaccaacggtccattaccaaacttttactctctaaacttaatttaacttctctccttatggattggaccaggggccg

SEQ ID NO: 3884 - DNA, 802 bp, Cannabis sativa
atatatatttatataaccaagtcacattatacatacatgcttctgtgtttgtctagtcatcaacttaattacattagcaaatatatcaaattaaaactgtaaaattggatatctttccaaacttgaagactatgcattaactccaaaccctacataaaaagaagaccaatgtcccattaatcttcacccaaagaaaaaaagaacacaagagtttatacctatcaacaaaaacacctttatattttctattaagttttctctcttcttctctcttattctcacttgttcttattcatggagggatttggtgctcaccctttttcatctaggatcccgaggctgatctccgcagccgagaacgaactgcatatgaagaacatgggggaaaggtatgatgatggtgattctaagactgttgtctttgtgcctgcatattataataatttcggaaaacaaccttcttttgagctagatctgaagctgtcgccgccgtcacctatgtcgacgacgacagctgaaggtagtggaagcagcaacagtgattcaagaaagaaagaactaaatctcatcagttctctctcttcgaaccctgttcctgcttcactacttccggcttacaatgaacaaggtaatagaattttcccttgcaattattgcaagagagaattcccgacctctcaagccttgggtggtcaccaaaacgctcataaacatgagcgtctcatggcgaaaagacgccaagggaatgatgaaggtcatgataagcttgggccttatggtgggccttatggcgggccttatg

SEQ ID NO: 3885 - DNA, 703 bp, Cannabis sativa
cgtgtagaaggtgttgtcttgtcaccactggcatcgtcaacctaaagatcctagttataaattttgggggtggttctgttctgtcaatatttttctttagtttaggagaacctcaaacttgttctagtctataatggctgagttaagaaaaacttccgagtcagtggaagagaaacctaaatcacacatggaaccatcttcaaaaaggggcaggggattgataatcgaagggtacccagttgagggtttgtccattggagggcatgaaacttgcataatctttccaactctcaagttggccttcgatattggacgatgtcctcaacgtgccatctctcaggacttcgtcttcatttcccatgctcatatggaccacattgtaagaccctttttcttattctttgagaaactcttaacactttttatttgtttgaagttgtagttgggtttcgttcttactttgctacaagtgtttttcctgaatatgtagtgatattctggcttaggacccttcctgatggggtttggattttatttatttattattcccaccctgttatttatgacaaattaatgtatcaaatatcatgtttttgaagttttactatgctccaatgttaggtccagagttgtagtagcatccataattattgaatgtatatttgaaaagtagctgaaaagttttgtttcgagatcagggagc

SEQ ID NO: 3886 - DNA, 1673 bp, Cannabis sativa
cttgaagaagtagttgaacttggagagttttcctcttcacaaaataactcaatcccaatatttctgaaatggggttttgatcttcttgttgaaaatttcaagcttggtgattttgagaacttgattgatctcaatttcttcacatgtgatctggtcttgttgctgtcctgttcctctgacaacagctgatcagattcaaatttttcatcacaaaaatcagtaaaaatctcaactttttcctctgtaatcattttaattcttcttcttcgaattgggttttcttcaaaattgtaaattttggtgaagtagaaagaaaacaaaccaaagatttaaaactggtcttttttgtataaaacaataatataaacactatgaaagcttttttgtggtgactcaaaagtttgatttttaaaagcaaaaaaaaaaaaaaaaacagagttaagactttgatttattgacttggacaaacaaatgcagctcaactagacttggtcatattttagtttggttgtctcaatcatataaatatccttcttacaaaagagactctttttatacttttaacccaaaaaaaaaaattgaaaagtcaatagaaattcccattttcattaaagtaattacatgggtctttttcattttatttttctttatatttttccacagatgggtagtagtgaagaaattatgcataaatgagggtagtgattacttacatgttagaaccacaatttctttctttctttctctaagatgatgatgatgatgttgttagggttttgggggccactttaatgagagttggacaccactatttgagattctcttcttctatttcacttaacaaaaaccaaaataatgacttggaagaacaactatttttctctctctctcatgttcatctttgtcatgaaataattataataaataatataaaaattcaaactaatgaacatatcagagagattttaaaattggattctctttttgaataatgatacgttatatttatgtattatattcattattcatgtatggtatgtacttttagtaaacgcataatgagagagttgtcttttcctttttttgttgttttgtaaattttgtatagtagtaattagggttgtatttggtaggattttttttaatagcctaataatatttataatcaattaattgtttaatagtatctggtgggattatattgtatattttctaactcaatgtaaatattaagttataaaatttaagtataatttgtttaatttggtcggattagtcggttcaaattgatttaatgtgtttattttttttaatttcaaaataaataaaatttcaacccataaaacattatgagaggtcaaggtcattattaattttttcaatttaatttgaataaattattcaagttaaaaatgtctatagagtcttagtagtagtagtgagtaaacccaccaacccttttagatgacagtgtgttagattttggacactatttagtatttagttagggagggacacgtggcaccgacttataattatgaaagtgtgtttggtggaaaaacaaaagacttattatcaaaaaacgcgttgaggaaaatgggacccaatagtggggaccatagtagtgctcctcctcctagtggttatgtctttggctataataataataattt

SEQ ID NO: 3887 - DNA, 1299 bp, Cannabis sativa
tcaacactcctttgagttactgtttatggtggaaaacaaaaaatattacttattaattaattattaaaatgataattatatatattaagcttccttttaaactagaaaaaaaaattctaatattagagcacttacataagatatgttttaaaatataaattctttaaaatattttttttaaaaaataaataaattaaaaacacgctacaaatattatgaattcattctctattttaatgtttcttcatgttttatattgttttaagaatattatttattgttctaaacttattttattaattgtttgagattttacatttttttttatttttttatacgaggatatgtataaatagtaatattatatgtttgaaatgaataaaatttgaaaaaaaaaaaagtgattttggagatgtattttaaagaagatgtacaatgtaatgtaaaagtttaaggtaaaatagagattagcaaatttttttagaaaattacttcatatattatttttatttttttaatttaagggtttgaattgttatggtaatatctatacatgttgttatttagattttgattgcgatttaaattgtttcatttgttgctatgtgaattatgtgaaaatgcaaaataaaaaattattttaaagtgtaaaaataaaaataaaaatcttttttttttttgtattgttattgtatattagtggtacccaacattttttataaataacactctataattaattaataatactttttaaaaattattatagatttaatacttaattatatcgatataatactgaaaaagtactgaggtaatataatatcttttgagatatatattttttttcaatatgtagtttttgatgacgtggcttccacaaaaaacccttgtgacagctgcaaagtgacttgactatataattaagacaatgtctccatagtcaaattgaaatttattattatcttttagatatatattattattatttcattaaataattctctattttctttacatttcattcaatgactaaacatatacttaaattagaatgaaaaaattattaattaccatatttttttaactaatattgctaatcatgtatattatatgataataatatatataaagttatgtgtgtgttttttttttgtagaaaaacaaatctaatttatttatttattttggaaaaaaaatatactactttcgttctaagatggactcatatagtattaaacattaagacatatatatgtatgtatatatcttttccattattaaccgaacattaaattt

SEQ ID NO: 3888 - DNA, 516 bp, Cannabis sativa
aaagaagaagatgaaaaaaaaaaacattgtattgagtgaaggagagtgtactcaatttatcacttctaaatactcattttatccataaaatggaaccaaaaattaaaaacaagaagacttgtaatgtaaagtaagtcttatagacattgccaaaggtttgtagttgcccttacttttgttgaagaactctcttcatttaaccttccatttctctatattgattccttccattgtcgttttggtggttggggtgacaaaacgacaaccatcagcatcagcagcagccactccaaattccattggaaccttaaacttacccaaaatcataaactgaagatgatcgcaaatgagaataatagattaaagaaacaaacaaacaaaaaaaactgaactttctttaagtgttggaaaggtgatgagcttggtcattatagtgcccctttttgtagctgtagggatggtggtaggaggatcttctaagcatatacttgccaagcacaactttttcatttttta

SEQ ID NO: 3889 - DNA, 528 bp, Cannabis sativa
acacagttgttggtgcaggtatgaattgtcttgtctctgttatattgatgagatgaattgaaattttaaagaatgttttgtaggatggaatgacctctgtaattgaagaataatgcgtgtactgggactgttcattgtttagtttaattgaataatggaatgataataattctaatagaatacagtttccttattcagtagaaataagtttccaatcctccaagaaatctttctccattcctgaagtaattaaaaattaaatacacttaacttctcacctttctatttctcgctctcaaatttaagtgtaaggtcggttgaaaggagatactgttttcgtcattacaccatttgtcccattttattcttacatcaaaccaaataacacaatatttgtttcaatattgattccaacttttttccgaaaaatccaattattattccttattccattttattactatttttaatctatttcaccaaatcgaaagcaattgtagttaatagttatatgtttggtgttaagct

SEQ ID NO: 3890 - DNA, 2065 bp, Cannabis sativa
attattattatcattattattttctttttgcttatggtacattacataattattaatagtaataacaaacaagaataatgaggtgtctaattcttaagctacattgtaccaaatattagcttattaaacaaccaattatatggtaaagctttcattgttataaaaagaatcgttctgtctctatacatgtacgttggtaggtaccctctcctttatgagaaaatatcacaaattttctatacaccataaaccctcttattctcgaggtgaattaaaagtagttttaatttagtgcactttgaatcagctatatgtatataattttccactagtgcaatatctataaaaaacaaaaggccaggtgtttggtctattatactacatatatatgctcctatattaagtgactaaaatcctcttctgttattgacaaatggtccccttaatagaacatttttagtttgtggcaaaatcaatacatgaagaaaataaatgttccaaattatccatattatctttaacttaaacctcgacacccaactttcaataataccatatctaaagttgatttgattatatggctagtgcgagtagttaattaattaatcatactctacatatatttttataaaacacgactcttaatgttgtgtggcagataaaaagttatcccttttaaataatataatataatgatactttcttttatatgatttacatcaaattacagtacagtagtaaatagtatatttgttataaatggagaaaatctgtcaaccaaatataaactctttaaaagctagaatatatttattatgaaaaatataaaaattaaatctaaagcttagtcagaaacaaccatatcaataatccaccaaagttaatttaatttccaatatatgtttttagtgtaaattgcctatgcctttcatagttcatcaatgtctttagtgtcgttttcaatgtaagttgagttcaactccaaaattaatggttaaaaagctatagacgagaaagaaaggaaagcaagtaacaatgacaataggaccattcacaacacttatttgctggtttaagaaaacatatgttgtcacaacaatttttttttttaaagttccatcatgacaactatgtatcctatattataattttctatcttttattttgaaatgatgacatgttttcaaaaaaaatattttagtcacaccccttttccccattagtgtatcaaagccaaatctccatctccttttttattttttataattgggtagattacatatatttgttgccaaaatatataatgcttgccagacaagcagaaattaaaccaatgaaatatataggatggtcccaaaatggatataattagtagtacctaatgtttttttcaataattaactttcaccaaaaattacaattaattcattatataggtgaaaaaagaaatcatatacatacacagacagtacgaactaattaataccatttacacagaattaaaatgaataaaaattttcctaccaaataatttcctaaaaaagaaaaattataagatactttgaacttttatatgaagtggtaaagaaaaaaaaaagatacaacctatgctctgctactaatgttgttgtatgaaattctaaaaaagcttaaacttgaatcggctttactgttgcatcttcaatagaatgatgattatgtgacccatttaccccaccaacaacgatagatccattttgattttcttctactctcttaacaattccaaattttgccaatagtgtagaacaccaatcccataaatttaacacagcataggtactgattcctccgatcagcccataagcaatcgagtaagtcaacggtgttaaaatcaacgtaatgaaagctgggatggcttctctcatgtcttcccaattaatatcctttactgatttcatcatcaaaacacccaccaaaatcaacggtggtcccactgcccaagccggtatagaagccaataacggcgtaaaaaagaaggctaacagaaagtaaccacccgccgtgatcgccgtcagtcccgttc

SEQ ID NO: 3891 - DNA, 1918 bp, Cannabis sativa
ttttttttttttttttaattaaagaactttttgaaagataagattgaaaaatagattttataaaataatttaaaaaccaaacataaataaataaataaaaataaatgtaaaaagatgtcaaatttgacatgttactaggcggggaggaaacatatagtaaaggaacattatttaagagcattggagtttggagggaagagagaaaagaccgccaatattacgaaaatgccggtggctagacctgaatcatccgactccagggtcattgctcacgtcgacatggattgcttctacgttcaaggtcccaatctctctttctctttgtgtgtatcttttcttccttatcatgtatgccttttgtgggtcctgtaggatttatggggtcatctgtgagttcaaaatgactaaattttgcctagttttagtcgatgcccatgtgtccatgtgagattttttgcgtgtaatttagtatacaaactcatttgtttatttgcatttaaaaatgctgattttggggacgattttcgacaacaagaatgacatataccgctatattctgattacagtgatacttgttctgtttttagttgttgaagtttggaatttgaaattgttaataaaaagacagcttttagctgtatgttatgttgttgagagagaaagagagatttttgttttagcttcataaaatttgctatcagaagaaggatttgtcaaattggtttgagaggtgatttttctaagttgaattaggatccttgtttattctcttattaggaataattaggaagaacgtggacatttctgaacataaattgcctaataaattataaagcaaatcaaaccctagaaaaccgaactgagtttttttggagaaactacttgcaaagtgttagaatttaggataagatgtgcatctcaaaaccaattggtaattagagaagtaactcatgattttatatattttattagcttttcacagtttagcaatgtgggactgtctaacacagacaattttttttccgaatcttgcatgtgtagttttaagtcccaatataaatgatgttattaagtctcacacctgtagatgctgcatgcgccttcatcatatggtgaactttacatctttaaaatctgtcagcttcatttcccattcaacaaatcctaatggtcaatgaattttgaagtcatggcagattttacttatcttaattctaatgactggtggaatttattggaacaagttcctcctttcttactacacaaagttccatttcttaaggtttagacttgactttcagcccgtgctgtcttgaagttgagcttgcaattatatttttctaaaggtccttatatgacattggaatgtttgaaatcttatgatcagagttgaataatgtggttttacttctcttttttgagaggacctgatgatagggtaattctgtaattgcaataaacacacttatatatatgtaaacttaaaatatgtatatatatgtgtaatcatagtactaatctaatttgtaccatttgtaatcttctaatttgtttcattcctaatcttcaatactaaaatttttcctcttgtattattcataaacacttacaaaactactttgatatttatttgatttcttcaagttcataagggttgggattattgtattgtcctttaactagtgtttcggccaatcatgtgagtattttgataatgggattgtagcttgaacaaatgtgtgtgttagaatcccacattgactatgtataagattggttagtagtatctggttagctcatacatgggcatctcccctcttaggttagtttttgggggtgagttctacttaagtggttgtgtcaagtggtattagagtcatgcaccgtcaagtgagaccgatgttgcagaaggggcgac

SEQ ID NO: 3892 - DNA, 1443 bp, Cannabis sativa
gatttttttcatgaacctataattcttttactttgaaaccatattcattttctttcttagcaggctactaaaatcaaaattcagcatagcaaccaagaggtttttgtcaggattgggttattaggacagctttcgtgggtgaatgtgactggattgttagtaaggataagcaggttgacagactattatataaatgtggagtgggggtgagagaaggggcataaaatgtgagactgaattgtggtgatctttgagctctagggaaatctctgagctctagggagattccaggtccctcaaagaatctcggttatctgtttcaaatatgaattcactcgaatgtggactaccatattgaagcaaaacaataaaaagagaaattttaaaggaacaaatttcacaaaattaagttttttcatgtggcacagatcaactagagagacagcaagagagtttcgtcgtagctaccttttgtttttgagtttcacaacagtataatgactcacgaaccagaggataaattgcattgacaaattcctcaagcattcctttttctttgtatatatggcaaatctttagttttactttttcgtgtagccaccatggtttagatttctcagaatgttgaacagtgtgatctgcagatacaagcaaagagagaatacacaataaatatggtatttattgttggaaaacaaaaacagtaagacataccaatttatttgaaaggaaaaaaaaaaagaatgatacctaaattacttgggggagatagcaacaaaattgcttcagcaactctactatcttcaagaagaagggaagccaaggtcaaccgagcatcaatattgtcctcaagcgtgtttagagctgaattgaaagttattaattacaaaacaaagtagaaaatagtaaataatttgttcaaatataaacactgagaatttttgccacaaacatctatttaagaaaatatcacgaagaaagatcttctggcatgacccaaaagaaaaatgtatcatctgcctatgttctttcagtttgtaaaattgataccttatatgctactcacaactcaaaagagagaccactacctttcttgaagaacaaaattgcttggaccctattcttcaaggataagtaacaatgggcaatttttagatgtaaagatccctacaagaaaaaataaaatttaaaatgtgttcttatacgataattaataagatcaagcaaaattttacaaaaaaaaaaattgataaaggtgtgagattaaatttgtagggtcatccaatccaatccacaaaagagttaattacattatatcctcggtagtatgcttatttttcaaaaattgcacagatattatactatcctccatataaattattatcttttgtccgccatatgtcccaactctcttcatatgctatttgtattagtcgctaagag

SEQ ID NO: 3893 - DNA, 878 bp, Cannabis sativa
ttcccccgtagccaagatggtcacattcaaacttttacttgccattgctactatcaaacaatggcacactcttcaactcgacgtcaacaacgctttcctcaacggggatcttaatgaggaagtctacatgcagctcccaaaaggtcttatcctaccgcctcacaccagtgaagacaacaaccttgtttgcaaattgaacaagtctatatacggacttaagcaatcatccaggcaatggtaccgcaaactctcagatgctttaattcaagaaggtttcaccccttcccaagcagattacactctctttacaagaggcaaagatgacactttcattgctcttcttgtctatgtagacgatatcatcttgacaggccccaatctgcactcctacaacaactacaaacaactctaaatgacagattttctttaaaggctctcgggaatctcaaatacttcttgggctttaaaattgctcgaggaactgaaggccttgttctatctcaacgaaaatatacactccaattacttgaagacaatggatatatgagtagcaagcctgccaagactcctatggatccaaaacttaaacttgatgatcagcaaggcaaaccacttaatgatccttctcagtaccgccaactcatcggcaaaatgttgtatcttaccttgtcaagacctgacatcacctttgctgtaaactgcctaagccaatttatggcttctcctcgcacaccgcacctacaagcagcccaccaccttctcagatatttaaaaggaagtccaggccaaggtattttctactcaacaaaatcctcattacatcttcgtggtttttcggattccgacttggtctcttgtcccaccacaaggcgttccac

SEQ ID NO: 3894 - DNA, 735 bp, Cannabis sativa
acctgggcactgggccttgactactacaaaaaggattttgatgacactctttagtaacccgtataaaagtacgtgtcactaaagggttagggatgagttttagtgacatctacaaaaggactctaaaaattaattgttagtgtcttataatttgggtcactaaggggtcactaaaaactaattcttacaatttcttttatttttttaataaacgtgtcccaaaccacctagcacgtaactatatcataaccatgaaagaaattttttagcaaaataatatatgtttaatttttttataagtatacgtaacggtacactttactgacttattgcttttttttttaatcaccttattgccttcaataaatgtaattaataagtaaattaaaaaaaaaatatagataggttattttatttagtaaaccctacattacaattagtaaaaatatacccagcgtcgatctctcaacttctttctttttttttcttttcttttgagatctgatctctcaactccatcttcactcctagtatttagatcaaaaaaattccatcttcacgacgactccatgcacaaaaacctctccaagaccactgccgtcgtcggagttgaaaggcaaaagtgacccccatcggcggatgacgcaccttgaaaccccaaaaatctcaaagcctctttgcctagctcagccacaccgactgcacatctgagatttgacatatcttcaactattt

SEQ ID NO: 3895 - DNA, 608 bp, Cannabis sativa
tagccaccattctgattgaaactattaatgttgcgtttgcctctagtattcttgctactggaggattggctggcactactagtgttggcctagacattcagcaagtcttgggtttgtacaacacactgagactgcctattgttaacttgatctcctgtctgggcttgtatgacagtttaccctagttttatgatattgtctgcttattcgaggaactccttcgtgttatgtgttgagatcctctagttagctttctagatgtcactcaatggaaggatccccctagtatggttgtataacaaccttcttctgttaggcctttgaccttggtggcctcagccatagacctttggatataatccttcaaaggtttcccttgtcattgtttgacctctataaggtcttccaactataatggtatcagactcgggcatgagaattgtgtgtagaattctcaggaaaattcattccacggattgaatcatcctagacctaacttgaagtaccattgctgagttatttccaacagtgttgctggaaagatccgacatcgcacatcacgagtaactttctaaggatttgtttgtatctcgaagtacttgatgtgt

SEQ ID NO: 3896 - DNA, 945 bp, Cannabis sativa
ttcaaagatggatataagaataatatatagagagaatgtcaacaagaatcatcttcccatggctatagtagatatattagtttctgccccttgatcgatcctaatatctatcatgaaccagccaatcctttttcttttttttcttttttcccttttaactaactttgtaatgctttttcttgtatcgtttgactgcccataatggaatatattctgtaatttgttgaaggaagttggaccatttaacatttataatgtgtacattgtcctcaacataagtccttatagtaaatctataataataaagaaaaaaagaagttaaaagttatagtgtttattatgttactaaattaaaatataattaatttttattattttaagtcttttcttttgacatagtgagaaagtctctgtttttttggtgttaagttttgtattgctcgttttcttgttttgtttctatggcctcgagtaattctttaatccaagaaatggaagatcgttatgcagatgttacgaagataatgggaatttgggagttaattttgttgttccaaaagattaggtgcttgatgattatctatgtattgttggccattagcttaatgcaagagccattaattttgaggttacgagacatgtgatggcttctctttggcaacgaggcaagggagtgtatgttaaagaacttgaaacaaattgttacatttttcaattttatcacgagattgatttagaggaggttgtggaaggaagtcttcggacttttaatcgtattcaatttgtgtttcagtgactaaaaagaggtgaggatcttaagaggataattttcaacaaccttgatatgtgggttcaaattcatggacttcaaatgaggtttaaatctgctcatgttgttgaaaagttggaaaactttgttggtacgtttgtgaaggttgatcctaa

SEQ ID NO: 3897 - DNA, 785 bp, Cannabis sativa
gacaccctctgtaaatcaaatttcataacctcgagctccgactgaagtgttgtcgtaacatctcaaatcttttgtcccaagcttcattgttagcatttctctttggatacatggaagatcagtgcattgataccaatttgataagaatgtccctgcaaatgtaccgagatggtagacagatagtagtttcgggcactaactttattctattgttgctggtgtatcacaactcagtacaccctaaagctactatagcctaactctaataactaacctgctgcttcactcttctcagctgctgacctggcagtatttccgttctttttgactctccttgagtgcctactcaagggaggcttatcatatcgatgtcacagtttatatttatcgaaatattaaattgaagattctctctccttttatggtgactttcgtcacaactaagcattacaatatttaattggcttacttatatcttgatctaccatcaaggtgccattgagctgtcaatattagctgaacactatggacgtgagatcgcggcttatgatatccaaaacacacgatgtgatttgtacggacaggtgagcatttgaataggattttacttttacatatatcgaaaccttgtcagcttgccatgctattactggagcgtttcttacttagttcatgtggaataatctatttgacaggaaatgaggtactctgagcgggtcatgctgatctatgatggacttcactatgatgctttagctgtacgtatagaattcagtttattttat

SEQ ID NO: 3898 - DNA, 3630 bp, Cannabis sativa
atcaatagagacctgtctttttttggcatgaatatgtttttttcatgtgtaagaatttgccaaacggatagtctaggcagaagccaaattcttcaaatattatctttccatatcccctgacgagagtggaatgaacttctagggctcttttaattgctttaaccctttggtttttgtatttgacaattattttagcattattgggaaatgtagggatgataagcgataagttggccatgtagattagtgggattggattcttagtgtgtgagtttatgtgaataatgtatattagggtgttggtaaataaattatataatttatgatttatttaatctacatattgtaagatggagatgagttacaactatataatgttaggaataatagaaagtattccaattccccttcaggattaatatttgcagaaaaatacaatggggatttcaaaattcttttctgatgagaaagatcagtcatagcttcaatcacagagcatatttaaaattttaaaatattttctaatgtaaatagtacattacgaataataattaaagcactaaatgcaaaccaaaaaattatctcgtggaaaataaaaattacagtaaatctttcactataacaatagtaatgggtacacaatattacactctcaagttttgacaaatacttgatgaatacactcaaaactctcacactccctagcacggtaatctcaccatctctctacaaaagatttctcacaatttggtaggaactctctttttcctctctcttagatttctctcacttagatgtattctctcaagagcctcactcttcactcttggaatagctcgtgatggttgtgatgtgataaacaaatgaaagcgatgaagctctatttataggcctccttagatgtatgaacaagatacaaaatatcaatcttgcatgaaatgcgtagttgaatatatgcatatccctcaagtaaaaaaactaccattgtaatattcacatggttgaaaaatacaatcccatttttatatggttgaaaatcaactattacctatcaaatctcctcctttttcaatccatgaggaagaattggtcttatgtcttcattatcgagaactcatccgagcaagcttggaacacaactcaagcttatgccgaggaatcacctttgttagcatatctgctacattttttttgtatgaattttttgcacttagaataacttcttttcaagttcctcacgagttaaatgatatataatatcaatgtgctttgttctatagtggtaagtagtattcttgcttaggtcaatcacaatttgactttcgcaatgaatcacgtacatttcttgctttaaatccaattcttggagaaaattctttagccataacattccttttccagattctgtaagagcgatatgctctgcttctatggtagataaagcaacacatttttgtaacttggactgccatgacacaactccctctacaaaagtaaacatatatccacatgtagactttctaccatcaagatcgccgaccatatctgcatcttcatatccttccaagattggttctcctttctcgaagattggttctccctctcagatatttgaagatccattttacagcttcccaatgctgcttgcctagatttgcatacatcaagcatccaactattgaagagtaaggaatagctaacatcttcctcttttcttttttaagaaggacatgacttcttagtgagtttgaactggccaccaagtggagaagaaactcgctttgcatctttcatgttgaacctctcaagtattcattcaaatagttctcctgttactaaccataaccttcaagaaggcctatcacgaatgatttccattcttaggattttttttgttgcccccaagtctttcatatcaaagactcctgatgattctttcttcagtagatttatcatcttacaatcctaaccgactattaacatatcattgacatatagtaataatatgacaaatttctcattagaaaatttcttgatgtagacacacgaatctgcaactaatctcttatagcttcaatccaccatgaatgaatcaaacttcctataccattgtcgtggagcatgatttagaccatacaaactcttacgcagtctacagacaagatggtcttttcctttcacctcaaaaccttcaggttgctgcatatatatatttcttctttgaaatctccatgaagaaatatagtctttacatccatatactcaatctcaagatctagactttctgctagtccaaagattattttgattgatgacattttcaccactaacaaaaatatttcattgaaattgatccctttcttttgaccgaaacccttgacaactaatcaggctttgtactttaccaggtttccatgcccatcatcctttaatctaaagatccatttgttccttagggccttcctaccttttggaagtttcaccaattcataggtgttgttcttcgtaagggaattcatctcctcatccatagaatctatccacttgtcttcctctttatgagccaatgcttcatggtagttctctggctcccccttttcagttaaaatgatatactctgactgtagatatcttttggatggaattagtcctctagtcgaccttttgcgagattgctcattttttggttgctagtactgctccccttgattaatatcttcttatgttggtacatcttcttcaacattagtatcatcaccatgggacatctcagcaacttattataatttatcatctgaccattgttgttatggaggaaacaactcaattttagccttttttggttctctttccttcactcgtgctttcaattgtttaatcttcataaaagaccacacctttgcttcttatgaccttcttgtaactggatcccaaagcctatacctgaattcttcatctccatagccgatgaagatgcatggaactactttatcgtcaagtttggactttttttcctttggtacgtgcacaaatgttctgcatccaaacagcttaagatgtgagtatgacacatcttttcttgtccatgctctttttggaatataaacttcaaaggaactgataaggatctgttgatcagataacatgcatctgaccctttctacaatggtgtgattcatttgttctgctacaccattatgttgaggagttccaagtattgtcattttatgatgaatcccatgtttagagcaataatttctaaactcatgagaagtatattagcctctatttctgttctgaggaactttaatttcttcccagtttctctttcaaatatcatgaaattgttgaaaaaaacccaaacacttgatcctttgtctttagcatatagacccacacctttcttgatgcatcatctatgaaagttacaaaatacctggctcctcccaaggattcaacttctgtgggaccacaaacgtcagagtaaactggctctactacctcctttttcttagcagaggaactcataaacgaaactttatgttgctttccaaataagcaatgctcataaggatctgatataatatttttctccaaaggatcgaacttcttctttgtgagtagttgcaa

SEQ ID NO: 3899 - DNA, 560 bp, Cannabis sativa
gtttaatttttcttcttttgtagcatattgaggtgaacaagctaattaaaggaagaccgcttgataatttggaatttatgcaatggatgaagcgctactgcgattccgtcaatggaggtggaagtcataggtatgaaaaataagcaattaatgtgaattttggcttggaatttctttattcaaattgttatgttcttgcaaactgtgtgtagatatatattttatcgggtaatttgtacatttggtattttcgtatacttttttgagtggtgtgtaatttttgtgctcttgagtaaaatgaatttagcaaatgtagtcatatttcatgtactttaatggggtagtgtgtaacttttgtattcaatttgataagagaatgaacttttagagtgctgagcttatgaacttaaatatgaatgtactatgatgaatgattgtatattgtttctattagttacaatccattggaaaggagagaagcttcaaagggaggaaaagaagcaagtaagaaaggtgcacaatcacagacctcatctaaaggcggttcggctgcctctaaa

SEQ ID NO: 3900 - DNA, 1116 bp, Cannabis sativa
gatggttcattactgaacctaaacaaagatttcaaagagttgacatcaaagttgaatatagtggattcaaagctaaaagaggtcagctttctccttctataaactcccatctgtttaccttattatctttttgtatacaactgtattgttggatgtcattttgagcaagttttgattgaatatgatcattctttctctcaggctgaacttactatcttgaagctaacagaagagaaaagcaagaacatcaaagagagagaaatgcttaagcatgaattggtaagaattatcttgagcgagtcaagtacttttaataataatgttacatttctcccatgttttcaagtttcttagtatattgcttctttttttggcaggagatgttgaagaggaagaacaacaagaaagatgttcaagtaggattcccccttttctttgtttttatggttgccctcgtcggtttggtggccgggtacttcgttcatccataggagaataactaaggtgttgagtgacttggtctctcatccataggagaataactaaggtgttgagtgacttggtctctcatccataggagaataactaaggtattgagtgacttggtctctcattcatagagttgtttggtttttaattgtatttgatcttgtaatatatggattctcttctaatttgtaatgtgcagctaaaataaaagaaaagtttagcctatttgtcacggaattgctctttctttttactgatactatcatgttttatataatttagcaggataataatatttagtattgaatcaacatttcatgattactgtcacttaattttgaaattgaatgtggtatgtgaattcttaaaaattaattctccaaaaaaaagggatcaccaagaaaaaagttaaaactatctcattcattgaagttttctataagactccttgaaactctacaattctttacggtattagagctattttgaccatgttaatggactcgtcttctaacccaccaacaactgtagttttggtagcggaaccggccccttcggcaaccaacacaaatcaacaatagaatcatttctcaaactcactcacttcatctttaactattaaactcg

SEQ ID NO: 3901 - DNA, 1713 bp, Cannabis sativa
taataccccaaaaaaaaaatgcattagaaatatttacataaaaaattacttaagcctaggcccatataatatattttgaagataaaaaaaaaataactcatgtaataataagcactcttatataaatatataattttttttattatcaataatcatatttatttaaaatctgtaatattttagtaacatatataattatatagtaataacatatcattatcatttatatagcgaggatttccaataaaaattaaatttgcaataaacatatatatatcctaatataattaattcctgattcaatttaaaactgaaaaccaatttaaaatcttaattaataattaatgcgatcacctatttaattatttcaaaatttaaaaattattagctagatcaaattttgcctataaattacactagctaagttttgagatttcacaacacatttcaaaaaataacaattagcttattattattataatctaattttatacttattcttcttcttctattttatcaatatgtcttccaagcacaacatgactatcatccttcttatggtgttcttaattttctccttgggtaactataatttctattcatatatatatatttatatatatatagtatatacacacataaatattcatctatctttcttcatattatatatgtaattttttttatcattttctataaatatatacatatatagttataacatgtttatatgttatgacaatttttcatcacttctcttcattccaatatagtagtaatcttgttatgaattgattttattatatatattttttgtaataataaccataccatctatttatttatttatttatttataaaatatataatgttatatgattagcattaacaatttcttcctccaatttattatatataaaaataggtaaatattcttttaaaccatgtgttacaaaagttataagtcaaattttgtatttttcaaaatggtacaaaataaattttgatctttaatttgaaagtgctatgacaataatgattatattttttttatctgttcttgctacaaactagtttcaagttagttatattttaaaaaaatattaaaattgagctcagaatctatttagtgccgagcttgagttaaggtgaattaggctcgctttctagggcacactccaactcagggttcaaaagaatattttcttttaaaaatatatatatgttttagtagtttttatatatatttaaattaaaggtcctaataaatatatattatttatatatatatataattaatatgtgtattatattggttttgtaggagttgaagaagtaagaggagcagattgtgtatatattgatcgaaaatgtcgagagaaaaaagaatgtggggcaccttgcaaagctaaaaattacagtgaatttaatgttgaatgtgttcttgatccatctaagtcaccttctgattctccatattgttgttgtttagttgatcaaatttaattatttccacctgtaataaccatcacgtaatatattgaataaaattactactttctttctacttatgtattttttaattaattgcattcatgagttttaaataacaattttataaaaaataaacaataatgttatttatatattagaaaaacaattgttatttattgttataaatgttttttattttgagaaaattgaataatttca

SEQ ID NO: 3902 - DNA, 1111 bp, Cannabis sativa
ctaactcttttattgcaaattgaaataatgcaacgactataatagatttctagcaaataaatttattaaaataatagataccgttgtatacttcctttaaaaattaaaagattccattgatgaatgaaaacacaagcttacacaaatgtgattagtttgcaatgtttgtcatagagatgcttggtgcaactaggccgggtggttattttcttgacaaaatgtttgataatatgagtacgcctgcatatttgctcagtatcttttcctcttataattgcttttatcagtaattttcttatttaattttatttggttggttgtcatttttgtatttttgttgctgtaggagtttgaggaattgtagcttacaaggtcctattccgaatttgagcaggataccaaagctgggttatttgtaagttcagttactgtgttttctttccaaagtacttacaaactagtgattagtacaacttcaagagatgcaagcttctttataataaatcacttctttatagatttccttcaaaatttcagggacctcagttcaaatcagctaaatggaacgataccacctgataaactttctaatgatatcacaactatgtaagattctcaatcaaatcatatgatatctgtatctctaacatcttctttcaatttctcatatactaaatttggatgttctctaagaaccctttccaatatttggatgatcctttacctcatttgccaaaacgtttatcacatttattaatgtctagaatctgtcaaacaattgcagcgatttatcgaacaacaatcttattggaactattccaaacatcttttctgggcttcctaatctccaaaaattgtgagtgattttcaacccatttatttatttgatggtatactagtcctgtaggcagttaatatattacaaacccaacttaattttgatggtttatcacttttgacattatagttgccacagttattatataatgaaatcatgccttgtggcaggtctgttgcaaacaatacattaaacggcactgttccatccacaatttggcgtgataggagtctcaattcaacagaaagacttgtattgtaagccctgaaatga

SEQ ID NO: 3903 - DNA, 636 bp, Cannabis sativa
tttaggatgcggcccactcttacaaacagaaaaacgagcacagagttcgaaaccgagggagatcaggaagacaaaaacaccgcggtgctaatgggatgggtacttagattcttcactacactataaattaccattcttcttacttgaaaaaaaaaaagattaaacaatctgacattctgtatctcactttcttctctcaggtcatggaaatagttggtcggctagtcatccacatgaacctccaaagccaccacctggaccaagaatgcccgatggaactcggggattcacgatcggacgtggccgtcctccaatttctgatcaaagttaaccaacaagaacaaaacaaatgcagaacacacacacacacacacactctttcactctctctgtgtctataatatagactatataaatgttattattgtctataatccattttcagttgtatttgttgtggaatgtgttagaatttggaggtttgtaatatctatgtttggcatggcttttctggtttgtaatcttatcactcttgtatgatattcctctttaatggtatctattaattcagacaacattagttacctatttttatttctatttaaaatttgtggttttgagtattaaaataaattt

SEQ ID NO: 3904 - DNA, 1267 bp, Cannabis sativa
tttttattatttttttaatttttacggattgggttgctccaataattattatataaaaaaattactttgaaatataaaattgaaaaaaaaaaccctataattatttcttattaatatttcttttatcagtgaaatttattattccaaaaaaatcaatttacatcctattagcatcttcatcctattagcatcttcatcgaagatctgttttccttctatctatacaatccttgaataataatgtataactatgcaacaattaatcaaatgttttgagttacaagtttgaaaaccaataagtatcaattagtttgacatttttgggcgagttataaattgctcttcttttcacatttcttattaatattatatgatgattaggttgttcaggttttgtttaggtttttttttcttttttcttttaatagaagtgacttatatttttatatattttttttgagttacacaccagtgattcgatctcatgactttcttatacttttttttttgagctagcctcaagtggttagattttgtttagggtttatagtaggaaattaatggccaaaatttttgaaaaatattacattttttaaataaactaaatattacagaaatattattgtatatctaataggcaaaagtattgctatttttttttatggaaagggtattgctatttacaagctttcaaaccatgctatattttcttaattttcaaggccttatatcttggatcctacgtttaatatcagtcttaattttctttataattaaaaaaatttataaaataaatcaaaaatttgaaaaagttcacaaaaatagtttaacaagattttttttttatttttactctttaaacttttttatttacgaaaatacttcttcagtaaaaacaatataatctcttttttttttttcaatatagcttacttatagttgttgtgatgttatttttttcattgttttatagtttatttatggttgatttatagctgtcgtagggttaatttctagttgttttcttaatttttattgagtaaagtgtatttttgtaaataaaaactttaggtcgtaaaattataataaatataaaataatatttttttaaaaatttcccttataattttttttttatatataaatcagcttattagattgtaatgcattacttcagcttccatttacaacctactagcacatttttaaggcctgcatatacaccaatttaacaagaaaaaactgcttataacttttcaaaccaatc

SEQ ID NO: 3905 - DNA, 658 bp, Cannabis sativa
aaagaaaaaacggaacgtgttggagccagcattagcaccatcagtaggttccaccttaacccgtgttttccacaggtttgagcaagtttgctcaacctcctttgcattaaaggctcttgaggagagaattttgccaataaggcaaagcttagatagcacatttgtagtcaccacgctaggggcaagggaaatggaaacctcatttaaggagaggcacctaccctgcttactactagccgaaccaacaacctcttccatagtcataaatactcaacaccccacgaatcccaccaacaaacaaccaaccccccaataactaaaaaaccgttgaccccttcccaacaagaacagtaagcaaataccaccaaggaaacaaaagtcaaaatgacaccaaccccccaactagaaacaacgagagacaaacaagaccgacagaatctcacaggtcaaaagcaaggggaccaaagaaagacacaaagaaacgaaaagtaggaaaagaaaaaaggttggaccttgagagagaatagtagaagacatactctctatgagttatttactttcagtaacaattttattacaagccattattggtagacgatttaagtaaataaaatgttacatctccccattaaataaataaaaataaaatgttacatct

SEQ ID NO: 3906 - DNA, 981 bp, Cannabis sativa
tattattattatttattgtctgtccaagatattattttaaggttactactccttttgcaattcttacaatagtttcttatttcatggctacatacacacccatgaaagacaaaaatgaaaatgaaagcaagaattacaaaaattaataaataataaaagaaagaattgattagcagatcagattttttattttattttattattattattttttatttcagcactcttggcgcacattagaggccacagctcgagcccaaaacttaatatgggccttcatgtcttcaccagaagatttcctgaaagcccaacttggaggaggaggaggtggtggtgggctataactttgggccaaccatgcctcagaaagataaggccttcttaccttattttctaggcccatattatcctcttcattcttttcttgcaaacctggaattatattaaccacactagggttttttaacttatcaaatgtgaagcccaaatccttaaatccttgcacttcttcaatttcaaggtcacttaggcttcttctcatattttttccattttggtatcttcttctcatttctcttgatccatctgtattgttataaaaaccttccaatattgtgttttttggtgtcctatttcttgatgaatttccctacaaaatccaaatattaagacttagaaaaatgtaacatattgtaacaaaattgcaagataatttttcactcgtttcacgtttagagagaacgatcgtacaagttattgattacgtttaggtctgagcctgagctaaggcaggctaggcctgtgcccaaacacaccaattacctctacgctttagataaaccccaaataaaaaaaaaaatcttagacccactttttttcaaggtcggccctgatttacgttaaacggtcatgtaaaaagataattactcgagcgatcatgaaagctaatgtgcaaataaaattgatatttttatataaatt

SEQ ID NO: 3907 - DNA, 963 bp, Cannabis sativa
atgcttacgtaccgtgtgtcatgcaaaataagctcatacttttcgtgccatatcgtgcctaaacacatatgttttacgtaccggattgtgttcgtgccaattttgatcatgtcgtgacaaaaaccggcccatgtttaccccactactcaaaaggaagaaataaactaaaactcaacatttttttcgtgttatttaaaaaaaattctaaaagtgacataaacggccaattagtgtttttcttcttctttagtttgaaaacaagaaattagggtttgcgcatgcacaagttttattcagtgccagctcaaatgatttatatatatatatatatactagattaaccgttacgtgcaaatgcacgtatatttgattttatttttaagttatgtattttgatttttaaaataaaaagtaaatttaacttaaatattatctaaagttttaagaaatactcacagtgacatagaatgtgtcacacatcaaaataaacttaacttgaaatgatgtggtgatttcagaagtttaaaatcatactacaacttactcataatttcttctcatttttgtaacaaatcttaatcgtggcagctttcaaatgtagataggttacattgataacaaagagtgaaaaataatatttccaatttctcttgtcactcaaaatttgtaaaccatttctgtataaccaagttctttaagtatgccaaaaacctgcaagaaaaaaaaaagatcaatgaactcgtaaaagtgtaatatcaataacttttgtgtggtaaacagacataacaaccaccactcaaacgcaagaagcataaatatggtcattatacctctctttctgaccagtcttgccacatacctgcacaagtaagaaaagtatctgcatacatgatatacatgtattttttatgtataataaatatttatcttcaaacttgtacatttatataaaaagttgcatca

SEQ ID NO: 3908 - DNA, 1304 bp, Cannabis sativa
caactcttgacacaaggtcttttgaagaagaaagatagacatcaaacacactgggatactagtcgccactacccgaataagggtagaccgaccttcatgagagagaagcttacatttccacccttctattctagcacaaagtcgatccttaatgaacttaaaatccctcaccttgctcttcgaccaaaggatcagatttctcaagatttaatctcactattcatgctacagaagccaagaatatttgcaatcttaaacttcctctattggctagcatttttggagaacacataagtcgaaattttgacattcagtctctgtctagaccacaaaaagtaagtatcaatacactcttggacaacaacgatttcctctttgtccggccttatagaatataaaagtctcaccagcatacaccaattgagaaatagaggggctaagtcggtgtaccttaaaactcgtaatctggccctgttcttctttctacataaggagccttgaaagagccttactacacagaatgaaaagatacgatgagataggatcaacttgtcgaatccctctcttaggagagaactgtctgagggcgccaccattaagtaggattaaaatagagaccgtcctaacacaagtcaaaaccagttgtataaagtgtgtcccaaatccataagcacgcagaatttgctccaaaatgtcccatttaatatggtcataaggccttcgacatatccagctttaaactcacaaaacactctcgacctttttgcttcttaaaggaatccataatttcatgggctatgatggaatttttcgctatccatctaccaaggacgaaggccaattatgttggcaaaattaactcagttagtaggggctttagtctattcgccagtagttttgagataatcttgtaggtgaaattgcataggcttataggcctgtaatcatcaaaacaattagctcccatcctcttcgggatgagctccataaacgtttgatttagctccttaaccatctcaccggtttcaaagaacttgacaaccatagcaacaacatcattacctacagtctcccagtgatctttaaaaaaatttcccggcataccattcagactcggggccttaagaaggggaatagaccacacaacttccttaatttttgaagttgtggggatgcggacaagctccaaatcgatctcattcgagattatgggatgaatcaagttctcaagggggtctaggaggggaggaggatgatagcaaagagataaagttagagcaaaaatactcaccaaccgaatgtct

SEQ ID NO: 3909 - DNA, 1832 bp, Cannabis sativa
gcaagtaaaagaagcatactccacagaatggaatagaagcggtaccagcatgaggacctccaatggatacaaaatttttcacctgaaaaatatataatgaacaatagatcatacttaaaatcccagaaaataagcatgaactaagtttcaacatgaattggtggaaataagtgtcaacaatacaagtaagaaaaaggaaagtaaggacaatctgaagggcaagttcaagaaaaattttggcttcacaactttagcacggtatgtggcaaatggcaatgaattatctttacatctgcatagctaagccccgtctagtaatgcttgaacaaaggtagcacatccatttaaaagaaaagatacaagtagccaagaagagaatggaatttcaaatattgacaaggcaaaacaaagcaaatatatatggattgttaaatcaagctcttacaggaggtcctccatcacaaacttcaattacacctcgaccaatcaaatttccctgagaaacataataaatgcacattatatttacatactagcatgtgtaaaagacgtttaatgaaaacatcaacacagatgaatgcaagagctcatgctatatactccagaataacgaattagactgatacaggataatattaacaacattgctgcataagatgaaggagttaatgtgaagtggcaaaaccatatgtttacaacaattttaaatcacctgtgaaagtccaactatgttgtatccatcactcaattcactcatgttcttcacctgtaaaatgaaatcaaaatttgggaggtaagaaaatatacattaattcttagagtggaaaaaggaaaaaaaaaaacaatgtatcagcaaaccattttaccaccttctcacaaacaatagacgtctgcaaagagaaggacaattatccattgttagtttataagattgaaaatgacaaacaaaaacatccaattttgtataatcaaatttaagattcacttgttcaaacagcggcattgtccaggaatcccaagagccatctccaatttctctgcaggcatagtaccgattctcttcattaaatcatataaagaggaatagggttgttatataaacaaaagtttaatactgaaaaggcttacaagcagtatccttgagaactggaccagttgctaaggagctcagtgaaatgtgtaattcctttattgctgcatttatccccaatgcctataaagacatgtatgaaaagaatctcaataaatcaagcacaactttcatacatgtactgacacaaatattctaatcccaatctacaaattaaagaaaagggcatggggaaagcgccccagcatattagaaaactagttttaaagtttaaaacaagattatgcaagttaacaactatgtcactttggcatatattatcctggaaagcttgttccaaacatgttttccattacaacagaagccaacaaacaaagaagaagtaggcaacaattaatgaaaaacaaaaaacaaaacaaagagtcaaaacgttgagtaaaataaataaataaaagaggtaagattctgaattcaatctaactgtagaattggaataaagggtattgactagaattgagaaaaatagtatgattaattagaaaggtgagaatttcacttaccatgcaaaacaatgaaaggaacagagtgagtgaggggaatgataaagacaaagataaataggatggtttgtattggaagagaacccattgatgttgaaagaagacttttgttgaagaagtagtgagattttagacaaatttgagatttaagtttctactagatctttggcaacacagaaact

SEQ ID NO: 3910 - DNA, 1561 bp, Cannabis sativa
acaatgtatcactttattacacatacataatctcatcccatgtgctataagatgtggttgattttaacttcaattccccttttggtatatgtggattcatacaaatttcactttgcatgttcatgttatttttataacaataaatattagtcatgctctagctgtgatttaacaacttctcaattagttaaagttggcaagtgttacaagtcatttaacaatgtagttcttagctcatacttgctcatgatttttagatatttactttgacttatttatttaaaaaaacgttttttaaattttaaataagataagaatgctatatgaccctatttaatgacaaagtttaggaatatttttccaaaagttcatattgttataattaagttgtaatttattgtagaataaaaattattttttgtgaaaccatttttgaaacgggtaagtctatagtacactccctaaaatagtgttttaatagattttttatctgtttcagcatctagaaaagtttttagttcaattttttttttcataatcgtgtttgttatagtttttaagactaaattttcagaaaattcgagtagtttacaatgccaaagataagatttacatattttattacatgcacgattatttttttttttatacgtgtggtaaacaatttttttttttttgtttgtaagagtaaccattacatgttagagaaaaaatgccgaaagacaaaagtggcgagattctttccatccaaaaaaactaattatttattctaagggaatgctaaatcaatacgtgggctaaaacattaacgttacataaaaaaagataaatccccaaaaaaaactaaacaataaaactttaatataaaaaaaaattctcgaaatatgtgataaccaccaacatgtctacaaaagaaagtatatcagtatcaaattgtataaataataaaatatgaaatttttattataatgttataactataacttatctgtaaattttattgtaaggagcataactatcatatttgattttttcttagaccaaaagatttttttttataagtttttgtattttagaatgactaagtgagtgaaataaatcacatctatataaatatataaaatttaatcaacccactacttcatagtaatattaaattaaaataaaatttttcatttaaaagttgataagcattccaaaatattattttatgaagagaaaaactaatctttgctatcacgtacgtgaagtggatggtgtgttattgatatctcacaccattaagaataattcttaagataaactaaaaacaaactactatatatggtaccaaataagccacatgatcacaaaaacattctactatacatgtacaaaataagacacaataggcacaaaaaccaatcacaaaattcatggtataaaataattttcagtatacactataatgtaaaattaaaaattaaataatcaattaaaccttctttaataaggaaaaatcaaagcttgattaaaagcaataaggaaagagaaactacattaacatatataatagtaataa

SEQ ID NO: 3911 - DNA, 1574 bp, Cannabis sativa
tttcaatgcaaaagaaatcaacagcttaaagggggaaaggatacttgctcgaggaagaaggaagttgtgggggtggcaagatttgtagcagtgcaaccatagcaagatctctgacactgcgataaagtttagcctgaaattcgtacgcccacacaagttgtttattgatctctacttgaatatttagtggcctcaataaatttggaaggttcgttgtcaagtctggtggtaatgctcttattttttctctcgctcaatctcgaagaagaagactaaggcagtcgtcaaaaggattggacattcactaggggtgaagtttggatttttctctctcaaaatatttaaactcgatatgcaaaataagctaaagtagaaattgtgtttcttcaccctatctataagtgaaaaatgtcgatatgcgtacttccatgattaaatgcatggtttttttttttttttgaatcattagtagggaattcttttttaattttaagaacagaaaatgtaaatttgctcacctaatttttcttttaattttaatatattatacttatttgaaaatatcgtcttacattgattaaatgtaaaaatattgatccttatacaagaacgtgatcgtgttactctatttattatcaattagttttgagatggaatctcataattcttgtcatggtatcataatcatatccctagcaggcttttgatatacacttatctagatagtaaaacagccgcacgagattcatggtccaaagacacttgaatccgacaaaaataagcaagcaaatagcactcccagacgtgaacaaaaataaacgagcaaatgacactaaaattaaacataaaaatatgaatgaaaatgagaatgagaataggaatataattaaataaaacttaaaatgcctaaaaaaataataaaaaaattattaaaattttttcttcttgcattggaatcgaccattcaatctatttcaaaatgaaatggtcattctactaaaatgatagaaaaattattctattgaaatgacattttaaaactttaaaatgtaactcaataaaaaaatagaataattttttttttattcaaatacattacctctaactaaataccatctaataaatgtagaagaagcagaaaaaaatcttaaaaaaatacaaggaaggagacaaagaaaagttaccccgatcgaaaaccatggccactctcttagttaggttagttaattatcccctagtttcatgatttatatcagattgcgtacttaattacaatacaacataccatatattggcccatagtatataaaacgctgggctatttaaaatggtgtccagtgtagattaaaaaacacacactagaaattaaatgagttaaatgtttaaaaatttgagcattggtttcatttaaaataaaactgatcatcaaccgaacagttcctctcttgtataggttattttgccaattattgccgtcattaattaattcatttgagttttacaatcatataaatatgtctgacatgcaacactatagtatagatacatgcatgtgtgattaaaacacatgtatg

SEQ ID NO: 3912 - DNA, 645 bp, Cannabis sativa
tttttgaatttgtcattttgaattacatctgcatgctatgtcttgggatgaaattagggtttgttgattgtgcgattgtcatcgtagctagatttagggtttcttaaatttcccattttgtaagcccccgacttgatcgatttaagctgagaatgtttacaaattcttctatttgtctaaaatcccttaggtgttggggtttatttttaatttttgtcatctccttgcccacgtcattccagacttcctatctggaacaagtaactcttgaaagttctcatttctaggtagagagtccagttgggacctctccaaatagtttatggaggaggaccccatctccctttctatgttaggtagttagggtagctaacttggaattccttatcctatagggacgccacatgtgtggttttataaactagtttagtactaataaaataactaattattaaaatttgtgataagattaaaaacttaagtaaaattaaactctaaaaatagacattgaaaggatactaaatctatgtttcggggatccccattgtaaaagttttacagaaaagctaaatacaacaacaagccataacactaaatacaaatacttggcagatacaaccgaaaaacaactcctagaaactcgac

SEQ ID NO: 3913 - DNA, 1890 bp, Cannabis sativa
atttgaaggcctgggatcgactttgccgcctgaagtcaaggggtggcctaggtttccggaagtcactagaaatgaataaagatctgcttgctaagtggggatgggccctcttgaacgaagatcaatcgttgtgctgtaaggtgctaaaagctaaatatctgagaaacacatcattcttcgagtgtgcttataagaattctgactcttggttttggaagattgtgaagaaaaccaaagagatccttcagaaaggtgcttgtaaaatgatttcagatgggaaagagactaatgtctggactaatccttgggttatccacgaacaggatttttaccctaaggccatttcttctagggtgcagggaattagaaaggtggcagagttactattagaaaatggggactggaacatccctaaacttcaatctctgtttaatcttgaaactatttgtgacattattaagaatggtaaacctagtgacaaaggcagagataggtggatgtggacaaaggagccaagtgggttattcttgacaaagtctgcctatcttatccaagctttagaaagagctcccacctgctttgtgggccctgctcggtggaacaagctttggaactccaaaatcctagagcatcataaggtcctctggtggtgcattctctccgacactctgcctatctaagccatcctcggtaagagaatcaaggttgaagaggtctcttgtccaatttatggggagagtgaggaatcgatggaacacttgttcatttattgtaactttgcctatcatctctggagatcttctccttatggcattatgcatgtttctaactctggcgctcgtgtttgggactgggtgacttctatttggaatttgaagtcaaaaggggtggatactgataagttattcctctatgcgtcaattgtggtggacactatttggagggctcgcaacaagaaggttcataataatttcatgggtaacattaaacactttattgattctatctctatttgttacacagattatgcatcttgcttgtttgtcccgacattagttgttgtgcctcctgtttggtccccctctcctgttgattggattaaaattaattgtgatatcaaagttggtagtagctccatgtgtgtggtggccttagcaagggatcatacatggtctattttgtaggtagcagttaacaggttcaatttctcagatctgcttattggagaagctgcagcgtgtactctagctttggagacagtaggtatgatgaagcacctttttgttctagttgagagtgattccgagaaggttatcaatgctctaaagggagttcactccacttggagtattgataattatattcaaatatgtaaacaactctctgctcttttgttaaattgtaattttttgcttattcctagactttgtaatttcgcaacccacaatgttgctaagtgggctttcgcgaatcatgtaaccggtatagttaaactctcttctatatcaaattttatcttttgtaatgatcgtgaggtctaactggtttctctttatttataaacttctacttttcaaaaaaaaaaagaattgtaatcacaagggacaagtctaaaaggatggttatgttatctcaaaaaaaggtatgttcagaaaatcctgaagaaatttggttttgaagactgcatatcaatttttacaccaattggtcaacagtatagattatcaaacacacaagctccctccaaccaagatgaagaagcttactggagaaaataccctacactagcattataagaagtgtaatgtacctaatggtttgtactagaccaaatatttaccatggggtcaatatgataagcaaatttatgggagcgacaagcagttaagt

SEQ ID NO: 3914 - DNA, 776 bp, Cannabis sativa
cattcttaaaggctcacaatattatctctatcttcacaggtctatatatacattctttcttccttaatttttttacttaattagtacatttctgatttgcatggcattattattttttatatatatataggaagcagatgtagtaccgatcttattttatcgtattataaattattctataataaattgagttcgaccactaatatgttgatctgttcttgaatagttacttagggtatggcttgttagctgctcgagctggaattttaaatgtcactggagattctggaagtccatgagtgaaatgctaaaggatatttatagggcatcgcgcacagcttataatatgttatatatatattattagtggtaatttaatatcgagtcaaatttattattattatttctacttttattaaccaacaaactcagctactaaataaggtagcaaattaattgaaacatcctccaactgaaaggtacaaacaagataaaataggaaagcttttgcaaaagcatgaacaaccttatttattatggtttatagtaaaaaaaaaaaggaatgtttctcaacataaagcaaagatctacaatcactaataatgtgactaaataaggaaaagaaatcatattgaatgaacttctgagagcttgaactacaccaaggcgatttgtctccacactagcttgctgccattctttaaatttgatccatctaaacttttccatgacccccaagtagactccgccctgaaaatatatgggcataaggcgaa

SEQ ID NO: 3915 - DNA, 843 bp, Cannabis sativa
gtttggtggagagaggtgtcgtgcgcatccatgttggcacagagaatatcagagaatatggtgttggataaaaatacagtttccttttgctgcgagtactcctcaggcctgacgttggggacacacctctgacttggtaggatcctgtatctagatgccatgtaggatgatttccagacgcttctagatgtctcttcactcgcccgtttggattgccttatgaggatatctagatacgtcttgatgggtccttcatcttttgggcaagatagtctttcccgaactaaagtagttaagccttgtttggccttatcgttcgtgcaatttggacttgcgtctggacccaaagtcgtagcctgaacctattatgggttgagttattaacttgattaggcccataaatgagcccgtcttggctaatgttgagtgtttctagttcacgtgccattaatcacaaaacacgaatgacaaaataaaaacaccaatacatggctaaattaaaattttggtgcatgtgtttataaaagaagaaatagtcaacatatgaatattgtatggacttcgaaaatgataaaaaaaggatgtggtcattatgatttttttttaataaaaggatgcattaaaaattaaaccatatcgtttcaaattacatccaacaaagataaaggcattgtagcagtcgagaaactacaaccaacataaaatcacaaagttcgagccaaatgatgagctacacgatttgcgaatcatttaacaaaataaatatagacattgtgctaatcaaaaataaaacgcttgcactccaagatagaacacccaaaggctgaatgcatctccaaagag

SEQ ID NO: 3916 - DNA, 548 bp, Cannabis sativa
cagaatggtgctccttggtgttcactttaagatgaccatcccaatgctctaccagttgacgttgcaatgttgaaagccaaacctttttctgggtaactatccttgcaaacagagcatattcttgatgagcattaacatttgaagagtcattatccacaatagcaaacactgatctttcatcatcggttaagagtcatttaaagattcatgcttgtttatggataaagggatccatgaaatggagaacaaggagaagttgagatcgaagaagaaagtgggaaaaatgggaaaaaaaaaaactggaaaaaattgaagtaaaacccaaagtgacgataattgcctcagaggaaagggtagacgaattataagaatatttttttttaaatcccctagaagagtccataaaataatacagttattaccatatgaatattttatttttttaaaaagtataaatatatcatttcaaaaaataaaaaataaataaataataataaaattacggttgtaacaaaattctaaattaaatatatttaatgactagaata

SEQ ID NO: 3917 - DNA, 909 bp, Cannabis sativa
tatatatatatatgatatatatagctttcaagtaaaaagttacatttctcatccaacataatttttttttaattaattaaaaaaacagaaagaataaacagaaatgtaacttttgatagataataatattaacatagccatgaaattattgaatattggtatcaacttggagacaaaagatgatgtaaatagataaataaatataaagtaatattctaaaagtaaagatttgttttgatcatttgttatgaataacatttataatatatttatttgtttggaatatttttaactagaaaatatattattatatatattagaaatttgaatatacaattgcaaatattaagtatatttcttcttaaaattggttgtcagttcttgtattatataattattaataaatattaaaaaattatgagtactttccggccaaaactcctcatgttttatttttatacaatttttttgactttttttttggcaatatgatcccttatgtagaaaatggtggaaaatttaattttttttgtctaattattgttatctatcagttttttcgggccacaacgtttgaatgttcaaaattttgcctatatctgctctaataatgcaagccaaagcattcaacaggagatcgtagatcgtcttgattttcataagctcaataaggaggataaattttttgggaactcgatcatttggtggaagagtaaggtgaaagatttcaagtttattaaggagaagatttgttctgagatagaaagttggtgttttgttgatgtcatctatcttttcactttagagagtaacattttattgcatgtttttacttgatgtcatttggtatcgttagcaaaaatttcttatgttgagattgattctgaggttgtagttgataaaattata

SEQ ID NO: 3918 - DNA, 1434 bp, Cannabis sativa
ggatataaactttatgatctgaatagcaaacaaattttcatctctagaaatgttattttccacgaacacatttatccttttaaaactctcaatactgatcataatgttattgacccgttttctaatatggtgtttccctctcctattatttctaacactcctataagtgattttcctacagatatacatttaaatgacaacacagatgacaacatgcaggaacctatcacagaaaccatcgatacttcagcatctgtacctgttgatcacaataccgatcctccaacaactgaagtacccttaagaagaacatccaggcagagcaaaccactagcatacttaaaggactatgaatgccattctatcctataggatcaaaaatccacacctcatcctctaagtaagcttatttcctatgataaactttcagatactcatagagcctttattcttgctgtcacagctctctttgaaccaagaaactacaaacaagctcggcaacataaaatctggaatcaagccatgcaaactgaattgtacgcacttttgaagaacaaaacatggacttacgtcaaacttccaccaaacaaaagggcaattggatgccgttgggtatacaaaataaaatataacagtgatgggagtgttgaaagatgaaaagcaagactagttgcacaaggtttttctcagcaagagggccttgatttttttgacactttctctccagtagccaagatggtaacctttaagctattgcttgctatatcagctattcaaaactggcacacactacagatagacatcaacaacgcgttcctaaatggggatcttaacgaagaagtgtacatggtcctcccacctggtttatctctcgggaatacagtagacaatgactccactctagtctgcaagttgaacaaatccatttacggtttgaagcagtcatctagacaatggtataaaaagctttcggatgctctcatcatggagggattccaacaatctcaagctgattatacattgtttactaagggttcaggcaataatttcattgctctgctagtatatgtcgacgatataatcatcgcaggccccaacaaccaacttcttcaccaacttcaggactctcttcataaccagttcaaactaaaggctttgggaccccttaagtattttctgggtttcgaaatcgcacggtcaccagaaggcattttcttatctcaacgaaaatacacacttcaacttctcactgatactggtttcacaggtagcaaacctgccaaaacaccaatggatccgaaagcaagacttgatgacacagaaggaacaacccttgaagacccttctgcctacagacaacttgttggcagagttctatatctcacattatctcgccccgacatcacatacgctgtcaacatactcagccaattc

SEQ ID NO: 3919 - DNA, 908 bp, Cannabis sativa
ctatgttgatcttcgtgtggttggtcccattatctggatcccttaatgtgccctctttttgtggaaaagtgaacttatcactttcaaagaggaaaaaaacaaaatagtattttatattccaatcaagatatggggatgtttcattattaatgcaaaaggaagataatgtatatttaccaatcttagttttagctcttaaactccaaaatattttcctgttttaatgataatccttctcaatttgtagtcagaagctgggaagaagcttccgtttatacttgtcatcaatctccaggtatgtaaatgctttaattgtgttgcttgacatttattatggatttatattatattatcaagtatttgcttttctgctttctaaggcgataacaatttttgtttactagtttcatagttgcctacataaattttttcttcgtaagtaataagaattttaaaatatgaaggttactttttccactttggtgtttaaaataaattattttgaattgttattttttttaggtccttatagcttacgaattctgatttgtaaatggcttacgggatcaatttttcaatacttaatcaaaatttctgaattatatacttatagttctagaaataataagataattttatagattcaaacaatgctctaagagtggtagttttctaattacatgagagagaaataataattttttttgtatctattcattgttcagaataatatttgaaaaatattgtttaagaaagtattataatgctagactcaaaaacaaattaatttgtcaaaagtttcaaacaaggtgttttatttttctaaagtgatacgtcacgacccaagtatcaccactaatctcgagtcacttaaaatggttccagtagctagatattctcaacatttt

SEQ ID NO: 3920 - DNA, 1072 bp, Cannabis sativa
aattcctactccaacaacattctaaaaagtaaaatttagctcatactaaaaatttacatattatactaaatttgacctacaatacattcaattttctttttcattcaataataattaaaaaatatctcaagtgttgttatgctataaaaagattatcaaatttaggatacacaataagattcattccaaagtgcacggggtgaaaccatctgatttttttccacccgactaggacctcattggcctggctctaggcttagtcagggttctgattagtagggttagttgattatttttattgaccttgtttttagctaacaacaatgaatcaattaaaaaatagtaaataatactaattaagcaataagagcatgaatttgttatagaggttcgacctcatgatagtgataataacttacttctcttttacttgtattaacttgtgagaaaagaagtaagaagttattgatattcctcgaaagcttttacagagattttaatagcgtaagcgctctattgaatgaataatttttggatccctaaatagtaaaatgactctactatttatagaaaagaattatatctatttggtttctcaaaaccattaagaaataaaatggaaaacttgtatattttcctaaattacatcatttacgtgtagaaattctattaaaattgggatttaattgataaataaaagagagaagtatctctaaagatattttacttgtatttatctttgttgttgtatgcgagcttgttgtgagatcaacgttggtcaggcagtgccatttatctcgtccggatattccagcttattcttttaattaattgtttacaaatgataaatcactttagacgatacatcatggagtacactgcctgtctaagtcatgatatatttttcaggtgtcgctccaatagatgctacgtcacatggtgcaaattttgggataatatttttcccccaagtccgtgtgaaaactctttgctcacacgtggacttattcgacaacttagttggtcagatgagtgacacatgttaagtccctattgttggaaatattttacc

SEQ ID NO: 3921 - DNA, 1513 bp, Cannabis sativa
gatggggtatatatcatgtaatgtgtaccatcctgcaaatattaaaactgtgacataaaatgtcgggagaaaataaatacacgttaagcttatttatctatggccattaccaatcagagtttattacaatttgtcatatatataattccaaagggtagtctcttctggtgcattagcatgccaaagaaactaaaccattagagaaagctaaatattaaagttatatttgataaaagtaaactctgccatctactggtgatgatgctaacaaatgctttaaactctgaagttccaatgttgcaaaatatgtatttgtacaacttttagagaaacaaatttaacagaacttaaatgaattttctttctgttttctagaaatatatatttacattgacatagaaaataactcattgagaaaaaggatttaatcaggcataactagttttttcaagaaagagtcgcacacaaaaaaaaaaaagagcttgtttttctactaagaaaataaacatgagaaaagaaaattgaaaaggatcgtatagtttattaccaaatggaaacatgtaatttctacaccctcagttggtaagccatctacatcttgaccgtcatctgcaagacagtgagaatcaattaacagctaacattaaatgatattatatagtatccgtacagaaaaataccagtttccccacttattagtccatgtgggttaaggtaccaaatatgaggtccttaaaagtaaaagaaaaataaataaataaaataactgaattcagcaagaatggcagtatttggcatcatctatctcgaacgatgtaaaagaaggatattttagaactctcagatttctgtttttctacagtgatttttttcttttataaaaagaaaatttggttcttacgtgggataccagatatttgagatgtttgagggttttgctgtttaaggatttcctgaagttccctcctaattttcttgtgagggttttgtgtgaaattctgaaatgtgatgtcagtttagtaagcttttccttttagagaacacctggtcaactcatctagtcttgttatatattcatttatcttttgaattttctcaacatgtaaggaaaacatttaaacagtaaaagaggcatacaatactttaaaaaagttttacaagagagtacaaacaaataaaaactggcattgcctgtgcgaaaatcaaatatatcatcttccgagtagcaaaaccctcctcgtgctgtatagcagaatctgcaaaacaggtaacgaataaaaattccttctcacatattttaaggatgaaaaaaaaaacaagatgaaagatgtcaatatacatcaaaactaagctcatcaattacatcctacccgctatgtactaaatgcatatgaatctttgcgagggcataatcagcagagggaagaattgcttcaacttctccatcgcttacctaaaatgtaacccaaagtaagcaataaagtcaaatattctgaaaacgatatatgcatat

SEQ ID NO: 3922 - DNA, 2059 bp, Cannabis sativa
ttttttcttttgtttttaaaatctttgggttttaactttaattttcttgtgttgacagtatatataggatttttcgcatccttgcatttttttaaaaaaaaattgatacaagacagctttgtttttttctgaaaaaaaaaaaagaaaaaaacttctttaatttcctctgtaaatactccaattgtttttcttcttgtttggctctgaaagcactcactggcctagcagagtaccaaactttgattgtcaaagtttgggattttgaagattaatttctgtgtcttttgcgcttgttgggctgctgccctggccttccagtaaagaagtttactatttgcgtctcagcagattttatcataatacaaggagaacaaacatttcttcttcttcttcttttttttttttttgattaaagaataaacatttcttcataaacatgttgttttgcttctctagggctttaaatgcatattaaacatagtttgggcaaaaacagcacaagcacccttgtatttatgacttggtgatttttatttcgtgtcatataaccatgtttgcagtttaattctcaaaatccatctgtcccctctcaagctggtctgggacttggagttcagaattcaggcattggacctgttacttcttccacgctgcaacagcagcagacgagttccatccatcaaccatctaatccatccgtgttggtttctagtggcacaaaagaatccggtaacttagcttttttattcaccttatattctataagattagagtatagtcagcatgctgattagattagtgattatgtatatttatcgtttcttgctattttcttggggaaacaatattatgattgttaatttatctaatgctaaaaaaaagttgttggtgtgctcttgtttttattgagtaggaatggaagggttctagagggatatcaaaaaaggaatttgaactaaaaagtagtgctccatttgtgattattttactgtggttgctaataatatttgcaagagctgtctagattaacttcacatattcgggttgtgcctagatatattttaagattttaaaactgtaccaaagtttaagttcctccatttttttttttaaagtcacaaactatagagcaccaccagactggttgagtatttgttctgtttgatgcagaacttggccatgcaaaagttgatgagcagcagcaacagaatttacctgacgattcagccgttgattctactgctgcaagttctgggattgcaaagaatcttatgaatgaggatgacatgaaagctccatatgcgattgattctccggtatgttttgctaaataaaactgtttagatctatattttctttgatgatcaacattttttctactaggaaatgaggtcaaaatttgatttcttttttttacctctatattttctttaaagggcatacattgtttctattaggaaatgaggacaaaaattcttttataattctaaaagaaatcaggatttcttttaattcattacatatcattaagtggtgttcttagagctattcacagttcatgctcttctctcctatagtgtaacactttctcatgttccaagagaagctattgttatagtttacaatttctctaagagagctttaggaatggctgtattccttccttactttctttgggtacttaacattacccgttcatttgtgaatctttttcttcaaatatttgaaaaaattatttcgtgctatgctgggatagaggcttatttattgtctagttgaccttcatgatggcttggtctgtgtagacaggagtttctggctccttaacagagccagctcaagggccaagagatattgatctctctcctggacaacctttacaggccaatcaatcttccggtagcttaggtgttattggtagaagaagcgtttctgatctgggtgccattggtgacaacattaccgggtcaactgcaatgtccggggcattgcatgaccaatcatataatgttcagatgcttgaagctgcttattacaaacttccacaacccaaagattc

SEQ ID NO: 3923 - DNA, 1482 bp, Cannabis sativa
caaagagaagtggagaaattggattaccttgtctcaaacctctctttgcctcaaagaacccatgcaaggagccatatatcatcaaggagaatcttggtgttcgaatacaagtcatactcaacttgatgaaattgacagggaatttgaaagcatgaagcatctcctctataaattcccactcaatggtatcatatgcctttttaaggtccaacttgatcatacaattaggcttgcttgatttccttccataatgtcgaataagatcttgacatatcattatatagtcgccaataaatcttccttgcacaaatccaccttggtattgtgccaccgattgaggatcaatcattttaagtcttgagcaaattagcttgatggcagctttatataacacattacagcatgcaatgggtcgataatcactcactctgttaggacacttatttttgggacaagagtcaacactgtagagttaagctcctttagcagttgtccagtgtgcaggaaggaagtaatagcctcatatatatctttgccaatcatttcccaattatcccaaaacaatcctttagccaatgcaagttacttttctgctacaaaaaaaaatggtaattgtctagtgcagcagcataagcaatccttggtgtcagttcttgttgctgtatatcaaagtttaaaggatcctttctgagattatcttgacaacaatccaagaaatccttggctttcattgttgccataggtatgtcagcaaaatgctgctggtttagagccttgaaaacatgctttaggttccttagcttcaaaacaaactggtacatatttgtaccattgacctgctgagaccacacttcagcaacatcttctgcatatttaggatgagttacccacatcctaaaatatctaaatggctttttgctcccctagttcaaattatctactattaaataagcaggggaatgatcaaagataccttcattttggaaatgaacttctgcagtaggaaaattgtcaaaccaacattgatttgctaaaactctatcaatcttggagtatatcctatcttctccttgcttgttactccatgtaaagaagttacacgtgaacttaacatcttcaagctgacaagtttctacacaatctttgaagtttgaggaaaccttgaatcgaacccggttgccaattctctcatccttattgaggatgtcattaaaatccctaagaacaagccatgaatccttgacagccagctcccttgagtccctccaaagagtccttcttccatcctcagtgttaaatccatagatgaaggtgacaaaaaattttgctttcttatccatggtttcaacaaagaggtgaattaattgacttgaacactttaaaatattgacagaaaaactattagggttccaactattatctacctcccttatgccacacacaattgggagtgaagcaccaccccgaaaatatttgaacata

SEQ ID NO: 3924 - DNA, 646 bp, Cannabis sativa
tgtgttatcatttgagattcatttggtcatgttaaggcttctggggtgttataagcctcaagagatggaagtaaaaactttatttcatgatttgcgataggcgagaatttgaatgtatctatggtggacacagattttataattcttgctaactcacttaatgtttaatgccacatcattcttcgtttaaagatttaattgtagatgttatatatcaattattctattttttttttacaatttgtgtttcttttgttcaacatgattcaaatcaagccgctcatggatattagctaaataaatttagtgttagatattgattatacttggattgagaaaattctctcaattatagaaatgactctctttaatctataataatagactttttttaaaaaaatctcgataaatagttatcaacttattaattatcatatattaatattatactagtcattatattgttaatatgataaaatcctggaggtttaatttaattaattggataaattaatacataattaacaattctctataaaagtcgctttgccaaaatattgtgtatttaaaaaataataataaattgtctttccacgtaccgacatggaattattatttgtatataaaagtgacctaaactcttaaa

SEQ ID NO: 3925 - DNA, 741 bp, Cannabis sativa
ctagttaacaaaacaaatgtatttcgaatacaaatgtagatttaagttaccaaaacattttttcaagtgtgaacgtatttggaatgttgaggatttgttgtcggagaggaaagcttattgtgctagctatctgacctggttagagcatctctaatagtgtcaaaaaggtggtgcatgactatattttagcactggtaagaaaaattataccttaatagtgttctaaaaagtatgctaaatttggcacatactaaaaattgtattaaatttggcataagatataacattgtactaaatttaatccacaataaatattatttttttatttactataatgccactaattattatgttttattgacttttactaaattttatttaccatattaccgttatttaaataataaaagaataaaaagtaataagctttgtatattttcaataaaatatgaaattatttttttcttattttacatcttgtgcattggagtataattgtaaatagtagaccaaatatagtacaaactcattttttgtgtcaaatttagcacaaattttaaatcttccattggagatggtcttatgtgtcaaagaaattatgaactatacaagagagcaaacatttatagttgccaatatacaacatgattttaaaatattacattttttttattttttctctcatcctcatcaaatttaactttttttctaataaaaaaagggaattttttaaatatatac

SEQ ID NO: 3926 - DNA, 2422 bp, Cannabis sativa
  modified_base (263)..(264): a, c, t, g, unknown or other
aaaaaaaaaaaaaaaccctttttacatatgtgtattgtaatataaattaaatgatttttttaagtgtgatttttcaacaagagtcaagatctttctcatcactcaatttttggatatcatataactagccactataaaaaatgttgcttttagtcacaacaaaacttgtgagtaaaagtaaaaaaattgtgactaattataaattgttatttctatattgtgattaaaaaactcatacttaaaggtattagtcacaaaaattnnaatttgttgtgattaaatatatttttagtcacaatatgattaaaattaaattagtgacaacttgtaatttatgctgtgattagttatcactaaaagtaataattttttgtagtgagcacatgcttaatgccctggtcatgacgcgaataattgatgactgaagaaagtgattttgacctctgatttcttaccttaatcactaatttgccaaatatgcaaaagctcataaatttttaaattaattatgtacatcatgaaattatgatcgacatatataaaatatatattacatggcaaagtaagttaattaactaacacgaaaaacatgttttcataacattaaagtaggtctaattcaccatgcgctcgatcctacatcttaaaaaactaaattaaactataattttaacatcatcatcatcattcatacttgtccattatccacatgaacatttgacctctcatttcttaccttaatcacttttttatgaccttcaataatgttatccttgtacacaaaaccactagagatccaaatataaagacccaaatttaaggcactcaatgcagccaacacccaatagaaatagtgtagatgagaacggtttaaattgtccccaagccaactctgctcatgatcatcatcatcaccatatctagagctaatcacttgaacaagagatattatccaaccactcatgaaatttccaactcccaaaatactaatatgagctgcagcccccaagcttctcattccttcaggcatttcggcataaaacaattcttgtagtcccaccaccgcaaatgcatcggacactccacaaatcatgtattgtggcaataaccaccaaaccctaattggtacaacagccttagggctatctaagagcccgtgtctcgaggcgatatcaactcgtttcgattccactaaacccgaaacaaccatgttgagtatggaaaggaagaggccaaagccgatccgttgcaacacggttatgccagaagggtgtccggtgaattttcgggctaagggaatgaaaacccggtcatagattgggaccgcgatgagaatagtgataccgacgaggctttgaagtgatgctggtggaagtaggaagtgtgatgatccaatggaacggaccattgtgctgccttgtttggtgaagaaggtgtggagttgagcttggactacgttgaacataagacagcttaaccatatgggaatgagacgaaggacaagcttcacttcttctacttgagtcactgagcacaatctccatggatttttaccttcacttaagtcttggctgtcgatgatggttgccttgttcaagaatctgtaatgggtttttcattattaattcattagtatacgttaaatattgttcactactaatatgatagaaatttattggggttatttgttcaacatattataatttattgatgaatatatagcaatgaatattaattagagttataataaatataattacctcgtggcaccaaaagcaataaattagagaaaaatataaagtggacacacaatttttcattcactaatcaatgaaccggcctatattctatatctatatatatatagtatgaacaatcattatttaggaaaattgtggtatagttatggggttgaacggagagagataagaaaatatgatactttgagttaagagaggggaacaaaaataatgttaatataagagaaaagttaaagggtacaagtggtgccaatcactctcctacgtgttaatatcgctattagttcaatttactatcgagtcacatatagtttaatataatagcttttagagagtatcgctagccaataataaggtgacacgttttaagggtgctaagcacaactggtgcccaataataatgctcgttaatataaatatatttttgatatagttttaaaatagagattttttgtaattaataagtaactaaattaaattaaaaattattgtttttttgcttaactataatattattggtactagtttactttaagtagacgcatttaatgagaatataatatactatatatatttgaggagggctaaggacaggacactctttatcacactctcttttgtacgctcttactaatttagcgacacatgtcatcttttaaaca

SEQ ID NO: 3927 - DNA, 1007 bp, Cannabis sativa
ttagccacaatttactttaattaattagaatgttaatatatattgggattcctaaacccttttctcgtgttaactctactcagtaaatctttatcattaagaattaataactgagaaaatcttaaggatcattgatgtcaactgaaactgttttcttgttcaaaaggaaaaaaactaaaactaaattcaaaggaaagtaaaatatagaaaagaatataaaaaaaaaaaaaatcataaactccatagttacgtgcaaaagaagtttatatcaataaactccatataaatgatttatttctcatccgttaattaaatatttacccttgtgtaaggtatttagtgtttaagctgatgaacaaactaaaaagattagtgttgagtaaagagaattagaaaaatctttcttctaaactagctcactatatgctgcttcacgcatagttaattcattagcgaccttatcaaccgatcgaaattcttaagaaaattagtcagggaaaattgggactcctaagttcgtaatccttttcccctgttgctctacttgttaaattgtcatcattaagaaataataactaagaaaatcctaaagatcattgatatcaactgaaactattttcttgttcaaaaagaaaaataaaactattgtctacaagtatgttcaaaacaatgaaaaatataacaaagtctagtaatggtaatattagtaaagcagtaagtaatcgtgtaaatgaacaaaaaaaggaaaattactactttactatagctatctttagagtttaggctaactaactatatttctaatcatcctgatgatccagctgatacgacgtcgtatatatcattcattagtttttagcttccaaaatcagcttagtacccatttgaaaaacaagaaaagcttcaaccgtagcatacttgatcacttcatcggaatgaaatctcggccgatcgttataattgtacggccgacaccaccattggattttggcaggcttcaccagatt

SEQ ID NO: 3928 - DNA, 1168 bp, Cannabis sativa
gaaactttgatatgtaccaaatcaaagtttagaaaacttgatttgataaatatcaaagttcagaagacatgatttaaaatattaaggtgttagtaaaattgatcataattggacagacgttcttgaatttaaaaatttcaaggggataatttttaacggcctaaaaaattcaaaaaacattatttgatacatgttaaactaccggggacaaaaattataattagcataaattataacaaataacttatctgccatgaaagagaagaatcaaacaatgtgttatctgagagcaaaaatcaagtccttatggagaacttatgacctagacaaatacaatgttacacaacaagcttcactctaatgttaaattttgtttctttggtatttctggaaaaaagaaaactcatcaacacagcacactgtacagtaagtataaataggtagtagaaaatcatataatgatacagtaccgtagggaatataagctcgtttcaggcttcggcagaatgaagcagaggagaggtgtgtccatcgccatttcgtgtatatcgagtagacgacatagatggatctttgtatgcatctactagcttatcataaaattcgtccctagcaggattattctggtcctctttatctttcttaaccaaactctgcgtagtacacaaagtttgaagtgcaataagatatttaaataaaaaatacagtgaaattctgttactagaaaaagaaaagtgctagtcatataatgaattctgctgctgttatattgcaatacctcaacaggataggcttggaatattggcacaaatctttttcgaatgtactcgttgaaaagaagtgttaggattggaagaggaacaatcaaactggcagccagtggaacctttttaaggccgaatagaccaattgcaatgacatgcataagtatcagagaaaaaattgttgagtagtgcatgattggccaaaacttgcctccagtttcatatttgggagagtatacattcaacagctgccaaaataagaaaaaaaaaggttgaaagttatcagaatgctaatagtcaaatctgataaaacgagggactaattctgctttcaagttatagtttataaagataccatagaagccaagaatcggttcaaatcaagttctctaatcaatttatta

SEQ ID NO: 3929 - DNA, 572 bp, Cannabis sativa
gctagagacccttcccagagttaaattttgtgtaaccacagcccattagttcttgtgcaacatcagttccatttctctgtctctgtctctctttttattaaattattttgggctgtgaggcactttcaataaacatttcactgtatctatttcagaagaaatatatttgcaacattgctcggcacatatcttttttgtcatcgttttttgtacttgcataattgcattgtgatagtaggtattttttatttatcatgggttttgagccaatgtgtgagagagagccatgtgacttctccagtagcttttagtagtcttatttctttttaaagagttttgattggacataaagggagtgagagttgtgggagtttgttttattagatgaaatgaagctgtaatgaagggtaattgattattcataggaaggcaagaccatagtgatccagcctagcaactctttttttcttttcatgtttgctgtcaatactgtttcgttattatctgcccagttccttaaagcgtaccacttttctccagaaagtggccagttgggctcaaaggaattaagg

SEQ ID NO: 3930 - DNA, 1806 bp, Cannabis sativa
tggaggaaatattgaaggcttagctaacaagtaagattcatttacatcttatgtactataacaccttgtttgttcaatttttatttcattcctctgtttggttacatatcagaacgaatcctaagcataataaaacctattactattatcacttcgatttttggtagatagacaattgacattgtcaaatctttaaaatccatttccctttttgttttcgcagcatgtcagaaccgcagccagcgtactcggcctatcgcgaggctagtttcggtcatgccattctcgacatcaagaaccgaacacacgcttactacagctggcaccggaacgatgatggttatgcagtagaagctgattccttgtggtttttcaacagacaatggtatccaaaagatgagtctcactagtaattaagaatggagtggttttgaaattgaaccaattattgttttgttatcccaaataaacacacaaagaagaaagagaacacattattcttatgcctctattttaaaaggctctactctaatgtttagttactagttactactagtgtaggtttttgtgagctctacactacattgatgtacaagtgcatttgttttgtaactcttgaagaccattttataatttatctctggtttttgtctttttaataaatttgtgctacaatagtagtgtaatgcaatattttaaaatttcttttaaaaatttagttttccaataacatactttcttgtttgaatttagtacgtgtttaaaaaagtgattgagtagacagaatgagtctgaatgacttaaacagaaaaggtatcgatgacatgaggaaattcaaatgaaaaaaataagaaaaaataactaaagaccctatagttagcacgtgatctttaaaattaccttaaaactggaggagtagagacgagatctccactgcgcggtctcttttttagttataaaaaaaattatatgcaaaaaaatacttataaatgtttattaaaaatttgcttttttttcaatttttccccacaatttgatcctttattttacacaaactctctccacacaataatgttatagtttgtgattaacaatatgttttaattttaatacacatattacaataatgtcattaattattcattttaaatatttacttaataatatattactttttgtattagtttacatcttaacatattattgtgcatttaagtataataacaaatattatactaaatatagaatttgttttttttttcccaaatttaatattatatttagatcttaaaaatagtctaacatatttactatttttttttacattttcatatcttactattggataaataggggaaagtaccatttctctatgaatatgcaaattgttacatctataaataaaatatacattaaagatgagcaatagttatatgtaaaatgaacttaaaatgactcgtactatacgatggaaatatatttgaaataattacataaggtaataatttttataaaaagttatattttgacgtttaaagattttttattttttttatatttttacgggttttcataaaaacaacaaaaaaattgcataaaaataatatctaaataacatataagtaacaaaaaattaacatgagtacaatataaaaagaccgtattttatgtaaataaaaaaaaattgtaaaaataattaaaattccgtaaaaccatatttttgtaatttttttgttgtttttatgtatttgtaaaataatctcaatatatttttactcattttttctttattttaaagatattggt

SEQ ID NO: 3931 - DNA, 1402 bp, Cannabis sativa
gattttgatattaagtgaatgaaatgataaagataaccatagaaccagaggtgttcggagagacctttactctcccaagagcccatacattttttccacccctctcattcaatctcttctcttatatatactgcccaactcatatagcctacctacccccttccaattgcccatttaccctctttattcaatctcacaccattccgacattcatacactcaccgacccgaccacttcaactagctctcacttgtacatcttttcaatggtgttttcatttgagtgtgcatgacattgtttttatgcatcttcagaatacaatacctaaggtggaaggaagaatgtctccaattatttcccgttgttggaagtggtagatttattaccgcccctgtaatcaccgaagatggtcaacctattcaagatcccctagtaattcttgaatcaaatccaggcaagggacctgttttcccttctcaggaaaataacacggctatatccaatactgctaataatttggaacccgtcaaggacaagaaagtaattcagtggatgcttaccctacatcaaataggttggttcggttgctgttatttaactgtttagcaacgaatatcgttcatgatctgctaagaagccttatgtttgagtatatattgtcgtcaggtcttgatgtggttcgcactgacaggacattggtcttctatgagaagcaagataatctatcgaaactttgggatattcttgctgtttacgccttcatagatacagatgtcggctattgccaaggttagtaaagttttattttaaagtacaatacgcattttgcttggactgttcgaaaatcattaaatataacagaattaatccttaaagacaagttgcatgtataaaagaagaaaaatgtgctaaagcaccaattgtgcccaacaccaccgaaatatgttataccgctattgttataattcactatcactaatatgaaaaatcgctaactacttataaggtgtcacctcatgtaatgttgggaaccgttggtcttaatagcaatgctcgtaacagaatgagtgacatttgataaaatatatgaacgagcagtatattgtatatttcgaagatggataatatacatgtttttcttgttttaccctcaattcaatactgcattgaaaaccaacataattttaacatttttgtcttgttgagcaggaatgagtgatctttgttccccgatgattatgcttctcaacgatgaagctgatgcattttggtgctttgaacgtctgatgcgcagattggtacacatttcttcaataaaatttacttctgtttggctatatgtttcatagtttgctttcttttgtttcgaatgatcatcaacacgtaaaatatattcgtcccg

SEQ ID NO: 3932 - DNA, 1478 bp, Cannabis sativa
tttggttaatgctatttcctattaaccttcttatacatcctcaatttggtacttctcttcgaagctcttcagattgagtgttctcttcttctatatcaggttgttctggttcaggatcttcaacatgagtggctggttcttctgtagcattttcttgccactctgatacttgtacaataggtttagagagtgattcttcaactaattcttgtctgacttgactttgtatattaatagagggctcttcaagtggatcaccctctatttccacctgttcttgtccattaccatgcacaacttcagcttggcaaccattattttctattggattcacaacaatatcaagtaccacattagagtcattaggtaactcctcaatagtgtagtatgctactattttctgatcaggttgtgtttgtttgattgcatttggatcctctttccattccaaagctacatgcctctcaagtaggaccatatagaattcaactactctataatgctttcttttcatgtcttcaatcacaaccattaaatctttatcactaacaatcatgcgaccattagacaacatacatcctttgggtttgaaaaaaagcccgaatggcatttggtacttcatgcaatatacagcccattcgaaatcaaacttactaaaatggtcaaactcataatagtcaaaataatctattttaccccttcatacttcttaatgccatctttgttgtaccacacacccccatgacagagcttcacagtgaaccaagtggtatgatttcctacagtcaataatacaaaccaaccaattaaaaaataatttaatgcacaaaccattactgccactcaaaaaagacaagaagttattacacatatatgtgtctttgtttctgttttctaatagaataatacaacgactctttttatgaaaataatacaaaaaaggttaaaagtaaaagaaattgacataataaaagaccccactaaactgaactccatgtgcatgattcttatttctgccatgaattcactacttactttttcacacacttttcatagctaaactactgtaaatgttgaaaaataactcgaaaccacacaaaaatcaatataaaaatacacatagaattttatttttatcaaaaaaaaaaaaaaacaaaagacacataataatcctttatataatacccataacctttcaaccagaactttttttttttcaaaaaataagctaccctatatataatactctaggatacattctattatatacaatactcctctattgtcaaggaaaaagcaaaaaacccatggtatatataatatttttccattgtcaagaaaagaagaagaaaaaaccctagaaatggtatcattaactcaccatattcaagctcctctccatcaggtggacaacgaatcggcatttccacagcttcaaatagagctcgaaatgcttccacttctgagttggttatggc

SEQ ID NO: 3933 - DNA, 562 bp, Cannabis sativa
  modified_base (243)..(243): a, c, t, g, unknown or other
tacaataataatattaatattggtatatataccatagtaactaccaaagacaaattactttattagggttttgtatataggggatggatatatgatgtgttaaatggaaaaagctatagttcaaactaggctaactattttgattattaattaagtccataatttttttattttgacaaatattaactttagagttagcatttagagttcgtttggaacatcgtattaggttgtattgtattntattatattgaattggattatatcatatttttatgtaaaactatatgtagtattaatttttatggacacctaaatataattaatattttagtataaattaaagtttaataacatattatataaaaatatgatatataatctaaatcaatataatataatacgatattatacgacgttccaaacaaaaccttagtaattttgactatactatgtattcaattacactatatttaaagtctctaatgtgtatttggtgaattaatctaacgattagaagccatagtatatatcaaatgaacctaaaatacattccacatta

SEQ ID NO: 3934 - DNA, 535 bp, Cannabis sativa
ctaatcaaagcattagatttggtttgtttatgtaaccttgaatgaacttcataccgtagaatccatattatataccacgtggctgttgtggacatattaaagttatccatctaatggaatcgatagtgtgccatttttaagcacggttgtaaagtccattgagctacacaaatagcagaattataataccaaataccaaacaaaattatatattgtgacgttgattatatattttacatattaatgatatctcgcagacctgcaagcacttcttccttgttggaatctaagaaggccactgtttgcgtagcaggttggacgaatacaagcatcatgtgaaatcgagttcttgacaaacaaacatgtaagattgttaatacaatattatcctatatgtagagttataaattacgaaattaattttatacttattataatagggagcaataacgaaattattcagattcctcgcagtcatacgactaaccagtgcactgcaacaggcaccgcgatctcctgtctgagtgccaaaggc

SEQ ID NO: 3935 - DNA, 1091 bp, Cannabis sativa
gcttgaagagattgcaattggaaatagtaataaaggagactcctaagccatcatcatcatcatccttcttccatttattatttgtacatgtttgtaatattacaaaaagattctctgtttcataattttcttgtggatttagtgttctatatatatcctctctactttatgaaattacatatataataatttccaaattttgaaatatgtttccaaatcacaaaattaattctctctttatactcttaaacaagtattaaattatgtcatgcaatcaaattgttttccctataaatattaacttttgttgagtattaattaattcatgcataacaaaaatgtaattctaattcagaacttttagctttcttcaaattttgttagttggtaaaactttgttatattaaattaaatgcatttcttattttactaatttatttagtctacaagtaaattctatttaattaaataattaattgagcacaaaaatattattactaattggtgttaaacacaagaaattcttttcaaaagtaacaagcagcctcgcttatcttggtaacatagcctctccatcacgagagagtaagatgaactcaaaacgccacgacacttctcgcatagcgagcaccctttgcatatatcaccacaaccattttttcaaatatatatataggactccttgactatctctcatagttgtacctattaattataatgatcattattagaatttttacgtactctcatggaaaaattctgataattaattttcagaggctaattattgtcttctaaagaaaaataaggatatgcatggttcatatattgttgttattgagacatttgtttctaatacttttcttctcaccacaataatttatatatatatatatattaatcatatgacttacaaatgaagaatgagaccgcaacaatatataatataatctaacttttttttttactggcacaggaaattgtaacatcaaccccatatgccatatatataggtagtaaaaactaattatttaaaaaattatagatgcaaattatattaagcttctaatgcagaaaaataaagatgatga

SEQ ID NO: 3936 - DNA, 553 bp, Cannabis sativa
atctctaggaaaatcctatcttccatgatagaaccaaccatgttgagatcaaataccactttatcagagacaaagagactcagggagaggtcacagcgaaaaagattcccactgaacataatcctacaaacatgggaactaaagtgataactctagccaagttcaagcattgcatgaacttgctagggattgacaaaagaagttgaccctagtggtcatcaagcgaaaatcctttaagtgaaaataattctcatcgcttataaggaaatttaggtagaatttgttaagtaaatttccttataagcttagttatttacataacaacacattacaatcacgcccttggactaatacttaaatacataccaaaactcgcaacaaacttttagttacaacaaactcctacaaaaaacaaaaaaagaaattctactcagtctgacttcagaccaagttgttagtccaaatttagacatcgcctttaaagctatcaaatacatactactaagagaagaaggatacctgaagcattattcttgtgtgtgtgtgtgtgtgt

SEQ ID NO: 3937 - DNA, 1934 bp, Cannabis sativa
aaaaaaaccattggccgagtaagtagaatggaggcttgatgaaacaatgagcaaattttgagtgtctaattctctaatttctaatttctaatttctagtaataataataataataataataataataacaaaaaagcgcgtttttattatcttataaataaatctcaacattcacaatacaatttcagatcatcaccattaccattaccattatcacctctcattcataccagaccagatctgatctgatctgatctgaattccagcatcaatgggttcccaatctgaacctcaacccacgccgccattcaagatcttcgtaggctacgatccacgcgaagacattgcctatcaggtatgccgacactcaatcttaaagcactcttcaatcccactccaaattatccccattgttcaatcccaactcagagacaaatctctctattggcgacaaaggaatcaactcgagagcactgagttttccttcactcgattcttgactccctatctcgccgattaccaaggctgggctatgttcgtcgactgcgatttcctttacctttcagacatcaaacaactcgtcgatttactcgatgataaattcgccctaatgtgtgttcaacacgattacacgcccaaagaaaccactaagatggatggagctgttcagactgtttatcccagaaagaattggtcttctatggttttgtacaattgttctcatcctaagaacaagattctcactgaactcgttaatacagagactggtgctttcctccataggtttcagtggcttgaagatgatgaaattggatctgttccttttgtttggaactttctagaagggcataataaggtggtcgaaggtgattccaatacttatccgaaagctgtacattatactcgtggaggaccatggtttgaggcatggaagcattgtgagtttgctgatctttggttgaatgaaatggaagattacttgaataagaagaacaaggatgagaaggaggaggagaaggagaaggagcctacccaaaccaaagtctagatttttatttatctatttattattaaagtggattcatttaattttcaatcttgtgtgaattgattgtgtttatatggagtggagtgtagttcttactagggtaggagtagcaccattttcatatatatcattgtttactgtttttaattatgctatacaagcactatcactgttgttgtcttgtatagttatagtaattatgttatgttgatctgaattatgaaattaaattatataaaaaagaaaaggggcatcatagtttgatccccattagaatgattctttgcttgttttggttatatttggtaattgacatgaatctactctgtttcctctttattcattgtttttaattgagctaaagttgttggtgttaaatgagtttcaggttctttagatgatgatgatgagatcattatgcaaagtaaatccaagctgatcgatcaccttcactgaagatcgagttacaatgatgtaatgaatgttttttccattcatagtcattacatggaatctatcattgtttactgtttttaattatgctacacagcacaagcactatcgctgttgctgtcttgcataggtagttatagtagttatgtttatctgcattttgatccccattagagaatatcatggtctatgaatctttgcttcttttggttatatttgattattgacatgaatcgactctggttcctctttattcgttattttgaattgagccaaagttgttggttttaagtgagtttcaggttctctagatgatgatgaagtaaatccaagctgatggatcaccttcactgaagaaagatcaagtttttagggtagctaacaatgatgtaatgactattgagtgctttatctttttctattgtgcaattta

SEQ ID NO: 3938 - DNA, 622 bp, Cannabis sativa
cttaatagaattcaatcaacaactaacaaaactactcaagtaattctttgacagctgagacagtaagttgttactttttctcccttgacaacaacagtacttttcccttttagatccaagtgtaattcaatgttggctcagctcatagagagagagagagagagagagagagagagagagaataataaagagtaaaacaagatacatcaaagttgagagaaagaacacaattgtaatcttggcttgagaaataagattgattgagcaatccattgtggcgagctcgaccgaggatgtatcgtaaaaaatttgggcgagcatttataatttgtttattatcctttgattccctctctgttcttgatttaattattatttgtggtgaatcacaattcacctcattcaagaacatacacaacaaagaacatcaacataaaccagtactaaaaatgtaagttaaaaactagcactgaataattaacaagcatgaactaaaactgaactttaaatggtaatatgcagaaagtaatggacacctttctttaacgaggttcaaacaccaagtcaatgtaacttgtgcctacatccccgagaaacagataactcttgaatctttattaat

SEQ ID NO: 3939 - DNA, 624 bp, Cannabis sativa
ctgataataatgtctccatcaaactaaaataaacactttcccattagtacgcaaactttcaatttctcactttttaacgtattgcacttgaatttcccaccaataccaattgaccaagtattcaaaactgcataataagagaatttatgatatatttgtaaaatatttaattattaatgaagataaaacattttttttaaatttttgtaaacatttatgcggctaataatttagagaaaattaataaattagacctcacatgatctcatcaatcatgcgttatatagtacaaaaaaactttatttagatatacaaacaattaaaaacattaattgatatacatatatatatgtaagggtggttgttgataggtaagctagtcgtgtgaaaggttccaaaaatgaatatgaggttgaaaagagatcaacatggaatgtctaatatagaatatgtatgtatatagccccgggacccaagaaaagatccacatcatgatgtgtatatatacaatatatatggttgtcttgattgtataaatttcgatcaatatataagtgtgtcgatcgactaagttatgtattcctattagtattatcattttacgtacacatatatgataataag

SEQ ID NO: 3940 - DNA, 594 bp, Cannabis sativa
aaaaaaaaaaaatacaattttaaatactttgtgtgagtttcactttaatatgttcacacaacaaatgttgagtatgaaacttttctattcaataaagggagagtttgagggttttcaaaaaaatccaaaaaaaaaaaagatagaaaaaaaatcactcactaaacaaataattttgttagtgatttagacacttatttaagattgctttatataggtaagctaccatagataaaatagttatatatatacatacatatatataacaaagaaaagagtatatatatatagtttctatcatttggaaacttacatgatctctctcccatataaagaaaatcctttgcaaataataattataataataattttatgtatgttattatattaggctttgtaattagtgtgtgtattgtatatatatacacattgttttactttgattccacaagtattttgtttattatttattttaataaaaaaaaattgtagtcacaattgacttaattaatgcttgtaactacatcatattagagagaatgatcatatgtatatgaatattgtatatatataaggtttataattatgaaattgaag

SEQ ID NO: 3941 - DNA, 2573 bp, Cannabis sativa
tttttttatttaattatcaataccagtttagatttgaacttcatataaataaatgctacttaacctttttaaaaaggtcaaattttatttagatatcatattaccactgggagcacttctaatagctaatgtaaaataactataggtaaaaatttaggtgaagttgttaggagtaattttagctttgtaatctaaatgaaatagagttactcccctatttccccaataatctggttttatatattatgggtttagcaattaatattacttaattactctagatcatctatatacactagccaaaattttgtcaactaaagaatgcacatactgtaattttgtgtctttgtttgagtacaccaaactcaaacatgctaaaaggcgtacctacctagtatctttttatatgttaatatcgttattggttcaactaaatgtcgagtctcatatagtttgatgtgtaataacttttagagagtatcgtcaagggcgaagccaggatgagaaattaggaggagtcaaactatattataaatttaggtaataaatatttgagaaatactttattaaatgagatatttgcggtaaaatttcttaacatttgtattacacatgatcctaataaaaaaagtagtagcaaaaataatttaccttacgatttcttcactaaaaaaaacttttatttatttaactaaagaaaaagttatttcatttttctattcaaatttatatatttttaattaaaaaaatgataagtaatagttatttaatacatggtctaataatatgtcgatatgtgtttttgagttagcatttaattaagggtataactatagcaaaatgatatcgtaagataagatagttttgtcactattttttaataggatcatatgtgtactgcaaatgttatgggagtttcattgcaaatatcttaactaaattcataattaaaataaaatacagaacgtctttcttgcatatcacaaatattaccgataagtaaatttatactaaaatttttggcaatttttctttcaatatatattagcaaataattacttaaaaatttattctatcttgttggagaaggtagtcttcactacatttgtagttgaaaaagatcactgtgtggtagctataaaaactgaaagggtaaaagtaacaattatcactttatatataattgagaaaatctaaaatgacatatcttgcaaagtaaactaatattattaaagaaaaataaatgtcttaaaagataaaaaaacaaaaatagatttttgtaaaattaaataaataaaagtaaatataaaacatatcatatttataattttagtttgactttgtcaaaggatatcaccatgtactacataattatcaaaacaaactaaattacataaccaagcaaaaaagaaccaaataacatatataaacttaactacatagcatttatctaggggtccatggcctctatatgtcatactatacgtctgcatctgagtattgctagccaatcataaaacgatatatgtagaatgtctatataacttttagcaattaattaagtaatattaattgctaaaagtgttattatatcaaactaaaagttatatagatagatctagacatgtttagaagtgctagacaccactggtgtccaataataatgctcaagtatactaggtaacgggtcttcttttcgaggcatgaaaaatctctaaaatacacttttcgagataatgtcaatcttccaatgaatcgaagttctatattttcatttcacctcatttagtactcattgttggactgaataaattggtctcatttgacttagcttctataagctcttttccaagcttttaaaattaaaaaagttctctagaggtgtttggataaaaaattgaaaagtcttttttttaaaaaaaaaaaaataaataaatttaaaagttcttttgggagaagctaaatcacggtgcggttgtggtttgtatttttgtcacaccatggggtgcggtgcggtttgcagtttaaaccgcaacacatactgtatattataaaattactaattttacaatatgattttttttttcatataagaacaaatatatgtaatatatgtgtatattatattattttttaaaaacaattcaatgattagtataaatattaattaatattatgatgttaaaattttaatattttttttcacattgttaaaactttattaggttgatttttgaattattattataatgtttgataatgataatacaccgtattttcacagtgtggtgtttacagttttaaggtctcgcagtacaggttgcaatttgacaaattacaaaaagtgacatatatggttaggtttgaaaaaaaaaaaaagttacaacccacatccctactcataggttggatttgttacaatatgatgttgtacgtccaaccaaacttgtggctatgaacatagaattactagaagtcaaataagaaacttattttaactgtccatcaaagcttgggaagtattcgttcaaccatctagcttcctgaacataacctttaatgaatattttcat

SEQ ID NO: 3942 - DNA, 2411 bp, Cannabis sativa
atgctcagtccaaggtttgccaatcgtcttctcaaccattacacactgccgcccctcatcacagggacccagctgattccgtccccaaaaatgtataaattaagcactaatgcaaccataaaatactaggaaaacaaacatggctatagtgcagcgattcaagactccaacaaccaggttatagcttatttttcttcttcagccacctcaggtttatcacctgtttttgcagaggctgaagccctttttagagctttgcagtggtgtcaagcagtccacttccccattgaaattgtggctaccgactgttaagacttggttcttaaaattcagaggaaacaaagggatctctcagccctctcaagcctcatttggaagattatcaactctttatcatccttcccaaagattttggttatgtatactccaagagataacaacatacttacacacaatctagccagagatgcttgaggaactgatgaagagcttctgtggaacaatatttgttctccctctcatatttttttaaccagttctcattgtcttttttctgagtaactaatctcattaaaaaaataatagtcatataaatttcatttcatataaatataaatttctaacaatagactaataaaatgaattctttctaattcttaacaccattaattatttaacgaatcttaaacttttgtccatgtttgtaaatatgacgatattacagatcatgatacataacatatagaggtatattgtaatgattttgatgatggccatgtttataatgatggtgtttattttattcatatatacaatgaatggtcatgatgatgatgatgatgatgtagcacccgcattatgtatcgtaacttctaagcaccacatatatccaacaattttaggattaggaacaacgttaacaacaatatttatatatacaaaattatatataattatatttttaatttttattttagtgttgcttatttttaaaattttataaattaaaagaaattgtaaattaatgctttaaataatattaaaatttttaaaaatttaaataaaataaatataaaatttaaaaatatgaatatttaacatgccccaaataagaaaaataataatgaaaaataatcatgttacaaataatgtataatatttacacattaaaattaatataagttcagttaatttaattaaaataaataacattaatatttttatatttttaaattaaaaataaaataatattaatatttatatatatttataaaattaatcgtactgttactaacactattaaatttaacgaaatatttttatattcttaaaataatctataagccaacgaaatctgttagataactgtttgatagccatattccaatgcaagctaacattagtggttaaaatgagatatagatttgtgaaattaaccaaatgaaatgattgaatgtaataattaatataaagttaaaatctcttaaaataaagtaataattaataaatctattcaacaatatattccaacgttactgaacaggagacaattattatgttcattttatgccaaactaacactttactacaagattattttgcattcacatgcattgattttgctgaattaattaattcgttctttgaaacatgattatacaatattattattcgatatatgattgctcaattattaataataaataaattgtgggcaagggctggctagcttaatgactttgccatattagcacgtcaaatattacttgatatgcacatataaaaaataatatcttcatcaacgttgaacttatttaaaatatagtacactactgaataagaaagaataaaaagttggaagttataatggattagcatataatggttggcgcaacttgtacacatagctagggcccccaataatagctgtttcagataaaaccagagtgttggagagcatacttgagcgttttagctttcttcagtcttcacccaattgcatgcttttgcaatttgcattattaacacatatacttacttatattaaaagcaattttgctatccaaaacaaaatcttgaaagcaatttggtgaatctaatccaatgttgacatccacatgacatatcttgtgaggtcaattaaattcaaacatgcgcacaaccaattttgttttttacactttgccactatatacataccgtagatcctttctacacaaattattatcggtacaaaattatgtaatagttcttacattattttttatgaaattatagcaaggaaatattgctacaaaaatatttttatcattttataatactaagaattaaaatgatcttttattgttttttgttttggaagccactagaacaataaataaatatgtcacacttattttggtaggctccaa

SEQ ID NO: 3943 - DNA, 1968 bp, Cannabis sativa
aataggcaagtctcattggtacttggtgggatctataggctaatcctcataggacgttgcttaaatttgcaaccaattcaatcatttactcctaaaaaaatcaaataaattaaatagtcaatttgaataaaaaacaaatcataagaaatattcagaaattattaaatatcaaagtaaacttacataagcttgttacgcgtattcgttgcaccaagtgttgtctttatggtaaaactttcaaaaaagtatccatagcagttggaagttccctatcgacaatatgtgctacaatagactttaatccccttcctccttgatgtttcttcttacccctaactttctctattttttgctgatcttgcgtgatactaacatatttttgttacaataaattattttctgctgactataacgtaaagtattttgaaaattaataatttcattaagtacctttcgtttttctatgttctagtaagtaatggtatcacatcacacctcctgagttactccgtctcaaggtaacatatatgccctctcctgtccaatctcttcaatattttctatccattttttcatagaattggcccgccagtcacgcaaactctttgacattttgtactcatcaccattagtccacaaatgtataattatctgtgggcacacaaactttatctgcaaaaaagttacacattcaaattagtacattaattaggaatttaagaataatatgcgaaattataaattttaaaataatatactaaatacctcaagtctatcttacactgcattaatttcagctctagaaacatcttctcacttgaacttattcatggggatggtgttgtggatcatcaatttacacatgttgttgaacttttttccatttggacaacatgggtgcccgtatcttcatgcaataaaatgtgtagtttgacatcttttgttttggaaagcgcttcctcaatatttttacctttgtatttacctcttatccctttcttttttgaagagctgtcacccggtgtagacatactatgcataaagaacatattttcagatttataataactaatcatattcactacatattaaataagaacatatgtaattagtattgctattaaaacaacgttacaattacaattcatcatcatcatttcatcatcagttacatatacaatattattatcactatcactttctaattattagcaatcatagttgtcattgacactgaaatcatctaaccgttgagagtggattcacacgatggatgtttggaactttagttgggtcaacattgtctaccacacataaggcaacaagtaaaaacgtacataatatcatatcgacgggatacatatattatgtatgaattcaccttgaaaacatttaattcactaacaatcattaacaaatcaaaccaaacatgcatgtggtacaataaattgagactatgtgcattcatctccttttgtacttgtcacttcagtaaacaacacacgtatacatgaaaacggcaacaataataaaaagtgactacaatatcattatgcatgttcaaaacacaagtcataagcattcgattcaaaatacaagcacgtttgatacatggaaataaaactcccactgagctcaaaaggctaggctcctaacactcccattcgagcaacatgctctaaaaatacacatatgggtaagcctttcatgagtgagtttgctgacatgcgagtgctaggcatgtattcaatagaaataatagactccgtaactttctctttaacaaaatagtactttatgtcaatgtgttttgagcgggaagtacttctagcattcttagagaaagccactgctgcaaaattatcacaatacaatttcagcagcctcgagatagagtccataacatccaatgctaaaataaaattccgcagctatattgcttggcaagtagcctcataacacatcata

SEQ ID NO: 3944 - DNA, 1137 bp, Cannabis sativa
gtggcaattctgagcaggtttccaacagcagcaggccggtcagacatattgaggactaccattactctcttgcacaaactaattctattgacatattgcaggaatctaaagtcactccttacccgatttcttaggttctcaattacagcaagctgtcacctgcttttcgtgccatagttttggctatttctagccattttgaacctaaatttttcagtcaagcaaaaggcattcctgagtgggataatgagttagatgctcttgagaagaatcacacttggattattgttaccttgcctgatgggcatcatgctattggatgtagatgggtgtataagatcaaaatcaatgctgatggttctgtgggaagattcaaggcaagattggtggccaagggatacaatcaacaagaaggtgtttattacactgatacttttgctcctgtcaccaaattggttactgtgaaacttgttcttgcccttgctgctataaagggatggcatttacaccaacttgatgtgaataatgctttcttacatggagatcttgaggaggaagtgtatatgactttaccacctaggtatagtcctaagggggagcttccaccaaatgcagtttgcaaacttcaaaaatccatttatggattaaagcaagcgtcaagacaatggtttgctaagttttctagtgttctaattgaaattggatttcatcactctgccacagaccattttttattcatgatacacaatggagacaaattcatcattcttttgatctttgtggatgatgtaatctgcggtgggaatgatcttgctgagatagaggcactcaaaaagtacctaaacatcaaattctgattaaaagatcttggtaatctcaagtattttcttggcttggaagttgctaggtctcctaaagggattgttatatctcaaagacattatgctcttcagttgttggaagacctaggacacttaggatgcaaacctatgagcactcctatggaagctaacataaagctaagtcaagatgaaaaggataaacaagctgacccgaaactctatagaaaaatgatagggaagttgcaatatttgaccattactaggggcagatatctccttctctgtcaataaattg

SEQ ID NO: 3945 - DNA, 1093 bp, Cannabis sativa
ttaaaaaaaaaggaaaatgaaaaagatattcaatttttatctgcctaaatatattaaaagtaccaaaatatatcaaaagtatcaataaccattgatcaaaaaattagttgttaactaaacctgctatccatagtaccaaaatatatcaaaagtatcattgctccttacaataaccaaaaagacattaaaaattacgctactcatagtaccaaaatacatccaaaatatgattgcgtcttataataagaaaaatacattaaagaagattatatccataggtagcaaaatacatctaaaaagttctctccatgcatgagtaattcaatcttcttgttgttgagatacagaggcttgttcccttgcaatttgtttctttctccttgcattccgtttcactatctcaggctctggattagtctttggtggtctgcctctcttctttggagcattatcataaattagatgaaaaatagtgtaaattattgacaattttattaaattagactacacaatcataataaattaaaaaaaatgaaatatctaccttagtaacaacattggcttcacaagttcttttagaatgtcctgtctgcttacaattgctgcaatgattttgttgactcttccttggttgattcataacagcagcaggaggttcatcattacttctgattctttttttcttaggtcttccaggtaggctatactctggaggtggaagtattgggttttgaccgatttcaggccacatatttggactaggcattggttcaattacccctgcatatgcagcaacatgagcatctttcttataccagtcatcaacataatccatgacttccaaacccgatgacctaatagaagccaatgcatgcggacaaggtatgcctgacaattggaaacctctgcaagtgcatgttttgcttttcaaatcaaccacaaatctctttgatccaagataagacacttcaaactttgcatttcctgacaggacagagttacagtgtgttgccaccttcttatttttctcaataatgtcacggattcgtttatcaactggaaccacccatttcttaacactttcccttttcct

SEQ ID NO: 3946 - DNA, 1365 bp, Cannabis sativa
aatctatctttacctccacatttttatgtacttttaaagactccaagttctaaagattcaaatcctattgattcaatgaaactagatactgacatttctcacaattatataaaatctaagttgactctggatttgcaataagggatgagaaccaactagactagacaacatgacacccccatgtagaattagctatatataactaattctttaagatttggatgtggttggagggtatctattgacatttcatgaccaataatggcctcatcactctcacaaattttaacacatgattgaaggtattgttttattctttaatattttagcactttcatattacattaccacatctttcttatgattaatactctcaattttcaatctgtctcccaaattatgcaccaaattagtaattgaatttggaatcgccttaagataataattatcaaaaaatcaaaatatcttaaatgctttaacttacaaaattaaattcaatgaatttattttcaagcattccatagtcgaacagtgtataaacttaagtgttatttgattggaagtaatgaagtggaatggaatgaaaactattttcatcattttagtagaataattatttcattttaaaatggaagtaatgaccattccaacgtaagatgagaagaaattttataattttttttatcaattttttatgtatttttaatttaattctatttcattcctattcttattctcattttcattcttattcttatattttgatttatcccaaccaaataccaccttaaagttcaatactactatcgcaactgccttgtctataagaaaacattcatcaacgaaaagaattgttcgaatcttgttttaaacataatcattatgaaaaaaaaaaattattagcaaaataatcatatttggttgcttaattgaataaaattacatagtacaactataaaattatcattttgcgaccataaactattgtagtcgcatagtataaatttaatgtggttatttagtaaattttacattttgatgttgttaatttggggaattccctcttattaattttgcattttgtagtaaataaaacaaagtttgatttaccaaggaaaaatcacgttcaaaggacacattggtgagtattttcatggatattttcttgacaatttgaatgaaaagtacatttttttggtcttgaaatgagtatcacaaacacaagatcatgcattagatcgtgcattgtgccatccaaatcttaattaatatcataatctttaggaaataaattacaatagccaaagcaaagtttcaaatctcatgattgttttgtagctcaaatttaagggtgggtataatagt

SEQ ID NO: 3947 - DNA, 1279 bp, Cannabis sativa
aattatatataatataattataatttgtttggataccaatttatatgaagttattaattttagataccaattagtatcaaattgcatatgatactagtaagtatgatttttttagattgtttagtatactattaagtgcttttgggtaccaattaataatatgttattttagatatgaaaatattattataattctatagatactttagatatgaattttttttaaaggatttggttatactaagttttggttgtcaaaattgcaaataatttatttgaaacatttttaggtgtagttttttttttttttttgaatggaagttggtggaggaggaaaggaacaatcaccggttttactgtaattaacttaaattaatattactaaacccgtctcatgcccactttccagtgtcagatctgataacactcactggccaacgccaacgccatcatcatccccaaacctcgaggtacggaggtagaggtaccaatcatcaatctatgtctctctcctttgtttttttcgctttcatttgtcttctttgtttcaatttttttatggttttagaacatttgtgaatgaacgttacaggttcttcatcaagttttaattattctgggaacatttaattaatggagggattagtgggttcttctcaagtcacgcatattcctcctacacattgtagacaaagtcttgtaccttttgttcctgcactttcgttgaaatttgcaccaagttcgtatagatgccatttcaggatgaagaaccatcctaacaattcatttaacccaatcgttgcttcagatcaactactggaagaaacctcagtccctaaccaatacgataacacacagccatctaaaggttgtatataaaatcattttgagctgtgagatatttgataaattgaattaataaatgataaagttgatgaaaaaaaagagtatatatatattataattttatgtttctactctgtgtaagtactctgaagatttaattttcagttcttgtaggagtttggtcttattgatttcttattgaatagatcaacttgtgcattgagttttgttaggttttttgtgttgttatacaaggacttcatgaattgggaattaagaatttgtgctcatgagatggctttttttttcttttgtaaatgagcttcttggctgctttatatggttgctttattaatttttttatatattatatataggggttcttaatctatggagaaatgccaatgctgtgtgctttgacgtggatagcaca

SEQ ID NO: 3948 - DNA, 644 bp, Cannabis sativa
ggaatttccagaagcaccgcctctgaacctgtttgtgagccatctccagtcgcttgagatcatcggcgttcaagcaggctgtgaccaagtccttcgctgggctctcgatttcaaggctaattactgttttcctccttcatccctatgtcataccacaagtaagttttttcaaatctttgcccctccttttctttttacattgtattgcgactggaatttagacttgagtatcgatttgatagtttacatgttcatacacgagtgttagcgtgatagagtaggcattattgggctgtctgatgattataagccggttgaactgccaatgcatgttactttttctaggcacagtagcttggtaatttcttgtctgtgtagatgagttttgaatttggttagattctagatcttctctaagagctattagggcgtcgaatgaggttgtgttcaagttcattattttttagtaattctttgtcggttcccgactcagtacttggaggtattgttctgtgaggggcatgcttctgggtaatgggtccgcaggaggggacctctccaagaaatttttagggagaccttccccaatagcctcgttgtccttaagatctagtgtatttaagggcaaaggcaaaggcaaaggc

SEQ ID NO: 3949 - DNA, 1821 bp, Cannabis sativa
taaaacttgagtttcctaggtcatgataaatcaatagaattgcaataacatcaattatcactaggcacatgtctgcatcagaataaacgtctttttgtataatggctatagttatttcacttttcaaacgaaagaaatgagtctagaaatattcaatgagtcaatggaaaacctcttaaaatcaattggtagtttttgacttcaactaattgaagaaaactgatcaaaaatgtatattataatcttttctgtgtttctgctgatcttttcaatgtatgcattgtttatcaaataaatcctcaccgcagctgttatttttgattctagaaaatttaggggccatctgctgagttctgtttcttcaacaggaggaggtggtggtttccaaagtacaaaatagggaagaagagcatatgcaccaccgaaaaatgaaagtacagtaaaaggccaaactggaattttgctctgagaactgcaaatacaaaattcattagtcagcttactatgttcttaaacagtgtcttgggaaattaagtttcttctcttgcagcagactgttagtcaggccacttaacaaagtttacaagcttcatcctatacgttatgaaaacaaattatttaggcaatagtttatgcctccagataaatcagttctctgaattcaacattctacatacatgtatgaacttgatgtttctgaaacagtaacgtttctgacttcattttagtattacaggcaaggaattgcagaacacgaagtattagcacttagaaggcattcaaagaacgaaaaagggttaggttttagcagaactaccttctacctgtcggaagcagcagcttgctgtaaaccaagggccataaacccattatgtaccacagtgacactaacacttgattcattctgaacccatcgtcccctttcaagttcaagagctttttcaagaaatacatgtctcttgtctgatataagaacacgaaaagaatcaatgaagaaaatgttaggaagctgaaacaataaactgagaggaatgacaattgtggcttttatagtcattgacatttggcaaaattcatagtcatcctattggggttaacagatatatattgaaaccccaaaacacttaatgtttactgcatatatttaagcaataccggagtctggttgggggacagattgaaaacatagtacagtaatgcgccccataacacaaagagcaaaattgaggtcgtccagtctcttccctcagctacatttccacttccttcaggtttattttgcaagccatctccctcattcaaacccgggtcttctttgttttcaccatttaaggtactctgacaaatttgagaatgacccttttgctgaaatgggaaaataaacgttttacagtccacgcttctgaaaatcgaagatccaaagcttgttttgggaattgatactcttgtcttgaggttttgagtttgaaggaagttcctggtttctggccggcttttgaatgttaaagatgagaacttggagaagttgcaggagatgaggctggcattagccaacatggcgaagaaaactgaggatttttgtaagaatcttattaatgtaaatttgaatttattatctatctgtactcatatagttcattgaccccattatacgatgtcgtttttatagacatcactgaccaacggtgtcgtttaacacgttggtaaaacaggcgcgtacatttcataaccgcataaacgaccaataatccaatatcttataacctttcggagcttttcaaaagataaggtctttctttatctttctctcacttttttttt

SEQ ID NO: 3950 - DNA, 757 bp, Cannabis sativa
taataattaaatgttcctcacaaatattttttttttcaagaatatgatattgtattaaattttcttggaaaagatttacatatgggagaagcttttttcaaaaaaactcatcgtctagccagaagaaatgctaaattaatctacgagccttaacattaaaattgcaagaagacaaaattttaatgtcaagaaatataacattaacaaagaatatatttcctttcatgatttctaaaacaaaaaactaaaaaaattaaaaattaattgtcaagttttggcataagaaagttatttaatttcattcctaaagtttctcacatttcaacaaaaatagataacgtggaacaaatttgtgattgcaaaacttcaatgatgtgaaaaatgagagaatgtgtatagatttttctgttatcctacttttaattaggagtgatgtaaagaaaagttttgtaagaaatattattggattgtatagtggtactgactggcattgtacacaaaaaatttcagtttccctaaagaatatcaaatttgttgttaggtgtgggctttgtaaaataatattagacctgtagcaaatggaattagaatggcctaacaaaattgccccccttacaagaatagggtaggcataaaattcacacaataactatatgcatacatattaaaattttccttttttttgtgaagaaaagatagagactaaatgagtaagaataaattttgaatatggagtaaagaaaaatatgcttggaag

SEQ ID NO: 3951 - DNA, 1155 bp, Cannabis sativa
ttagggatttggttaatctcatccttgctacggtttgctctgtccaacatttggtggttcatgatgggcaagagttgggtccgattattcctcaacaaggtattaggcaaggagacccactgtccccttatttatttttgctttgtcctgaaggtttcacttttttaattatgagatttgagttgaatggtgaccttagaggttgtaaggtggctaatggggctccaataatctcccacatgctttttgtcgatgataattatatttatttttgggctaatgagcgtgaggcatcgaatgttattcatttattggggctttttgaggctgcttctagtcaaagagttaattatagtaagttttctactttcttcagctctaatacacctattgtttctcgtcaaagagtttgtagtatgcttggtatggctgaggcaaacagtaatagtttctatcttggtcttccttgtatcatgggccaaaagaaaactactattttgagtttcttacaagagaaaattcagaaatagatactcaattgggaaggaagattttttgtctcaagcaggtaaagtggtgcttctcaagacggtggcacaagctcctcctagctatgctatgtcagtttttcttcttcctttagaaacttgtggtgagttggaaattttgatggctaaatactggtagaactctaagtcttccagctcccgtggggttacctaggtgagttggaagtgtctttgtgataataagagtattggtggtctgggttttcacagtcttcatgattataaccttgctttattagggaagtaaggccggcggttgatgttgaatggttattctctggttagtaaggtttataaagtaaggtattatcctcatgactctttttttgttggctaatcttgacaataatccaagtttcatatggcacaatattcatgagactgaagatttgatttaagttggggctcgagtgagtatcggtacatgtacttctctaagcgttattgatgacccctagcttccacttgacaacaacccttttatcattactgatcatccaggcttaaaaaacttctatgttcagagtttaacgtagattgggatgagggcgtgggatgaagaggttgttcatgatttatttatgga

SEQ ID NO: 3952 - DNA, 623 bp, Cannabis sativa
atatatattgggagaaagattcaaacaaaaaaaatgtgaagatttatcatgtgtattgccactataagtttatagggtcctttttataggaccgtaaaaaaaaaccagattttgtgtccatattgccactatgcattgaaatgtattgggatttttttctcttagagtcttgcaggatccttcatttgtaggcccttctccactttcttggcttccgtttccacactccaatctcagtcctcaatttttttcttcaccttctccgtccacaatctatttgagtgagaaaaaaggagagagaggaatcgagacaatgaataatggagaaagtgaaagtgaatgaagctcaaccttgaaaaggcaggcaagaaactttatataaacaaacagttaattacaaataacgagtaacaaaaaagtacagttggtacccaagctaactaacagaataacccccaataactaactaacaaaccaaagaggacttaaacactagtcttgagcgactttaaaatcctccctcaagttacattcatttgacatgagtgttaacttgtctctttgataagtaaactaaggaatgtgtgtaaggatttggcaatcaaaataaacatatcggacct

SEQ ID NO: 3953 - DNA, 534 bp, Cannabis sativa
gaccatgtcataatctatttagaagtaagagtaaaggaatttatattatacatatttatagatttggcctaaaagggcctcatcaaggatcatgctgatactgcatatttatgatattatagcaccatctcccatttatttattagtcaagccattacaaaatgtggcacttaaggaccaacccatagccatgactagtggacatgtactgacaaggttgattttgctttcctctgaaggttttgtttctctccaaacatgccaataaccaatagcaaagcaatcaacaaatgccacaccattctacagtagcaccttaaaattatttctaaaatacaaaataaacttttattactgactaaaacaaaaactacaagagagaggatgacaagctattttcaactaaatggaagcaagaaaaaaaaatacaaagtaatacaaaaacaaaaaacgaaatcgcgttgctaaataagtgttttaacatagaacaaataaataaataatccgcctacacttttagttcccaatcaatca

SEQ ID NO: 3954 - DNA, 2091 bp, Cannabis sativa
tgtctttacctgctaccagagagcactcaaagaccccctagagttgccatgcaaaaagttaagcttcataaaggcctaaaacaaaatagggtcaagattagtcccagaagacaacactagctggccgactcctctacggtgctacctatgccggccagcctctaaaagtcactacaatggccatccagcttcatacaacaacccctatggtcgatcatcctacaataatacaaaaaagtgagcaaagttaaatgtgtaacttacttaggccaactcttgaaaaccgatagaagagagcctctttggctcactgtcaccaagctcatgcagctcgttatccataataggaaaggctctgtccagacgtttgcaaactgcctccatggctctctatcccatggctgaaactgatccccaagtaggcttctgggtgcccttgcctgaacgttgatccttcctcagcagagggtcatttatcatgggctgcccagttggcacaggtccaggaggaggaagaggaagaatgaccccgcagcatcaccaaaatgggtggttcgggccaccttggcccgcaggcaacctgaaggctcatatgaaggtcctccagctaaacctttgaatctagaggacatatctgcaagaagaaagttacagagtcagaatacaagttacaaaatattcaatgaaagataagaatataaaagatggtgcaatcaacaattaaataccatcatcctcagaagaggaattgtctaaatcttcaatggatacctcacccttggctctaaatgtaggcaaggggcaagtaggctcagcagaactttggcttccgagcctaatctgcagagtagtatccccaaatggtgcccttacaagccaagtgctggtggatggccctttctctctaaatccctaactatctgggatggaggcacatcatcatccatgttgggagtatgcccaccaccagggcaggcctcctcaccagctgtgtctccatctaaaccatttgatgggccctcagcccctgcaactctagtaattaggggatacatgtcgtatctctaaaagttggccacgctggccaaccttattatattcctctttattacgggaagggacaagatgtagtttgctctatcccttatctatagagtagggatggagcgcttgtatgtaggcactcactggaagcagcgacgtcaaacttcctagacatcctaggaaatgaagtaattctgggcatattcaccaacttttgataaaggcatattatttgtgtcacccaaccattggtggctgacctagctaaagtagaagtaccctgtctgatttttctttggagcagactttaaataaaaataatacccaatctcatacggagtaggttgaggccaacctagatctgcatagagaacaaacattgcttagaggtatttaatacttttcgggatgatttgtgttggacacatcgtgaagtatacggctatgtctctaaaatatgggtgaaacggtagcactgccccctgctcgatatggcgctccaaccaagccatccaactgaaggccagttgatgcgcttgttgatccctcaaaggcacctcacattaaatgcctctcacccgtccactctctagtatcctattgaaagcctcggtagagataatagatggaggagagacccaccggtctccttgtgacccagcatcaagaacttgaggctcaaaagcctataccaagacatggtccaaacctatcaccaagagatgaccaagcttgttcaatggatgcctgttaacatcatacgagcccagaaggttgttggagaagataacataagtcttgtacatcatcctcctagtaggcgtagcgtcttccacctcggactcggtgtccatactctcagcaccctagtcaaccacaggcacttctgcctggctaacccttggatctctataatcaagaagttgtgtggcttcttccgttatgtcaaccctacccatcgttgccaccttggaaatgtgaggatcagatgatggtacactacagtacgaccacttatttctagccatagtgtatcactatcagtcc

SEQ ID NO: 3955 - DNA, 1210 bp, Cannabis sativa
gcacaaattaggatgtactaatcttatttggtaggtcatataaaggtagtattgtattaaataacaaataatattatgtttggataaaacattatgttgtattaaatatcacgactataaattttaatacattgtgagtcgtattatttaatatgtaacaaatgacccgtaatagcttgtattataatatttacaaagggtcaagggtcaactacgaccccgacccaagcctaggaccgcatacccagacctcgggccccagacccaaaacccgaacccgaatcctgggtcctgaccccgaacttgaacatggacctcggacctaaacccggacccgaacccagacccaaactccagacccggacccttgacccaaacctagaccctggacttggacacggaccctggacccaaatccatggacccagacccatggacatggacctgaaccctagatctatactcctggacctagacccgtacctggatcccaaacttaaacccggaccacgaacatagacccatctactcggactcgtggttcggggttcaaggctaggccaaggtcctggtctgggtgctggtttgggggtttggggtttggggttcggggttcggtgtccaaggtctaggtttgaggttcgggtccaggtcttaggtttgagtcggggtctgggtttggggtcgagtccgaggtccgacgattccgagtcaatgggtcaatactaaacatagtattgtattaaataatactaatgtaatacaatacaattcaacacaccataatattatacaatataatatattgtagtgtaccaaacaagcccttagatagctttagtaacctgttaagttagttatgcttaaagattatttagttaactttttgacagatgtaattagttacatttagttattattgaaacaaattcttaggtttgtatataagagctcattgctcatctgttaatgaagtgaatcattttcagctcaactctctctccctctccctctctattctgttattcctcacatggtatcaaaagccttttttgtctttctctctgatcatttgttgattctccaatcacttcgtcttctctgacaatgtctgattccacttctactactccaacaacctctcatactactactactagttcgttcagtccaataattttctcttacaagctttcaattaagcttgata

SEQ ID NO: 3956 - DNA, 1087 bp, Cannabis sativa
  modified_base (128)..(128): a, c, t, g, unknown or other
cacataattaattttgtcatatttgttatatatgaccactaaggattttacaattaaaattctaattgaatagttttacaatgtcaaaaatacatattttaaactatatgtataaaagaagcagtgangtgtgtaataaaatatttgaatcttattcagaatattttaaaaatttatagataatttaaaatagctataacatatatgatcatttaaataatagacttaataccaaaatagatgaaagaattactagaacaacctttaaattgttctattatgaaattaggtaggcacatagagaaataaattcaaacattaactgtaaataaaaaataaaaaaaatgagatagttcaaattaaaaacacaggttgaatataggaaaatagaaaagcaaaatgagatgatgaaggtataccagccattggataccaaaaatatgcattattcatcaatctaattgttaaaaagctattgaagttttacatacctctcaagtgttaaataaagttttacataattggcctaaaataaacctataaatacatattttcaaacccctatgacacacttcattctcactagacactcggtgggtgaccgcttttcctctctcgcaatttcaatatggtttacaattacaagaggctatctccatttacctccattaatgcacgctagccactgcctcaggcctcaacgacaccttcttattcaaaagtcaaagaggtttgtcgtggtgatttttataaaatttattttttcttattaaaatttagaataaaaagtgcagagtcatctagaatatatatttttgtactggatccatatttatttagaaaaaatatattacaacttaattaaataactgattgcatataagctttttcacattcgtaatgtctctctgttttaataatctattgagtgtttttattattcttattattattattactttttctgtaagttcattttattttatgatatcaattgtcactgaaatcatctcatttggtaaactgctcattatttcaattttaggtttaatcgaactgagccgaaccgctaacaatggaaacccta

SEQ ID NO: 3957 - DNA, 741 bp, Cannabis sativa
ggcaaaaaatggaacaaggctcttttggtgaaacttttgtgggctctagccaataagcaagactgcttatgggttaaatggatcaattcaatttatttgagaggctataacatatggagttgtcctaagaaacaagattacaactggtatttcaagaagtttctgaatcaaagagataaaactgatgaaacaagtttaaatactattatgataggtaacatattcaaagcaaaaagattttacaatttaatggtggatgaaaataatgttgtctatgcaggtgctgtttgggataaacttgttgttcctaagcacaggtttctttattggcaattattaaattcccagcttcttactcgtgaccatttgagtcgtttcatgactttgcaaaaaacacttcctgcccaatttttgaagcagaaatagaaacacatgatcatgtgttcttcaactatgtcttctctaaataggtgtttgtggatattaacacttggctaggaaggtttcactggcctgatactgttgctggtttgatggacaggtgcaaaacaaagccccaggacttccaagaccgtatcttcaatgcgattcttgctgcaactttgtatcttctgtggaaaaatcaaaaagatgtatgtttgatctagcttgtactgttgttagaagtttaagtttggaagtaaggagaaatgtccaacttagaatcttgagtagggtccgtataaagtttgtcaaaaaaaa

SEQ ID NO: 3958 - DNA, 1711 bp, Cannabis sativa
cccccccccctcgcttcctggggtgctcgtggtatctttgctacccgagatcttattcggagggaaagttgttagattttaggtaacgggcaaagtgtggatctttggagttctccttgggatccttggttagaatggactgattttttagctgccttcaatccaatgcactgtctacttggtttagatctgagtttttgaatctattgggtagattgcccttactccattctcttcaacaagatatccttatgtggaaggatgctaagtatggaattttctctgtaaagttagcctatcagtctatctccaaaggtagacagggagggatggatggtctctttaagaaattgtggaagtcttctctcagcgaaggggtcaaactttttttgtagaaggttgggaggatattatcctctgtggacagtggcttcaatgcctgtttggtaacacttttttatgtgttctttgtgataatgatgtggactctctggaacacttgttttttcagtgtcatgtggctcgatttcgctagtttagaagctcgtggggcattcgtagcgatctcctccactttaattccctaagagattgtggagtggattttttctcctccttttggtgatagtgttgatttggatcactttacccattttgctgccttgctttgttttacgttgtggaactcccgtaataaatattttcataatgagttctttccctaatgacattatcataaaggtcttacactctttggcctcttgtgatcatatggtcagggatgctcctcccatcccttaccctgtggccctccttctctggtggagctaagagctggtaatctagtgaacatttttgttgatgcggcctttagagacaacgttgccgtctttgaggtgctttttcttgatagttttgggaatgttgttaaggcatttgttggtaaggagcaggttcacactctgcttgaagtagagtcttgcgctattttccatgctatctcaagctttttatcttgtggctagttcggggcaatgattttatctgattgtaaggttgcggttgatgcgattttgtcaaggactgtcctttcttggaagttatatccgttttttttttttttgcaattgttctctctttttgattctactaattcttgtaaggtttgttggattcctcgtgtgaagaatggcactgctcacaagcttgctgccaaggctgcgtcccaatacttttgtgttttttttttttttttgattttttgttatttcctctgttttggatgttctgtagtatggtatttttctctttcagcttttttgctggttctaataaagtgttgtttctatgttaaaaaagaatatgaaacctgaaacctcaaatacgacacggttaaatttgtcgttcaataccataagaaagaataagaatcaacaaatttatgtctgaaagagaaatgttaaagaatacttatggtgtttagcatccttgtgaggtgtaatatcgctattaataaaatttattatcaaattctatttgttttgctttaataaatattatgaaaaatcgttatattttatcgtagtattaaatactatgaatacctagtaacaatcctcatgagtgaaaatgtaagaacataatttcacctcctctaagctacaaagatatctattagactattactatagaaaaaagaaggttctgaaat

SEQ ID NO: 3959 - DNA, 2363 bp, Cannabis sativa
aacttcatactatggttggctgtccaggatagacttaaaacaatagctatactacataaactaaacattagagaggtagatacttgttgcatctgcaacaaccaagaagaaaatgcttctcatcttttctttggctgtagaataactggaagctgtctgcaacaagttaaagaatggctgatttggcaggtctaagcaactgatttgcactctctcatcaggtggattggcagatcaaaaagaactaagttcaggagaatggtttattctgcagccatagctggtctactatactttatttggttgcaaagaaatatcaagatctggcaaataaatttagaatcgaggcaattacctgtataggagcttaagtggcaaatcaagactagaattacatgtataatgccaaggaaagttgaacaagaagatagaatttggtttgaaaatttataaatactgctatgtatagattaattctttcttccttggaaaaaggagagctttggttgtaaatattgacttagaaagatataacggtaagtttatgatatcttatgtaatgtcaatattggtccagttcgatgtatactccatacaaccgatacttgcatactttttcaatacttggaaaggacatatcacttatccaaggtgtaagttaactttatcgctgattatcatgtcagtgtaaatccagtgtactgacaaatcatgagactaaagtttgaaacatataatcatgataattttcaactatgtagacaacactataatcatgaataactatatcttcagcatttaatagaatttatacattaaacatataatcattaaagtaatcatgtgaaccatgcaacataaaataatttatgatattttattaattagtaaatttgattatattaaaattaagttttatttagggcataaaattccaacacacccaactatatgtaaagataaactagtacaactgttttttaaaaataacatattttattattattttttaaaaaaattatttatgtggagctataagagtgaatccgtaaacgaatgcaaagatgagaaggaaagctttttttttttctttcggtcaaggaagttttagttaaaacggtggcagtctttaccaggttatgcaataagagtatactgcctttggaaattagccatgatatggagcaaatgatgtccaagttctagtggaggtcattgaacaattctggaacaggtatctattggatatcccgagactcgttgtgtaggcacaaaagtgtgggtggtatgagttttcaaagaaaagactttaatcttacttttttttttagaaacaagggagcagacttttcaacattaccagatttgttggccaccaaagtttttaaagcacggtacctcccaaaagggaattatcttataatactaaacttgggaaaatccaagctttgtttagtgtagcatttgggaggcgcaacatttggtgcacaatgagattcgctgatgcattggagatgggagttgtgttgacgttttgggtgaaccatggcttcctgataataacaattcactgattatttctaatcttccaaattcgctaaatgctatagttagttattttttggtacttggtgggggagttgggacgagaagttgattgctcatgctaagcattttgttatagttaacacgatatgttgataaatatatgttttgtatactgttaaaagtgcatatactatttttcaacaaattaatgacaagtggaaattgtggatgcttcttattttaggaagtgtttgcgaaaattgaagctgcctccaaaagtgaaaaagttgatgtgatgtgttggtataaggtgccttcttactatgattcaaattttgactaaaagggtgactgccaagtggttaagctgtcctgaaattggatcgagattgaaacaagtagagtacatatgatggttttcttgactggtgtatggaactttttagacaaatgaaggctgataaaggatgtttggtggaaactatttttattcccatatggggagctcgtaacaatgtggtttggaagaggaaagtattggggcttcatatattatcgcttatgcaagaggataccttgaacaatgaaagaatgctcaaaagtctaaggtggagtcttcatgctctagtttatggattttattaccacaagtttatagtgtcaaggtcaatgtagatgcaactttatttatggaatgacatggttatggcttcaattagcttaggatgacaaatggttttcgattgaaggttacactagtttttttgcagggagttcgtgaggctctcaggtagataaagaacaaataatagaat

SEQ ID NO: 3960 - DNA, 1426 bp, Cannabis sativa
tttactacaattaggtataaaatttgatgagggttccttataaaatacttgtgtcttgaatcacttgcggaacgcagttacctagatgacttatttatttatttcgtactgagttaaaatatcatcgtatattaaaaacaggctaaaagccaatgcaagcaattacagcacaatcaaacatctaaggccataaacatatagggaaacccaaccaccagacttttagctggtctaatgatatagccaagtgagtagggaatgcgcaattgagttatcaactctgttacaatgtgaaatagagagaattaaaaggcttcctaatatgtttggatgtcatttagcagcattccaaacttagcgcctgtgacttttgcaccttggacgtcttggcaaagagtgacacaatctgacaaaggagtaaccccgagcttggggtcatggctttcgccaaaagaggccgcaagcaaaatttccatttgagaagctcccatcgctcctagcaccaacccctatgatcaaacaccgcaacaccaccattgcgaaccgtctcgtggaagacactaccatcaacacaggtgtggaggtgttggccactgcattgacaagcttcacaactaaaggtagaggaattctcacctatcttgataacggtataggtaatccaatgatggagataaacttgccgttaagtagctcgttctcatgcataaaattttcctgtaatactagatacactaggataggaccgttaatttcttaacttcaatcttagccatataatacacactgccatgtaaacaatcagatagattgtgggaagttcccaattgttgaattatctgagattgccatccaaacatgatgcttttaagggaagaacaaattgaaagggctgtattgacaccatgtctttcgaggtttgcaagagtaggaatgatcatataaagttttgaacctttggtagtatattcagtgaccacaaaaaactctaccaacgagaaggtatcgaagaagaagaggattggtcataccctatttagcaaatctcattccaacccactcttgaccaagtacttacttgtattagtatagttccaggtgagcctattttttagtgttacgagtgggaatcaggacagataaaatagcatgagcttatttctcaaagaaggaattatgtatcaccttgtaatttaatttcctgccatcaatttttagctcgttgacagtaccaaagaagtgtctctattaaaggagatagagtttctgcattctttggaatctaaacatcctcgcaaatattgactgatttcccattaccaacaacctacctagaacctgctttccaaaattcctgacgccagcacacttttgtagatatatgaagcacatttggtggtagctttgacgtttaggaaggaggcat

SEQ ID NO: 3961 - DNA, 673 bp, Cannabis sativa
ccctcttctataactactaagctttccaactaatacagagaactcattccactttttccttgttactttcctcaattttttttctctctcaaaccatatatataaggataagataggagcactaaagatggtctttgtcaattatggtataacaaatctcaggtgagattagtggtcacacaacttggtcaatgtgaagaggtacctactttcagggttgtcatattagatcaatcaatttttattggttttttgttctgaattttctagagaaacaaacatgagaagggattataggaaaatgtggagagcagtgccttgcacaagccgaaaaagtctgcgaaccgattcgtggaaagacattgaagaaatcctcaagagtaagcttgcaaccatcacagaagagccagagagttgtgatgagaaccaaacttcttcaccaaggcttaaaagattggccaagaatgggaagaagaagaagaacaacaaatcagggaactttctcttaccccattttagtctcaaagattcttatgctcttttcatgactagatttgcctctaaaggtagctttggaggactccttcagtactgatcagcttatttatgcattagtacttctagaagaggggttggactaaaaattatgttcatgtgtagtaatataagtagt

SEQ ID NO: 3962 - DNA, 2540 bp, Cannabis sativa
ttacatttctctttcaacctgcaactagtagtttgcaacaaatatgtagaaaaaagtgtaccatcgtcatcattcatttgtcgcttttttcttctctgaataagatagaaggccactaaaattgacataaagcttaaaatgacaaccccaacagtgattcccgcaatcaaactagttctgctcttcttattgttattgacagtaggtgtgaaatctgcatcaaatacatatattcaactacattatcctaattgattgctgaaatgattccagcagtcaaactagttggactatttattaccttgagtagcactgattgctgaaatggaaggtccataaacattatttgttggtatgcaacacgttccttttccagcccaaaacagatggatttcaaggtagttctgtgagaccacaaccttaaattccttctggaccgccttgaaagagattccacctgcctcttttctgatatcaaaattttgcattacgcggtttccctgtcataaatttgcactacaaatagtcatgaaccaagttgataaaacattagtttaagttcaaaagaaaattaagagagacatcttaggaaaactaagcactcattacttggatataaatatcaaatatacgtttgccaagacttttccaggtgcgataattttcaaaagcagtttctgcaaagtggagtttgagagtgtagttgccattctgaaggcccagaccatagtatctcaatgatgaaggagaaagccttgcagtctcgaataattctgagtctaaagtacttatgaattgagatgatgaagtacttataaaggtaccactgtcattccaaaggaaacgtccaacattgcttactgcccatctttttgagctggtgacaaaatgagaagctgggccaagactctcatcatctttctcatacacaagaccattagaagatgtaatttgttcaccaccacagttgatcccaaagttagtatctgcagaatcaacaaacacaaataaaaaatttactaagtcttattatcagaaagtgcaagtattaataaagtaaacaaactgtgcaaactctacttacagaggggtagatctcgattacatggaaaatttctctgaaggcagtccaaacctaaaagaaaattactataaaaaaataagaataaattaattagatcaataatggaattgaattaatcattcaacaacaaaatttagataatttattaatttgcttagcctagttattcaacatagcttcagaaacaaaatacctgctgtttgaattatctaaagtaaaattgttgccaaccaagttcctgcatcaaaaaaagtggtataaatactagtttagtcttcatctaagtctttactatacagtaaaacaagaatgtacataacacaaaagtactaaaattaaacgtttgtaaagtaacaaatttacgaattacagctgtaaattgtgttgatcgttgacccaagaaggaatgcttcccacaaaattattgtatgatagatctctgcaggcataaaattaatatagtacaccagtaattagttaccatgaatcttgctaaacatactaaaatctcatatatattaacttacatattgagaagagataaactgtttttcctaggtaatgtaccatttagactattgtttccaagaaacctgattaaaagaaacagaattacttgctttgataaattccataatagtagctactattaaacatatgatataatgtaattaaagagagagacaagtatatattacaaataaacaagtgaatccatgttgaaaagagactctgggatctgcccatgtaacttgttgaagctcaaatccctacaaataaaaaagtagaattttatatatagttaggaaatagagcatgttgggtagttttgagtcccttaatgaacttacagatgtttcaattgtgtgagtttgccaatactcgatggaattgagccagtgatatcattgtttctcagttctctgcaagttatatacattgtgagttgtttgattataatccaaaagaactatacatatgattatgagtttaaacattttacttacaaggttgaaagagactccatattgatgataaatgagagagaagagcttgcattagatacatcattcaactgcctacatatgtatagttcacacttgagatcattagctttaaaaatttatagtcagatttccattgagctatgttactcacaattgtactaaagaagttagattcacaaagtttgatggtatgggcccttgaaaagagttccctagcaataccctgcatcaacacaaacaagtaactaaccattgttaatgtacaaatataaacattgcaatactattacaacaaattaatacacatttattcagttcaacttttcttacaagttagtaagatttgaccaagttcctatgaagtcgggtatcttgcctgtgagttcattatcatatgcataactggtaaataagagatcatcatgtcataattagatcacaacaaactt

SEQ ID NO: 3963 - DNA, 1179 bp, Cannabis sativa
tttttgggcctttgcaatgcacttcctctaaaattagtataatcactaaagggtatttggtactatttttattttttaattataaaattataattataaatttttacccaaaatttgatatttttgtaaaaactcctctaataaatcatgctcttgacttagcactcacatggaatacaaattcattaataatctcatctcgagctaattaaatcataaccgaaaaaacttaacaaaatgttactaaaatatcatatagtattctttttataaatcattatccataaaatgctaataatttctctaagctaccattatcatatagtattttctagctaatctaatgcactaatacattctttgttccatccccatataatctctcctttgcattacttgcctgaaacattaacaaacaaaaaacaaagcttagagtcttattaaacaacatttgaatattattaataaatccactattaaccaaaagggtaatatgggaattgaaaatatacatatataatagagatgaagaaaagggtagacctgtttttcccaatttgtaaaaccagttacaagacaaagcaaaatggtttgcaaaaatgcaccactttgtataccaatccatagcccttttcctctcaaatttgcccaaaagcccaaaattgcagcaattggaattccacatagataaaatgcaccaagatttatgaatgcccctatgtgttgccacccacatcctctagcaatacctgaaatgtatacacatataaatattgatttataaatgcactattaaagagttactagtgactaaaatataatatttagatacaagttgtcattaatttagttttactcacaacatgtattgtgactaaaaacacatttagtcgcaataaattgtaatttttgtgactaatacctttaatcacaaattttttagtcacaacttttttatttttaatcacaagttttgttatgactaaaagcgagattttttacagtgacatctgatactaaatattaaaatgttgaaagagtaatttatatatttttattagtaataacctgacatgattccttgtatgctgtctagtacgatagataaacaaattagaggcgccatgtctgtgacataactcacaacttccttctcattactgaaagtgtaaccaaaaa

SEQ ID NO: 3964 - DNA, 1145 bp, Cannabis sativa
atatatatatttatattactattttatttttataaaaattaaaaaaaaatgtttatatttttttaaaaattatcattgtaatatctttatctattgcagttataaaacaaaatagttttttttaattattatttcttgtaataaaaaattagagaaagtgaataatatttctacaaaataaaaaatataataaaatttaaaatagtacctttaaacaaattataataaataacacattttgaatattattatgttttatttttataaataacacttaaattgaatattttttttagtaaaaaatgattttattgaatgaatatataacataaaaaaaataataattatataactaatatatatatattaaattaaaaattaagaataaactaaaatgtataacttatatatttgaataattatatattctggcaagaaatatactaatgtgtcaattgatacgagtgactgctagatttaacataaattattaccttcattatgtctgaaagtaacactcttcgttgatatgagttgactccgatgatggtataagaaggatacttcttcaagcaataacaaagatagacatggtaacccaccataagcaaaagactcaaaggcacaaaaattgcgtctaaataaccagccatttttctttgataaggttgtgtatgtaattaaaacaccattaatttaattatatgtgagtttggctaaagctagctatgtatatatatatatagcgtacatctttatatgcacgaaataccaactgcttcgtttggatctccacaaactttgcctaccaaacacaagaattgtgttgtgcataaatatatatatatatatattatatatatgtacatacatggaagcccttgagtgggctcctcactagcccactttcacattctccttcattagtaaaaggagtactatcgtattaattggctcttgtgtgtagttagcttctggcccttgcattgcatgtactagtggagtttttaggtactgatgatcagctacgtcgtccaccatcaaatagtaaactttctccttttattttctttattaatttttgtattagtagtgggataatgtgtggtgtgaacattttcaagattaattttatgtatatttat

SEQ ID NO: 3965 - DNA, 746 bp, Cannabis sativa
ccctatattatatcataaaaaaatacattcataatttacactttcacatcaaaatataatgtttgaagaattatttgaaaaaaataataattacttaacattatataatctagaattctgggaaagagaacagatttttgtcgtggctaatctcttttttatttatttatttttgaaagaaaacatggatctcattaaactaaatcaactgcggtaagagaactaaaaaaacgtgaacaaacattcgtttagatactctcttaacaaactagtaacagaagtagctagtgcatagataacaatcacaacactattcgcagaacgggaaataatcttacaaaagctaccaccaacaactactaacaaagaaataaaaataattggttgaaatgtgttatttgaattgggattatttatccagccaatgacagttgttgaatcactttcaataacaaagatagaaaatatgaattgacgagaaatatgcaatcccagtcgaaccgcaagcaactccgccacacacaccaaattccccaaccaatcccaccggtcagcaggcccaaacaaccccctcaccatcccgtatcaccccgtccaaccccctcaccatcccgtaacaccccgtccaaccccacaaattcacttctgaactgaagtgtaaagtattcaaagagaagtgacccaccggcggaggacaccacctcggcgtggcccaaccagcattaacggcagctaccataatcaaa

SEQ ID NO: 3966 - DNA, 1022 bp, Cannabis sativa
ttttggataaatatgtaataatggatgaaaatggatttctaattgatagaagatcaaggctgttattggagaattagtgacaaactaatgagataagtgcaattctatacaatgccttaaataaaatgtatgatcttatagattatgagcattgattgggtttattattgtagataatacaatactgtgtatagtacatataacacaaacaccacaacaataaaaaaggattggtttccaaaccaacatcaacagtaaaaatattaaagaaagacaaaaataagaaaaatcatataagatacataagaatagttgtagtaggaacatttgtagtagtaatgattatcatgattcttgttaatgacacaagattagccattaaccgatctaaacatattcattagattatgtaatagttatattaataaaatatatattattaaaaacatttgaaactagagggcatgtccttgccacaggtgctaagaaacttctccactgcaactgaaacatcaagattgatgatacccaaaatattagctttaaaggcagtgcaaagacatactgcagcttccagatcaactagacctaggagaaggttgcaacaaggggagctccctggagtcccaataataatgtcccccaaattacttatcaagtgtccacaacatccaaactttagagggtttaatgaacatattgtcctagaattaggaggtgataggtggtgtctatgatgacccacaaatggtggtggtgggcaaatgccattatggcaagtggagctaaccatggtgaagaacaccaaattgagggatagaaagaaaactatggatacttgagctttagaagtcatatttttcaaaatgtacaaataattatgaaggatttgaaaatactttttattagctcaagataagttgattaattgatgaaagatgttgaatttgatgtgcttttataagtattcatacatactttatttagagtaaagaaatatgttaaactaaattcaagtatta

SEQ ID NO: 3967 - DNA, 1458 bp, Cannabis sativa
ggtggaaaccaatgaatagagaataataataattgatgataatgacaataattaataggtggtccaaaaataaaatggaaattaagatcatcaatttcatctataaaaggaaaattgtaattgaagcaattaaaattattgttcctaattttcatcacttgttttaatatcattatttgtcttgttttaatttcttgtttacttaaattagtctcccaacaaattattattgccaaatagaacaaaagattcatttaattagtaattagctacaattcttatgagaacgatcttagttaattgaataattacttaaaaatgatacatatactcgtgtgtttcacaacactagatcagtcactaattacttaacattttcatatatgaattatgatatagtaaaataattagggtaatcctataatagattacatctataataatatttttatagctctctattagggctaaacacgagtcgaaacccactgggaattaatgggttctcggtgcaaacaaggtgtactcatacttgtcgtgtgataacagagtttgactgaatttacgggtcatgggtggatgggtctactgtcataattctctctttctttctaaaaaaacaagtgtcaaacctctactagcaagaggaaaaaaaaacaaccaatggaacacaataacccccaatctgagacccactgccacctatcctataaaatttcaaaactcacaacgagccactaccatcaaccatgccaaaagatagagtcgagattaaggatggacaaggggcaggaaattagcagggattgctctcccgtcctcatctccgtaaaagatttttattcccatatccccatcacatccccgcatattggcaggaaattccctaatagggtgggtacgggacagggaatcctctagtatagggtaggtacggggtaggaaattccctaatataaattataaaatttatataaaaaaatttaaatatataaaaatattaaattatataaaaattaaatattacacattatttattattcaatatactacttataatccaaaatataacttaaaatttataaaaaaaagatactgataattaaaaagaaatacaaaaatattttataaatattattataaagataataaaaatattaaacgtgtccccgtcagggcagaagtatcatccctgtctccgcaccatttaacattcgaggaaagaaatgaactccctatcctatcctctatttagatggggaattcctgccccattagggaaaaattcctgcagggccccattctcatgagaaaaatgtgcatccctggtcgagatctacgaaaaaaaagcagagggtgaagagaacaatattgagacaatagatgaagataaataaagagatctaaagacaaaggggtagagagattaagaaagaaaggggaagagagaggttcaat

SEQ ID NO: 3968 - DNA, 1928 bp, Cannabis sativa
tctggctgttcagttatgattgttagtgaacttagtcctatctcgctgttagtgtcagttaagttattagttaactaactgtcaactaatcatgtgtaccggttcaagtctatagctatatataagcaatcttataaatgcttagaacttaaattttgtaataactttaatacaagaaacactttttctttttctctattttatcttatttactctttattctccaattgattttttgagctttgatcaagctatggagtgattctcaacagaaatacattaatatacgtattcatataagaatacgtacgtggagctagagtcagattaatcactaattaattatgcactttccagtgaagtgattaatggataagtctaaagataagatgtccataagatgattatcatgaagaaaataaataatatgttgaagagaagaaaagagggatgtgggtctatttgttttgaccttttatctcctcaattgctagtgtgtgtagatatatgagattatgaggtctagtgactaaaaccttgcacctaattgtgaggaagcaaaaattaatatatcctcatatataataaaaaataattaataatatatgtggaatacaatattggcttctcctttatgtacatacatctttattatatggaattaaacattatttgagtacatgacctaaacaatgaaatgtatgtattagaatcaacgtaccatattgcttatgggcatataattgatttcaaattatattactcaaatttattttagggtaaataattatttccttcctaaattatcggtcttataattttttaacccacaatgttttgtgtaaccaaaatttctccccaacttttttgtgtaaccgaattcccactataaaagatcttacttttagtcacaataaaatttgtgattaaaaataaaaaaaaaatatggctatttattaattattatattgtaacttaaaggtccgtgactaaaagtattaaccacaaaaattaaaatttgttgtgactacgtgtgtttttagtcataatatttgttgtgactaaaattaaattagtgacaacttttgactgaaaatttgtaattaaaaataataattttttgtagtgacccctgaacatatatagtgagtacttgcgaacattcattttgttccattttatacaagttttttaagctagtttgttgttgtggctacaatcaagtacaaggcttatttaactaactgaaattagataaattaagtttattgatattaatatatatatatatacatactctaataagttctaagaatgaatatatttaatttatctatgtattttctacataaacttttgaatcacaacatattaataccatataatattctagattgtttagaaaaaaaatgaactgagtacacctgatcatccatggtatgtatgcaataattactctaatttatgggaatttttaacaagaacgaaaaagttcgaagaaaattttggttacataagaaagttgagaattgtaaagtcaataattccgtggaaaatataatttataaatatatatctatgcaaagcttaccaataattaaattatgttattattataatattatttataatatgtcatgttgatgtaatcataatcatgagttatgtttaagtattttattttatgcatgcatggtttcactcgttatccactcaaaataataataaaacaaatgcttttcatatatggcagggggatataaagtgtgaacgattagtatggcactagtgaatgtgattagttacaagacttttcaactttgctttttatgagaatctggtcccccatgtaattatatattccactatattgtttgcccctacaacaaaagtctaatttgcatttttacctctaaatttttgttcat

SEQ ID NO: 3969 - DNA, 1047 bp, Cannabis sativa
taaaaattattttaagttcattttttaaaaaaatattatagtgcacttatcattttatggagtgcaaataaaaattacttttacagaattcaaatgagcaccacataatcttgaaaataatgtcttaccatttagacataaaatttgttataacaatttggatagttatactttaatttttatatctctatacatatacatattatgatattttacatcttaaactttaacaattttttttaataaaattagaataatttacgttacttcattgtaggtatgcttgttttattttatataagtataaaataaattgttataaccttgttgtctatacaaataaaagaacattgttttctaatgagccgaggttgttgtttaagaatgttataattttattgtttaaattttttagagtaattttatcctatgtgcttgcgatatgaattctgcaatttagggtttggcaaagtatactcttcggttaaatgataagctatcctagtttgagaaggtgtcatcattgattgtaaattgttgtattattaatcatgtgtaattttaatcacattgttaaaaaaaaaaattatttagatgctcaaactatataaaaaaaaaaaaggtgtatttattcttatattttacaataagagaacctttagttttaaatgtattttaagatgataaaagttttcacgtgcaaattttaaaattggcttagttagaaaagatgagaaaaagaaaatcaaaattaaaaaattgggtcagtcttctttttgattaaaaactccaaatgcaacagtgttagacataaaatgacagaaatcacagtgtcccatataaaaataaaaattaataattataataacaaattacaactgagatacaactaataataagctaataattttattttatttttaaatttttttgcttttctttttaattttttttttctcttttgtatttatggggaacatagcctcataaaatacgcagaagaggcacagcaaacacagcatggtttataaaataaataaataaata

SEQ ID NO: 3970 - DNA, 1375 bp, Cannabis sativa
caacaaaaaagaaaaaaaaaaacagcataaaaaataacttcaaaatcatacaaccacctaatataatataatatattaaaaaaaactaaaaaatgaaaataaaaaagctaagattaaagaaaaataacctttgctccattgaaggttaccgtggggaagacgatgacgtgtcacgtcattatgttcccctttcaaaaataatgttatttttgtaaaaagttacctaatttagtatattcctaaaaaaatccttttttttaaggttagatgtgatgcttcaatattttttatcttaatttattttattttcttttgttaaacgatccagaaattaggcaaccgattagttgacaagtttttttattctaatcctgatcgatgtttcaacagaaatatcttttaactgggttgtaggctattattttatcaattatttttaataaaattgtatgatatttgggtaatggatgtacaacattctaacattttatagcaaaaaaaaaaagaagaaaaagaagatatttatgtgtaatcattaactgatttcaatatttttcagttagtgtttttttttttttacatttgagttttaactgttacatttgtttggctaaggttctacttttttttttatggctaaaagtataagataagtataaactttgacttatttttattgtttggataactattacataaaaataattaatgaaaaatattttttaaagtatttaaatatcattaaaaaaaaatctttttgtaactatataaattattttgattttaaaaataacttttcaaaattcaccccgattttgactaatgatattaggtaaaacaagcctcaaacaattgtatagcatgtttttggccatcttatacaccacattgaaacgctcaatagtctcgcactatatatataagaaaattactttgggggaataaagtaagagttgtggcatttacctcttttgagagagctccggagtgaaggaaggaaagagtagctttagttatgtctccaattatttttcacatatttttgaaaaacatgctattgaaaccatccggtccaagagctttggaattcgaaatatcaaataaggaatttttcatctcctctgcagaatcaggtcaagtaagaaattggccttcaacatcagtaacagttggcccatctcttacaattcttacatttactcttctcatgcctcgcatatttggacccgaaagctctgaataaaactctaaaaaagcctcagtgactctattcgggtcatcccccacttgtcattagtgttcctaattgcatatattcaattttgctctctttgctttttggcccaagccagctttgctttttgagaaagcattg

SEQ ID NO: 3971 - DNA, 979 bp, Cannabis sativa
aatcaaggcaatccacttactgtcaaaccctattttttgcattactgcccgttgaaccaaaaaaaagttaattattattattattattattattttagtatatgaatatttctctcagttaaaacctaaaggtaatatttgattattaaaataataataataataataaaaaaatgggaatgagtgagtaaaaaaaaaagagcaaattaaagagatcttttctccacttccatcacttttacgttaagtgggttttatcaacaaaaatataataataaaaaaagggactataaagagagagaggcagattaattaaagaggattttaaaatctttggtgtaagagtaaaacatagaaaaaagagatgtgagaaaagaaagaaaataaaactgttcaaggtcattcttaaagtttcataagggtaagcgaagatccataaatagatctatctctttttcttcttagttctttttatttttgttactgcaaagagtcattctaatatcctttgaatcactagacttcaaaaaataagttaatgtgatatataatcaaaggggaaaggaagagactactattctcacgttgtcgatttcatcatagatttttatatttcttttcgattcactaagcttcagaaaataggtcgatatgcgatatataatcgaagagaataatataaatttttataataatattatgctgcctaatttattggaaatctttatggttttcctttagttcacttgacttcgaaaaataagtgaatatgtggtatataaccaaagaaaataataagagatttgaagaataaatgtgatgctgtcaaaaattatcggtataccttgataacaaaataaatatgtaaacttcatacctgattgggtatcggttgattagcataaaggttatgatcaaattattatggttgaatatgcctatacatattatgaattaataatgaaatatataccaaact

SEQ ID NO: 3972 - DNA, 828 bp, Cannabis sativa
acttatataacactatattgttaagtcatttactacaatttctctataatagtagctagagagtaaagactttttcatgaaactaaaaagattaccaaataaagttgatactattctagtatgaacaagattcgtggtgattgtatttacatcacatcaggcttgcttctacattaaatcatcaaatattgatttgattttttagtaccacaagtcatcaataactccaactatagttagcgtagcgacacaatttttgatggtgaccaatttatttctataaaatgtcaatatagatttgacaagtgttcaacgattatcaagtaatttgtgtagtaacctttttttttctaaagaacatgtaacttcaataaaaatatgcaattagaacaagttaggaagttcaaatattacataagtttggaacacagccattctaaaccacctcttgatctcatccctaatgctctctctcctagcatcttaataaccttcatggttttttgaaatatgtgttttttttttttgaaatatatccatgttttattgaatttaataaataaatactgcatgcaaaggcattttggaagtccatgttttattcttattatgttttaccatgttagcgtataccaacagcagtccaaaactctaaaatttaccataatatggttttctcttttcgaaaattgtcaacctatttctcattccacatttttatgttaaatattcccgtaatttgcacacattttttattttcaatttatcctcatattatgagtaatatgcggctaaacctttccaattaccattttacttgcacttaac

SEQ ID NO: 3973 - DNA, 552 bp, Cannabis sativa
ttaatcacgcaaactcatttctcttgtcctggaaatttacttatctagatgtggaaagttttttagcaaaattagtcagcgcagtgtagttgaaatgttgaattaaatttgaatgacgaagttataaacaaagtactaagtttataccttaaaacactaaaaaaaaagctaatacaggattgcaagcagcacaaaagatatgatatttataacctcaattgaattagttcaaatggtctcaaaggcacaaagatcaaatattacaagacttattaatacacattaattatttaagattcatacaatctcaaaccaagttatgaaaactaacacaaattaacaatcatctaaattttgtaactttttaaaaagtaaatagaacccagaaggcagatttcttgtgattcattcaaatttcaaacaaaccgaatttggattcacatatgttacactataacaagaaaaggggtcacagatctggatataacattaagaacacaacacacacaatttcatcactaacaattagaaaaagatgaaactttagaagga

SEQ ID NO: 3974 - DNA, 1656 bp, Cannabis sativa
tcggtacaataaaaagtaatttacggcgtaaatgactaagtttaattctcggttataaataaatacttaagtgtcaaattattattcacgtgttatttttttattagtatatttaaattaatttttaggtaaacataaaaatttaatgatgtggaccaatcgtaatctaacacacatgactattcacttgatacttaacgattagatacatacaaatgttccagtcagagacagacacagtaataatagtgtggggtagtaaaaaaaagttagcttaaaaaaatatagatattttttctatttaattaaataattatagaacaaaaaatagtaaaaagctccctataaaataattataattttaatgtaaaataaataataaatatttttataacaattaagcccctacagatcaaaaattttgggtctgtcacaacttcaatacacatgtttcaaacatataacttaaatttggatatttatctgtaatgggagttaaacttaggagtttattctgcaaattagtttacactataatgtattattgtatatatttaaaacttcgacagagttcgatctctccaataatattacccaaaacgcagcaagcacgtaccatatatattactagtaaaccattataatatataaacttaattattaccacaaatcatatatagatcataactattaaaaaaaaaaaaaaaaattaaatacatattattacatagcaagctaggcaggtagaagcctagaagggttcagtcttagtactgccggtcatgaacgaaatgttaggcttctgttcaaagtctccatgaccatcttcatgactattattattagctcctgaggatccatagtgctgtatcatatgatgatggtcattattataacgaccatgaagaccatgatcatgatattgatgattataataggtggagaagacattataattaggcgggtgcaccactggttgttgaaccactacgtacattggcattactgaactcgacggagcatgatgatgagtagtagtactaatactcccataatggactattgcaccgtccttaataatctcctttcggtgaaagttccggtgacaaccgcacgctgcgcacagaaaacccctctgatctccgccgcctccgcttactacttgctcagctgtttctgctgctggtgtcatgaactcacggcagccgtccacagcctggaggcccactgaaatggcatggtttcgcctgcattctttgtatctaactatcacactactactcatggtgatctaaagtttgataatataaataaatgatgtgatatgataaggtgtatgatatggcatatagtatatataggagagtatgagagtagtagatacagaatttggcttagctgtgtttggatttgtcgtaatataatgcatggctgacaaggaggacaagtgtgaataaaagttggagcgtacgttattatagtaaaacataattacaattagagaattgctaaaagatcctcatagacgagttgagatatattattgggataatttaatattagtctcatatattttaataactattatgtaacaaattgatagtgaaagtgtaaagtactcttagcaatgcatgcttatctagctaggacggtggt

SEQ ID NO: 3975 - DNA, 891 bp, Cannabis sativa
ataagtccttccaaggtcctgaaactttttaatcttttgcttgaagtgcaaacattgctgaatccacttagctgtatgcctcaccagaaacccttgttgacaccagctggtacccggatataggtgttactcaccacctaacaactaatccacagaacctatcctatggcaatgactatcaaggtgatcaacaaattcaaatgggagatggctcaggtttgcctattcaaaaaattggaaaaacctcctttatctctccctttcattccaagaatctagttccaaataatcttttacacgtgccttccattacaaagaatttacaaagtgtttctcagtttgctaatgacaatactgtttggtttgaattttatccttcttattgtcttgtcaaggacttggatacaatgaagaccttgctggttgggaggcttgaccaagaactctacaagtttgatgccattcaactacataccctcaccaaaaaccaacaacatcagccacaaaatcctactgtaatgtactctagcctacctaccccatcctctcaatgtaactatgctattattccccctattaatgttgaatactctctttggcacaatagactttgccatcctttagctagaattgtacaaactcccctttcctacatccaatactgtctattccacaccactataacttttacattctgatttatggggtgttgcccctactatttcatctagtggttacaaatattacattagctttgttgatgcatattctacacacttggaaatacatgctaaaaactaaatgtgaagccttacctactttcattagttttaaggctcaagttgaactacaactaggacacacaattaaaagcattcaaactgattgggg

SEQ ID NO: 3976 - DNA, 1126 bp, Cannabis sativa
actccgagtaatagacatctcagataaagaacattttatccacctcttgctttaatgctttagatttaatagggtcaaggggacgccttttttgctgcactgctggcatgtctttgttgacattcaaaacatgggtaattacgtgtggaattatgccggtcatgtctctgtgggtccaagcaaaaatatctatagactctataatggtttccacaatttcgtttctttcttagggattgaggtccttccctactcgaattactttggttgggtcttgaccatagatttgaatctcttctacctcttccatgggctcaaggatgacctcatttcccactcgggggtctaattcatcctaaacctctagtggatgccatccttttgtgaattggaccatgaggagagctaatttggaggccacattgtagaaatttcttgcttccccttggtttcctcagacagttcttactttaggagagtgggtagggaattttttgagacacaaatgccttattaaggttataactcccaaatccaccaatgttggatgccccattattgtgttgtaagctattggatagtctaccacaacaaaggtgtagtacttgaacgtactttgaggagtatttgggcacagggtcattgggagcctgatttttcccactagcatgatggaatttccattaaatccaataagttatgaacccttaggtgacaagtcttgatccatgacgccaatggtgaggaaggcctctttgaacaagatgtttactgaactcccgttatccaccaaaattcgtgttactatcttattggcaatgggagttttaaataccaatgggtcatggtgtgggaaacggatcatcttggcatcttcctcagtaaatgttatgggtttatccatgagacggggtctctgagttggcaattggcctacttcccatatttcttcgtaatgatccagggctttgacagacctctttaacttattacacattgaaccccctatatgagagcctctggatatctcatccaaagggagcaaatagtcatccaaagggagcacctaatgtgatagcaaaatacacaaaaggaccccaacaaagtatgtgagtagcaatatgac

SEQ ID NO: 3977 - DNA, 1448 bp, Cannabis sativa
  modified_base (182)..(190): a, c, t, g, unknown or other
ctctctctctctctctcattagattcctacttactgattcatacattataaccttaagagatttataccagatcccatgtataatgatctgaatagtattatatctaagtattaatacaactaaaaggggagtaggtcattacctgctaactaaggggaccgaacctctataaaaatccttnnnnnnnnntactttctagttctaattgtgtaatacgtggcaagtatcagtttaatatgactctactatcggttggccaaaatctgaggtcaacactctcttcatgggaaaatttcttttgcaaattgttttatttgtgagaatccttctaagcacataaggacccattagtccttcgggtgttagtggtgctcctttttgttttgagcattcatgtgggccaaacgactaagaatgtatcgaacctatgggctagtcatcttcttatttttggtatggctgaggacatatcgaccctgtggattagtcatcttcttatttatttgtattttttatcgagaagttttcttcttatttttttttgggtcttatcatgaatgacattggtaatctttctaataatttcaaagatgtttgttttttacattgatctagagattttaattttgtagccgatatcttagctgaattcactttaacaacgtgcactagcactatttggtagccatattacccaaattgtatttagaacttattaatagaaaatgctacccagtaatacattcttgcccccaccttactcttgagtagtgatggaaatttgacccgcggggacgggtacccgtaggtacccatctcaaatgggacggggattacccgccttaatgggtaatggggcgggggatggggtgcaattttatatacctgaagcgagtttgagacggggtagggggtgatattacccaccccgtattcgacccaaatatatagtttctaaactttttatttagttttccgattattaagtactaaagttattgtctatacttgcaaagttaactattaatcttccctaatttactgtgtaataaaaactttttaatatgtggaatgtttacttatttaaagttaatatcttattttttattttcattttaaattgttatttttatttttaatcttaatgggtacctattgggtccccatacctaatggagattcccttactcggaacccatcgaggattaagtagggcgggggtggggatgaaaggcatgaatataaaacagggatggggttgggaggtgcattactcgtttattacccacccaatttttatccctactcttgagatttccataaaaataaaaaataatagtaaaaaaatagattgatttatataattatctatttatagtgtatttggtaaaataaaaatatttcttaatagcattttgtatgtaatctcttatcttttttttttttt

SEQ ID NO: 3978 - DNA, 2096 bp, Cannabis sativa
tcactttttctctgcctaggtcaatgggtcatcaaaatcagtatggctttgtaatgatgttaatcctacgtcgttgtagttatgtatagtagtcaactttggaatttatgttaggctaatgatgatctcccaaaggacctgaaatctaggggcttggcacctccctgacaactgaaagcttgctctattatttttcttggcaacgagaggtccacttccaactgttccctcacttgtagagtttgagagtggagtaaatcgacaagggatgctaatctgtctatgaatgggtctctccttaccacatggcgcttcatatgaatgccacatattttggttaaaaaatgggtctaacactaccatgaccaaccaataaagtccaatgacaagattaaaaaaatgagataactttgcaggtggttggagccgacatggtaccccacacaaccaagaccctatagtggaagatgaaaactatgtgtgtgcgacgattacaaggaacatgatgctcactaatatgaccaagaaggatatgaagaagaagatttaaatcttcatactatttgcggtcattgtggacacgtcgaaggtggtccaactaaggccacaagctgcaagctaccatattaaaatggttacctaaagagacactttccctagaaaacaagaatttgttctaaccatgaaaattctaatggccaccaaaggacttgaagtaggcctagttgtcatttatccaactattaatccttttttaggaattgtaccccatgtgatactcaattcaagtacagaactttcaggcgagcaactcatgggtgctgctgtaaacagacatgaacaagtcccaacacacaacatgaaccgacatgctctcctaaatgagacctttacaaaagttcatgggttcttctaaaacactacatcaatggaatgtgaacaaggcctgcggtgatagatacccgtggggaagacaccaacatggctcgtagttacctcagggaaatctaagattatgggcccatagggaacatcaaagaaacttaagtatgcttgaacaatgaattaatagagttctagggttaagacaaaaaaggtttactacagatataaaattatagatcctaggcaacttgaattgcgggaggcttcaatgcacgtcagaataagaccaaggtacaagattgtgtcacttcaacaagaaggatccttcaaaataatctaaattcttgaagaaggggtaaacatcacactcaaggatagtataattaagatgttatgacagagtatcatccttaaggaagaaaatggccttagtggccagaagacaaggtaatgtcaaaattcaactttcttatgtatgtacacaaggtggcccttaacatgagatgtatgctattcttgctgactttgattggagcaatgaacaggtggttcaaaaatcataatccaggatctatcacttcttggtcacaattattcagaacttataaggtagttcgttgatgtcttggaagttgaaatttgaggtgaatgcattggctaacatcacacaatgacctttcaaaactttaaaagcatatatcaagcgtgttactaaagaagccaactagaaaaagatggtagatgagggaaataattaatggctatccaagttggaataaccatccaagaacctatatgggaggatctcaaacataaagggggttataagcgtgatgttatcaccctaagatcctaatagcttattaactaggaggatgccaatattggagctattagtgagctttcatccgtaatgactccaaatttagtgcccattccaccaataaattacaatttacagctctctaaaatccaatattcacgactccaaccttagtctaggccctatgggggttctactagtggtgtaatatcttccttaaacaaattatgaatccaactctttgggacatggtccaagttaacctagatgtgtagtaaccttctctaaatataaggaagcccttacagggtaaattttttctcataaaatgtacaattcatacccacaaagttatacttccactttagcaaaattacaaactcaaatg

SEQ ID NO: 3979 - DNA, 1915 bp, Cannabis sativa
  modified_base (1197)..(1207): a, c, t, g, unknown or other
catattggtgcatttcaatctatccccctctttttttttccaaactataatattcaacaaatcctgattttatatattttcagaataaggagtgtgattcacaatataaaaatacaatcacgacccttataatataaagggtaaatatcatttacccattactttataaaagttataaattagacattttattttattaaatgataaaataaattttgtatttttcaaaaattgtacaaatatgatctgaactaattttttgttaataataatttaatctagagatgttatgataaaattggttatattttctgcatctgttcgtattagaaatagtcttaatttaaaatttgttatattaaaaaaaattgtaaaaaattgaatttagggttctatttttaccattttggaaaatataaaatttattttatcatttaacaaaatagaatgtctaattgataacttttacaaaatatatggtctaaaatagtatttaacctaatctaaaaataagaagggaaaaagaataagtgtttgtttgtttgtttatttattttgttaagttatcactctttaattgagttagccttccttacaccgaaaaaaaaaaatgagctagccttaatcacctttgaagtcttttctttattatcaacgcattccaaatacatataaaatgtagataattactaaaaccaagtagagtcaatagccattttgtatgaaatatgatgtaatatcaaatactatattttaattgagtaatgatagatgcattcattatacacaatttagatgtaataatgttatatcttgtatgcatctataatctattattactcattttaattaaaaatatatttaaaaaaatagaaaatatgtaataaacccaattacataattatagtggtattggtgcttcttacaaaaatatccaatacaaaaaaatgtctaaacaacataaaaattaaaaaataaaatatgatgggctcccttaaaaataataataataaagttgggtatcctatgtaagagtttacgcttatggtagtgcttggtgtaaccgtgtaagcggcttgttggccagtcctcatagttttcaatctaaaaaccaaatcataaactttttttgtttgatcaaaccaaccaaatcataaacttaaaattaaaacaataaatactaataataataataannnnnnnnnnnataataataataataataaccattcttctgcaatcattaacttattttttatgataactttttaaaaagattttttttttataactaaaaagtcgtttttaaaatgttgttatcgttaaaatatttttttttaaaataaattaagaagtaaatatgtatcaaaaagaatggaagtaaatacattattctaacttttaaaaataatttcttctaattgaagttttaaattatattttttttatttaaatatataagtttaattttcggttgtaaataaataattaaatttaatttttaatgtaataatgcttaatttatatttttaaaatttatgtaagtactaacaattgatgttaaaatcaataatcacagtcttttgattaatttatatcattaaatttttatgacttatttaaaagttaatatatcatttgaataatgttgttgaaactttaaaatgaaattctaaaaatataatttaaatatatatattttttttttgctaaaataatttaaatattattagtgtaacgcaaattaattttttaaccttggtgaacgaatagcagtgtcgtctcacttaataaactctttaaacaacagtattgatacgacacgtcctctttccaataaaagcataacagaattgtcgttttttctctcaatcgagagagcgcgagacagttgtagtagtttctggaaattaaa

SEQ ID NO: 3980 - DNA, 1196 bp, Cannabis sativa
tggaggggaaaatgtacatcttcccatttcttttttgctttctaagaattaaaaaaaaatcttatatattttctttttcttttttaagaataaaaaaaaaactaaaacttgtaagaaacaatgtattgttttgagaccctttttcagatactaatattactccatagtccataccaaacatccacttatttagaatcattctgtttttatttaagtcttcctatgtagtattgacttgacaaaatatttatatattattttattattattttcatgatgcattattttacaaatgaattactcattctttttctactttttcttaaataataataataataataattaattcaataatatctctacacaccaccttaataaattctctagatcaatagtactaaatattaatacgtgtacatcttccctccacaaagagtataaatttggtaaaataaactaaaaacccaaatacaaatatgatgccaaaatttatagtatatttaattatggcaaatgctaaaaatatccatagttgttatttaagcaattaaaatctcacataattttaatttaataattattataaaggctaattaaaatttttatcacttaaattttaacatgtattacatcatgtccattgaactttttagactgttaaatgtttttcaaactattaagattattaggttcatgaacttttgtctaattttactaatagaaacttaacattgatgaaaatttagggggacacaattcgatacatgtcaaaattcagtggaaacgatttgatagatatcaaagtttagagatactatttaatacatgaacaattgtcacgtcacgctaataaaattgaacaaaattagacaaaaattctttgttctaacaatctaaatagtttggtggtaatttttaacagcttaaaaaactccaagagtatgatttaatacatatcaaaatttgttgataaaaattctaattagcctattgtaaaatatcattaattatttataagacaccacttttgtctatcactattgcccaataacaatacatttgcagttcgtttagtaaataacattatattttgaattgacttatgtatgcatacacataatattttaatataaataaaaatttcataaagtatttacaaaaatatgatatatttatatcatacaacttcatat

SEQ ID NO: 3981 - DNA, 1618 bp, Cannabis sativa
ctgggtgattgggttatatttagggttagtgctatgtttatatgtgctatatgaatatttttttttaatcaactcattaaattaggaaagacactaatagtatcctcggtccaaaatcaacactaattttcttgagttttttttttttaaaaaaaaaaaaaagaagaaagaaataatcagctcattagtaaattgacactaatggtaccatcagttcaaaaaaatcgatactaattttgcacacctattaattaatagcgtcaatttcaagtgttaaccaacgtgttaaaccgacaccaaaaaaaaaattgttttgtattgatgtgaactttgtctaatcatgtgttgtatcacacactggatacggcctatttatatagatatataggtaagtgtacatcagtcatgtcatgatctgagtcacatatattatcatgatatatatgatcatatatatatatattatcaacccaaaaccatcgacaatgcataagaaaaggggtcaatagagcacacctatatgtataataatataagcttaggaaatttatgttgttttgtgtttttatataaataatattatccttttggggcctagatttcatgattacttaatcaggtagcttaatttatcataacaaaaggggaatctttatttgctgtctccaatggtcttgtttgtgttccgagtggccattaaatattatatacaatattgtacaatgtcatgtttttccaattacctaggagagtagagagcaggactaaatgatcaataaaaacctatactacttgatcatggtcacatatacatatataattaaacaaattaattattaaggaagaaataatatcaagattttcgatttaacaaattattttgttttaaatcgatcatttactataatggtcgcatgcaaattaatttatttgttttataaaaataaaattatggaaagttctaggtggcacgtctctaattccatatccaatgtaaacttaaaatatctttcttcaattttttttttttttttgaaacagatatttctttaatttaaataacgattatgtcaggaaacatatgaatgtattattgtgtcccgtgcaaaattgtgatgagactaataatgaaatttggaagaaaataagagaagagagacagataatataaattgattgaaacccaataatatgggaccataataaacaagagccattaatatacacccaaaatgaaaaataggattggatatgtcccatatatattttctttcatatatatatatatacattattatgtatatgtctcaaaactcaggcatgcatgcacaaaaggataaatatatacaagtgatgatttgaagcttgaccatacgtactgtcttctaaacttgcctctattcactactgttctatgttatacgcccatgtcttctttaattaattaatatttatacgtatatgtaacaatgatacaatctataaacggtttttcctaaatatcaagatctgcatattatcaccaacgacatgtaatgtcgccattgagagttattaatgacgaaatttaagtccttattaaagagggtgattcttgtagtgatatatggtataactt

SEQ ID NO: 3982 - DNA, 910 bp, Cannabis sativa
ccccatgacaaaataaaacaacatcatctgcaaagcataaataatttagttttaactccaaacacctgtcatggaatttaaaatctattttctttcaaactttaattaagatccgagaaaggtattccatatataggacaaaaattaggggagacatagggtctcattgtctaactccccttttaacctcaaaaaagccatgcatggttccattaaaaaaaagactaaatttaggagttcgaatgcataccatcactaattcgatgaacttgtggggaaaattcatggcaggcatcatctcctcaataaagtcccactcaaagtggcataagccttcctcaaatccagctttatcatacaacttggtcttgcgttcttcctcccataatattttaccaaatcttggcaaaatattatattgtaagcaatatatcttccttgtataaaaccactctagttttgagcaacaagttctagtagtacctctcgcaatctcatacagatcatcttggttgccactttgtaaataacattacaacatgctatcgatcagaaatcactaacactttcaagtcatttcactttgggaatgagtgttagacttgtagaattcacttctttcaacaacttgcctgaatggagaaatgagaggactacattagtaacatctttcccaacaattatcttggaaaaaatagttactaaaatcgtctgaacctagtgctttacaactaggaatgttgaacaaagcttctttaatattagcttgtgtgaattcttgcaataaaaaatctctcatttgttaagataattttggcccttgattgataacctgatggtgtacatgcttcctttgatccatcttagaccccaacaaggtcttatagaaattcaagaaagcttcactcac

SEQ ID NO: 3983 - DNA, 1483 bp, Cannabis sativa
tttttttttttttttgaaacagtcgtcctgcttttctatctctcccaattctcaattctttatttgatttctcttttaataataattgaattttatttatttaatatttagttaattcaattcaccgacaatttttttatccagtattcattataggggatgaccgagctagacaataaaggatatacatgttggaattttgttaaagttaatgaatattttaacaaaaaaacatgaaataaactcgaaagagttccacataaaatgaatctttttgtttataaggatatataaggtggaattttaatagttggaatagggcttaaggagtatttagttttgtgcaattggatgaggacacacacaacccatcagcacgcgttgtcagttcgattgatccgagctggctagtgtattattttatttttatagaaaatttatttaataaaataattatttttttatcttattttatttatttgataacatgtttaatataaaattgaatacttaggcttattagttatgagatatgtttagcaacaactctttcacgattcagaaaatgttcttcttcccgttatatttttttttcttaatttattcatttatataatgtgattgaacttatgggaggaatacatctttttcatatcaaaaaaacaacacagtttcactacaaaaaaaaaaaaaaaaaaaaccatctgcgatatcataatttttaaggtgtattcgacggttctctacagtatagtagggtttcgataccatacgacttggtgactgtttgcacaatcctgggcagtgccggacctagtccacgactcaacctaatcttttacttttgctagcagtttagtcaacaattttaagacgttccttctgctatgactactaccgatgacttttctggttctactgctgacattgacaagccttttcgtttcgagggtttgcattttaaacgttgaagacaaaagatttttttttgactatgaaaaaagttgtgtttgtgctggttattttgaaactagatgtgtctgagactccacctcttgccgagaagaaggatgaagtcgagaagtacgaatcgcatgttaagaaaagagactcttaggtggagaatgattttctgtgtaagaattttattttgaatggtctgtcagatgatttatatgattattataattctgacaaatctgccaaggagatatgggaagcattacagaaaaaatatgatatcgaggaggtaggaacaaagaaatacattgtgagccgctacatgaagcttaaaataaccgatgataaaacagccgaagcccagtctcacgtgcttcaagaaatagctcacaaaattttgtctaaaggtaaactattgatgaacaatttcaagttgttgttatgattgataaattacccccttcgtggaaagattttaaaaatactctcatgcacaaaccaaaagagttttcgttagaaagtc

SEQ ID NO: 3984 - DNA, 685 bp, Cannabis sativa
cgatggttggcatccattaccaaaaacaccatatatagaaacagggtacctctgactgtagctctacacaatcagcaaagtcagcatccgctatcaattcctcttgatttcggggtctcaatcttacagcaactcgaactcttccaggaactagatccacatccacatatagagcaatttaagaggaattaataaaaatcataaatttgacatttttttaacaggtaatcataatttctctttggtctatgacaactagacaagcaagtacaataatgggacagccaatggcaaaaatatgtggactaagactacaatgataatgtaatgatataaaacacaagtgatctttatcaccataataaggagaatattttcattttcaacaatgacaacaacttagcattgaacaaaataaaatctaagtaggggatatataaacacatgttggaaatttgtaaagtactataagaagtaaaccaaaacaaaaacactgtcattaatcagacaacaggctttctttttttttttttttttaaatttctgctaggaaatttattctattgattaactgccctgcaaatctagccttgaaaaaccaaggcttttctgcaactagaaagtgattccagatacaattgaataactgcataaacttaaggaaaactttataccaaaaccttat

SEQ ID NO: 3985 - DNA, 1083 bp, Cannabis sativa
agtcctcaagtttactattttcgtaagtccgttaatcctcttttctaatagattcgtttactaattaaaaatgacacatgtcgacaaattattagttaaaatcataatttttatttaaaattataaaaaaaaataaaaaaactaaaataaattatttttgaagtttccttcttgataaaaaaaattatttagaaactaaaacaatttaaataatttaatatttttgataaaagttattaacaaaataaataaaaactttgaatgtttttaattttcttttttcttttagttgttttctctcttaattgttcaactctctctctctccttgttctttttcttcgtggagcacaaccacaaacccatttatggaaaccatactcaaccgactttttttttgcaaactatatgttcatcatattctctccttttcagcctcctaccatcatcgatctaaaatctaaaacttgaagttagctcgtcgaactttgaaaatgccgagatcataaccattgtggggtgagtcttcgaaaaaatagggctagctaatgacaaaatctcacgtggagagagaaaagtagcatatttgtttagatctcgtcgacagcgagcaggcagggctaacaatagtgatgagattttgagcgtagatctttgggtgggctagagggagcaagttcttgaatagctcctaagtttcaatcgaagggtggtctcaggtttgggtctcgaacggagcaatgacgtcagttgtgcagtgggggtttggctcgaggacgactgcttgggatcgtgctcagaggatgtgaacgatcggaactcgtgccatgaatggagaagatggaccaagtggtggacggaccacctgggtttggagttcggctagggtcaaaggtggtgctgggtcttgggatggcttttagggggtggtctctaagcagcaataagaataagaaaaaaaaaatgtttagttttttttcattttaaattaaaaatatagtttgtaccaataatttattaacatgtgatatttttattagtaaacgtacctgttagaaaagaggactgacgaatttatgaaaac

SEQ ID NO: 3986 - DNA, 600 bp, Cannabis sativa
taaataaaaaattatggattctaatcccctctactatccactttattattcaatcaatgatgaagatattcaaaaccgtttaatattcgggttaagaaactcaatgtattgcaaattctttatatcaatataagaaattaaatcaattgaaaacaatgaacgcaatcctaaattatatagaccgatttgatacttttgttctacattaaaatctatgtaaattttttttagcatattcaattctcgcaggttttaattttaattcattaatagcatgtaagaggtgcgtaattaataacattcacaatatacacaaattgaatagatcttagatgatgaaaaaatagaaaacttgcattaatttataataaagtttcaagagattcaattaaaaatcgataaaaaaatttagttcatgttcattactaagaaatccataaacatgacattaacatttataagtaaaagaaaaaaaagaaaagaactctaaactctagatctagtcttcattcaaagcacttctcaacgattctttccaattctagtcgtcaaaaaattaagtctcccctctcaaaatcgcaattaagacctaagctcgac

SEQ ID NO: 3987 - DNA, 1023 bp, Cannabis sativa
tagggcaacattggaaaccttactaagaaagctgaagtacaactctgaaatttgattttgtgaaaaatcttgttcagcatggtggagacatattgagtggttttctcagttttgccatctaatgatgtttgatgaaactatatagaaatcattactctgctgtatatattatcactcttatattattattatcatcatttagtttatatttcaaaataaggtgttgctacaaatccccacttgttatttaaatttaaattggagaataaagcatgttcattctgagtcaaacataatttaatcatgtttaagtttgtactttggaaattgacaaagctacataagacagcacagcaatgtagtttgattttgggcctttttctttttattattattagtccaattgacaaactaattgagattctcaaaagggtcatcagcccaatatagtatagtatttgtataatatattatctttgaaataggagcttttcagcctttaactgaatagaccagcaaagaaaacaacaaacgatgatcatgtcacaatatctctaaataaaagagaaattatcaactcacaaatgaccgaccaagagaagctgagctcagataaacaagagggctgatattttccattccaaacttggattatatatatatttttgttctttgttaacttaaaacatgataattcatacctcgaattctacaatttggcaaggaagactacaaggatcttcaaatgcacttggtagttgggtgatgagtttgaccatatttaatgcttggccattttattcatatagttaactagggaacggtaacgcattttaccatttttataacaattgagaattatatatattaaattaactttataatttataataaatatattttaggatttaaattcataattaattttatagctgtgatatgattaaaattattataaaaataaattggttagtattttttttaactgattaaaaaaaaaatgtaaatattcttgatactaag

SEQ ID NO: 3988 - DNA, 646 bp, Cannabis sativa
tatggccttgttcctcggtgataattcttctgtatccgttttggctaccaagtttaatggaattcaaccaaattgtatatatttcacccatgatcttgacgggatgtgtctttttgcaccgcccctcgtatgatttcagatttaggtatatatgatcttgaaactaatagtttcaaattacattttattgaagattcagatgcactccgcaagatgaatagtcgacctccaatttgggttgttcccacattttaataatttagttcagaaatttaaaataataatcttttactatataattctatattttttttgctttttttttttggttaatttatatatttaaatttttttggttataatataaaattaatctttatgaattaaatgaatggaggtacatattttcaaaactgaattacgttataatttctttcttataatcgtccttattatctattcttttgtttaagcatgcctgcccgtcattcttttgctgacgccaaagaaaatttatactttccaataaaattaatctaattaatgagatttaattgtaaatatagtaagataagtttttttatttaatattcacatcataatagttacaatcactactattaaaaccttttttcatagttatcaa

SEQ ID NO: 3989 - DNA, 2236 bp, Cannabis sativa
  modified_base (348)..(348): a, c, t, g, unknown or other
aatttttcccaaaatacgtggcagggactgcgtgtgacacgtggatttcaaggacacctcacccacgaaattagctaagttatatgtagacaagcaagtgcacttcagggagtgagcccccagagaggagtataaagcatgcctctactctccgggagctagagatacaacaaagcatctccgggagaaggagaacctgctcgaactgtcatttcacatttaatgcggcatgggagaaacgtattagaacacccataaaaggatatgacagatggcgtaagcctcgtttactgtgattacatgataatcaaagagtatagtaacggctccattatgaagaatcacatnaatcaaggaaggataaagattactctcacctaatccctatgatacctatggcataggtcatgtatgtcttattttatatctcttaggaacttgtgcacctcgatggctggcactcaaagacaagtgatccctttttagtgatccttacaaaatattataaataccctgaataaaaagaaagaggggatcgatggaaaagagtaaagaagagagagagaattcaccaaagaacagatctctgtataagaactctcattaataacaaagactcgtggaatacgactcattaatacccgaaccacgttaaaactacctgcattaattattccaaagctcttctcatcatatcatttatttggttgccgaaaatcttggtcaacatcaatctatttagtaaatcaataatagagatggtgacagagttagaaaaattgtgagtgacacataattgatttgatacatggattaatcatcacttgtgtagccaaatagaattctaaaatctggtatataccaattgaaaggagcatataccgattgaatttttttatttaaattttcagtaaataagatcaaatatcataaaatatctcactttatttttcaattaaatttaaaagaaaattaatataaaatatcttacttttaaataattcaaaatattttcacaataaatatttttaaataatttttattaaaaaaaaatacaatctaaataaataaatgagatcattgctacaattaaataaaaaaggacaaaatttcttagtttgaactggatatatattgtaaaaatgattaaataaatgacattattaattttttttttttgtgtgtatttcttattgtctttttgttttgctggaaacaatatcaaaattttagttaaaaatttttaacattggagtagagaatcaattgtgaccacatattatacactagagtaccatcagaattgtacagtctgcaattcctctcccgtccgtaattcctctccaatgccgccatgtttcatattcttaaaaaaggcaaaaacttaaattcgaatcgacaccattgaaaatataaagtgatctgattctccttaaaagatttcttttgttcacttaagcattctctattgtactgatttgattcgggaatggaaatagagtatagatttaagtattgagctagatctgattggaataaaacacctcaaggtggatataaatggagttgtgattatttccaaaccaaaaatttcattaaagaaactttactactttatttcaattgtatatttacttttattttaaagaaagctaacggaaaaagctaatggtagcttttacttcaattgtatagttattttactatataatttatcaccaacactattatattttactttgctaaagaaagttaatggccaacgttaaaaatattaatttaagaattctgttatatagtaatattgtatatattttatatatattttctttaaataagttcattatttttatctatatcattaaagatggtctagttattaatgtccaataccacacattctaatattatatttatgagaaatactggcactagcaccttcctatgtgtcaatatcgctattggtccaattaagtatcgggttatataatttaatacaataacttttagagagtatcgctagtcaatcgtaacgtgacatatcgagaagatactaggcactactggtatctaataacaataatctatatttataaatcactttgaaataatatatttattaattaataacacattaacacacatgctaagattgtaacaataataataggtacatgcaaagaaactaaaggatgatataggatacgatgatgatcactcttaaaattattattat

SEQ ID NO: 3990 - DNA, 990 bp, Cannabis sativa
cagcacaggtggccttatgtaattcagcttctctctctccctctctcatttctgtgctgttttttctttggctttcttggcctgaatttctacttcaaacattggatggtaggggtttatctctgatccatgtctctgttacatgcttgtgcttttctctgtcttaattcttcagatggattctctttgatattttcttggtaaatttcttggcaactttccgaggtttaaggatggccaacttgttttcctgcactttccactgcttaattctacatgtgcatcttcttttctcggttgtttttcctctgctatatttactgttccttgctttgacggggttttgggataactctcaatttatgctgtttttgtctatatatgtatgtatgtgtggtataatttttcagtccaatgtttaattcgggtaaatatagcagttagattgagtgtgagggatgagaaactcttgctgttggactaggttaatgtttgatcagatgtggagtgcatacaatattgttcattttcttggaatgactggaacagcaggttaataaatggtcttaaacttatttgtcctaatgatttctggataagttaacacaatttagtttagttttgattactttacttgtgcatagattcttctctaaatttctttggaaatttttccagctttcgattctgggtaatttcagcaagcaggacctttttcccagcaaatgtttgttgcccctactcaattatggaataaacaagtacattctgtgatcttgtttgtgctacatttctggtgatgtttgtgcaaattgtcataacgtagattagagacttatccattgtcaaattttatttatttatgttttaaagtcatagcatagttgttgtatctatccatggaactgaagtgttccctgtgtctctgtctgtatgtatattgttggctttatgagaagactccttttaaaagttgtttgctgaattttt

SEQ ID NO: 3991 - DNA, 1817 bp, Cannabis sativa
ttttgtgtaatgagggaattaccgacactattcaacatggtactttgaacacaatgtaagaccgtgaagaaaagtttgtgttcatgattaattgaagattttagttcagtacttgactatactctgctacaaataagagtcaagggttagagtttagtttgcagtttttcatgctataagaaataatttacgttaaataattgtttacatgaaaaataataagatactgtttaattagtttccaacaggcgtctctattctatttccagtttcactggaggtcttcaactgtgggaaacaatgctattctagtgtggttccaatgcttggtttttgatagagggcaaacgataacaacttctacaattggtttgccatccatttgtccatcacggagctctcaaaacacaattttgctggctagtcttctaccaaggacaaatttgtactaatattttccacctcgaggataaggtgaaatttaggtggctagtaattttatgccctaaaattaatagggttagagagagcataacaaacaaaagggtatatgggtttttgtattaagggtagtatttggaagggaatgcaataatatatataggatactaagaagaattggaaggttatgcaatagtataatatacacctgacactctcccttaagttggagcatagatatcaatcatgcccaatttgttaaataaaccccattgaaagctttcataaagatgcctcttagttgttcactagtcttcacatatcttgtcaaaattaactttgttgaattttctctcaaaaaaaatgacaatcaatctcattgagattagttgctcctgaaatattggattggattggattgaatgattcggttgtcacattgcatttttgttggagttgaagttttaagtcctactccaggtaagatttggtaagttcacatgatttcacacacaagttgtgctatagctcctatattctgattatgcacttgatcgtgattcaacatgtttcttcttccatgaaaccaaatttcctccaaccatgatacattaatctaagtagatcttttatccactttgaaacttttccaatctgcatctcagaaatattcaatatcaaagtgatcatgatttgtatagacaatgccttgtccatgtgctccttttaagtaacacaaattttctctaatgctgccaacgaagaactattggagatgacataaattgactaactacactaattggatatgcaatatcaggaggagtcactataagataattcagcttacaaaccaacttttgatatccctcatgattttcaaatagtttccgatctcttgtaaggtgtatactaagattcatcggggcattacaaggtttcgcccccaaatcttctgtctcagttaatagattaaacatatcttctctaagataggaagattcaatttttactctttctaacttcaaccaggaaatactttatcacctccaagtcttttgtatgaaactaagtatgaatgaaagacttaaaagatgagattcatagtataacttctagttataacaatgtcatcgacatacatactaatagatggataccaacttctgattgtttgtagaacatagactggttagatatgcttttcttcaaatcaattgtttcaacaacttactaaattttccaaaccagactgagagacttttgtttcaaaccatataaagattttcaaaaatgaaaaaacgcgccttgtcccccccgcccccgagcaacaacccaaaatgttgctatatacattcttaatatctagttgatgc

SEQ ID NO: 3992 - DNA, 1421 bp, Cannabis sativa
gaagcccattaggcccaattaaaagcccagagttttctacttattttggcccgctcttcgtcgtcttccttattccgactccgagctcatggaactcccgtcgccgtcgtcatctacataccggacatcatcgtcgaaatccggtcgttgcgaaaagtttatcaacagagtaatttggcctgcgattcgaggaaagtcttgccccatatgcttggaaagccttcatatccaaacctcggcggttctgactctgtgcacccacgctttctgcgaggtatgtatacgcagatggagctatctgaaacggaaatgccctctttgcatcgctgattttgattcttggttctcacgtatcgatctctcctctcaaaacttccgtaaacaccgtttaccagctctaaatacaactagttctacacagttccgcttacaagaacaacattcgaattttaggttagaacacttaatccttttcctgtagtaaaattgcattcttttccatgatttaagtttgtgattgaagattacaagaaaaaataatcatgattttgctgttcaggacagtgataagttctctacgacggcgatcatcgcctttgccgtggcggcggtcgtttggacggccgggcttagtgggttctgatgttattgctcagagaaaacttcgatggcgatcaaggtgagtaatgaattgataagctaattttattttacttttcaccccaatttggcaattgggtattgaaattcttgttctacttttccttttagcatatatgagaagcaattgaaagcggttcctataacaccaatggagaatgttgaacaggtatttcatactgaaattttataaattcacataaacgtaaatattgaatttttcttacttttttttatctttctttctatatataatttaatcttgacatggtctgtaaaaccacagaatatgtcattgaacaatggtgtaaaagaaagaatactaggaagaatagaaccatggataaggagagagctacaagcagtccttggagacccagatccatctgtgattgttcatgtggtttcctcactttacattgctacccttgaaaagaagattcagttttcttcaacacagcttgatttgagagacaattttttggatgaattgcggccatttctgctcgataaaactgacatgttttggcatgaagtaaggtaactaatggctataaacttgttttgtcggcattaatagttgtttcatttcatcattgagaggactgcagttgcaatgactttggctttaaatacacagttcctaaagtaactaatttctgggttttgtggcatcaatcccttctctctgagttgggtattacttttgattgcctgaaattgaaatactaataaaggtttgcatgtcatataggctcata

SEQ ID NO: 3993 - DNA, 928 bp, Cannabis sativa
cagaacccccatctgaaaaatgatggctaatctcatgatgatctcttattgtccataacaagaccagtgtcaccattatcaatgagagtaacaccattgatgcccaaaccatgtgaacgaatttcttcatgggcttgcagtgtttgacaaggatctcagaaaaggcatccttcactaattgacattccaccaggttctccatgcctgggtaagcatttagtaggttttgtattgaatttgtgtaagactccacagtttggtagtcactgtcggatatggagaattgtccatttccacatgtcatgctgtttgcatctgaacaggtgaatacctttagcaccttcaaaacaagacatattattttattgagaaattgagatttgagttggttttgactatgcacataaggtttaaaaacaaaagtaagaattaatttattgtcattcacttatattagtaatgatcaccaaaagagttttgcccaatcactatgttatattataaggtagaatgtagttttgctaggctaagtacaagcatagatttagcgatgttaatagtaaggagtatgagtattcttattcagcttgaaagtttaaagacaccactcttgctggaaaatctcatgaattatcatatatagacaacattttagctgaactgtgtgtataagttcagtacattgcctctacaatctgccaaatgaaatatgtcattttaagacttgtttgtaattttcttattgttttgtttaagacttgttgctgccatacctttgggatgtctcctattcttattgtgttagatgggcagttttcgggctggtactggtatgctggtggatccgagaatggattgcagatagaaataccatttgatgattgcatgactgatatgtttgcattcacctgaagattaccacaagaag

SEQ ID NO: 3994 - DNA, 1459 bp, Cannabis sativa
ataataaatgagtgagacactaagttttgacatctagggactcatcaattactctttcggaagcactatttgatactatccggagacctgtcttattggatctttatctcgcctggatgagtcttttgtccatcatcaggatgacttgagtttggtaacgagtttgattcattattttgattggacctttagtagttgaactaaataatattgaaattacacgtctcttccttctaaaaacacgaataacacaactaataatttaaaatttattattttgatttaaaattattgaaacctaatattcttgattaaaaataatgtcatcactcaattttttttcttcccaatatataaatatatattataattaatgtaattatatacaagtacaagggctctacaagctacaactaagaaaaaaaaaaccctcttagaaatgttatgtggtccatagagagatgtgtaaaagtgttagtaaatacattttttattatttatagtaattgtagatatatttatatatacagttcatgtatttagtaataaattatattgattaataataatgagttatatatagggatagctattaggtaaaatctaatttgtgagttattattatcttactgaaatttcattcctactaacttcattactcaatagtgttttatgggtttgaaaggcaatgtggccatggcagtcaccccatcccttagacaatcctcacagctcacccaacaacacaagaaattaaatccattttttatgtttcaaaaaatcaagggcaaaaagggtatttttattttttacaacttgaaagaaaaaaaaaatgaaaaataatgtttgttcttatttgaaattcaacctgtaataaacaagatattttaatttttcgccgaagttagattcaaaacaactactataatcttcacttttggcggtaccaagtgctcattccccgtgacactattgcattgctcatgaaaagaggtagccccgacttctatacgttcttgatttccgtttgatcttctaatgagaattgacaaatttaggattgacactgagttaagagaagcttggcctacgcttaaggcccatctaactcaggactccaatttttttttttttttgaatatatatacatattttttttagtaatttttaaaaaatagttcgaaaaaaaaaatcttttcttaagacctactaaattatagaatcgaccttggacagatctttatgtttctcaaatgagttaaattataaaattcactattccaaaatgagtaagtatttgtgttaattttattaaatttgattctacaaaatggcaatttctttagtagatatttatttggttgaaaaacctttttttttttttttttactctttcgataaaaacaacaatattaatcaaaatccagtttaatgttcatatggtaatttatttatttat

SEQ ID NO: 3995 - DNA, 764 bp, Cannabis sativa
gaagcttgaaaaggagtgttacatacttatctgactctataatggatttgcctagtgaaactgagctaaccaagtaaatctggtgttctcatggtgtttgtttaaagtcatcgtattattctattttctcttggtgtttctctaatctgatttcataacgcaaaatataacacaacagtatcgaaatttcagacaaagatgaaaaatttagaaaaaacaaaatcaaagattttcaattaccagaacttgaactccgggagtcgacggacgaaggggcgaaactcatcagatcccctggtagggagtgaaggaccatcggtggagtcgtgcatctcaggatcaacctgaggagagagaaatccgatgagaaggttgagaatgtagatccctagtccgtacgatacgatgtagaaaccttcgaccagataaacgcgaagagcgtagatcaacgccacacccaagcaccccagccacctgtgaagcacgtgcggcgttgacttgtcaagaaagtgctggtaccgccttgaaattgatgaggtccaccgcgaaaacgcctccgccggagatgaagaagacgatgacgatgattgatcatccgcggcgagacccacggccgccgctccggtttccatagggactcagtccggttgtgattgagtgagatttggtactggtttttctctctctttctctctggattcacgattagggatttgatgatttttgtgtcgaaatcaaaatactgaatttggagagagagagag

SEQ ID NO: 3996 - DNA, 1655 bp, Cannabis sativa
agcttgtaaatcattgtgtgctttgctgatttaatctcaattcaattttagaatccatgtgttgaaatcaatctattcaaagataatcaacttggtaatctgaatcttgacaatcaacaagtagtactttcatgccggttcggactaccgtacaaaatagtctcagataggggtttaagctgcttgtttttcatggctggtggtctttgtctttttttagtgtaaatctactccggtgcctactagagatagactcctatctatgctaacaatctttgttttgttttatttattatgttttcatgtatagtatgggaaaacccctagtgtaaaatgtttactacttaatgctatgctaatagaataaataattaataaagactttttcctagaattactacaagcacttgtacagaaaggtgggttaactaaagaaagatggaagcagaggcattcttaagagaaagtgctttgccttacctatgatgcaaagtaagattgtatgggctggcttttgaaagatgggtttcaaagaatggaacggagattatgggaataagtggagttgggcgggctactctccagggcctcatcgatagatagaagagagtaaggaaagaaaaccattttcaagagacaaactccagtgaaccactttccccctctcttatgttcttcattcccctttgaaagaagtaaaaaaaagaatagaacgcaaacacgttttcagagttgtacaaaagtattcctaaagaatccctaatttgtaacgacaagattggaatctgtagtgacagatttaggtcgaattaggaaactttccaagtaggtgaaagatcacaatttggaatttattttcttgcataaaaagattatttgatctgctacaaacatggcaaaattgaatcaaacaaatagataaaggaaaagtcaaagttttccaaaattggcaactttccataaagagattttccttctcttgtaagacaagtttcctaaacaaaaaagaccagctataaataaaactttcttttaaggaaaagagaaatcaaagccaaaaaattaacataataaaatacatataatgacacaacaaaaattaaataatattttgacaactaaattactaaaaaaggacctaacaaatatatttcatttgttgagagcatgatcaacgacttgacaccattggcacatacccaaaaaaagacattgtggcttgaccgaagaaggcaatcgaggagtggaaagaaaagatggtgtagtatagttatatttgtgacccatagagtgatgttttttgaattgtatagcatgtatagtggctggcaattgagcaggaggggatgtggtagtagcaacaacttctttggtgatcaatttttcgagaagttccttaaaggaaataggggtgtcttgagcatccatgacatcaatgacaaatttgtgcacctcatattgagaccttggagcatcttgtctattgtgtcatcatggtccgtaggttttcccattgtagcgagacgatctgtgcatttttttatgtcttgcatatactcatgaatagattaaatagtagaagtaattttagagagttgggtttttatatgtataaagtgaccacgagatgtactagaatatgcggaggaaagaat

SEQ ID NO: 3997 - DNA, 1140 bp, Cannabis sativa
tatttctattcactttttaaatatcttgtgccctaaggaccttgtagaatatttttctttgctttcccatcaagtttgagattttctccaccgctaaatagaaatttgtaatcatagtgtttttttgtagtttagacaagcaagtactccttcctagaatctctatttcaaccatggccatccaatttggtcaatccactttctcctttacatttaaaaaatatatacatcatcgcatatttatgttctaacttctaatgtcatgatgaagtttataatagagtatttctttttttttgttttttttgaaaaaataatagagtatttcatacactattcttcgtacaatattttttttaaatcagtagccaatatatagaaaaggtacccatatactttaatactttatagattatagaccccaataaagctaggcatactcaagctcaaactttattcaaaattcttactataaagagatataaatatttatatttatatgtaatgaagatgtaaatgaatgatacaaatgtaaaatatagtttattttgttaaaattctattctaatagtgtatcaaattatgatgcaaatatgttaatccaaatttagatcacaatataacatgatgtagaatttgtactacaataaatattatacatttatatttataattatactatttttaaaattttattattaatttttatcaacaagctcctttatattaaatgatgtgtattattattaaattttatatttatttttgcattattaatattattttcttaataaattattaagtaaacattaaatgatatatcatattttatatcaaggtttataattatacaagcataatagtaaaaagtgatataaatgttgtaaaattatactctttatttatatttttattatttttatgagtgttgttttgtttctttttactagctattcaaagttttcttactagtttatgtattattttttgatggttttgatgtcttttatgatttctgtgtcttttatggcttttgtgccatttttttttttagcttgtccttatttttttttataggatagttttgtggtatggtcaatggccatgagaaatgatcctttttgtcacataatttcttct

SEQ ID NO: 3998 - DNA, 1397 bp, Cannabis sativa
atacattaactaattaagaaaattataaaaatttaaaaaatacgtgtatataattatatctaaataacacactaatatagcaatatctcattttttttaaatcaaaatctcaaatctcatttaaaaaaaaataaaaataaaaaatacattacttaattaaaaaaaattaattataagtatatttgcacttaacatagaaaatttctttaaaataaaaaacgtagtaaaataaaatgtgaatacaatataattttttcaataaaataaaggaccaaaaatttatatctttaaagtttctttttattttttttttctgaaaaaattatgagattttggcaaaaattgtgtggcaaattgtcaaggataacgtcgtaaatattgttgggaaaaccagaaaacgacggcttgtatcattggcaaagtcctacttcgtctttctcgttcgtgtggattccttttcgcttggattgcgaagaatctcagatgaaaccattatatattataaactcaaagaaaggcgtgcaacggtcgatggaagcatctaatcattctgttccttttcatttgttttttctttttttcctcaatagaaaaatagtaaatatataaaaatagtaaaagggaaaaacccatcaaataaagtttctctccctcactatttctcttttcatttttctttttcttcatattttgggtttgaattttatggattagtgcagtagagagaaaaactaaagccaacaacaacaacaaaaaaaataataaaaaaaaaagaagtacgagaaaaagaaagagaaagaaggaaggaagaagaagaatctgagctgcccaatgccttttcgttggtgtcctttttaagcttcgagaccatggctgacgatctatttttcttcaccaaggtctaccttttaatctttctctatatacaatttttttgtttcttgtatatatatgactcttgcctcttgtcgtttgccatttctttttccttagattatattataatggggttgcatgtgaaatatcggatctgggttaagattaatcaaacaatatttttcctgttttttcggctttcatttgatagtatattctagatgaagatttcttatttataatatttattttttcccactattttgatatgtatagtagttgccatgtcgtctgatttagcttctcttaggttgattcttctttgtacggaatcaaaagtttagtaacttaagctgaaacatattgcactttattttgtcttttcttttttaattttatttgtttatgtgtataaattttgctgcttcttgtgccaatagtcatgtgatttgctttttctaactctgctatgattaatctgatcggctcatccaattttggcctttgtgagaaaacaaata

SEQ ID NO: 3999 - DNA, 4008 bp, Cannabis sativa
  modified_base (2648)..(2648): a, c, t, g, unknown or other
atgaagacttgtgtttctggaagtaggatcgaggaccgtccatctctttttcacgtggatgactttttgagtataaataccccttgtaacattcaattaccactttttcccacttttcaaatatataacccttcaaagctcttaactttctctaccctttccaaaatcaagaactaaactcaaaataaagttctcttcttcaatctaaaaaatattatggattttttccttcatctgctgcaaaggattaggacacagaagttcccacatcatcaaccccccgtgattgagaattttacagtaggagaaattgtgagcctagatttcaatgctgaaattaattcgttgatcgcttcagcatctcgtcttcgcaaagggtccgataaacttccccaaccagaccgagcaacgataagcttaacatcttctctatcaatatcagctatgttgtttcttcatctatgaattgtgttttctgatttcgtcgataggaattgtattttcatgttcagttctgaaatgaaattagggctttttatttgtgtggttgccatcttaagtggatttgagcaccacgagtagtttattttttgaattttcctgtttagaaatttgtggaattggtcgatttgcagtagaagtgttggcaaaatattcctttcgcccaaaatccttctagttttggggatcgtcgttaatttctatagtctttctctttgtgttgttcctgactttctatttagaacgaataactcatggaagttcttgtatctaggtagtcaatctagttgggacctctctaagcagtttatgggggaagaccctcagctccctttctatgctaggtagtcaaggtggctaactgattgggttttcttgttttgtacggaaactatgtccaggtagaattgttgaaaaaaagctaatttagaggaggaggtaatggagcaagaaaatgctccacatttgatccttaatgacagtccatgggagatggattaggacgtcaacaagttcgggaattacaacaacctaaggaaatacttgaccctttgagggcttgaaagtgttctagggctattctggaatagactctttgttctcggggagaggcctagcaagtgcgtataaggaggcttcagtgtctggagctgggctcatatcgagatgggtgtacatctgcgtctgaggtgctatttttctaacttctacatcgtggctagaatagcacatttccaactcattccccaggcatactgcttgttgttagggtggtatgtcttttgcgctggacgagatcttatacttttacaagatcaagtctcaacccatgagaggccacaaggagaaggtgggcttctataggctggagcgctatacaaggagtattccttgccctaccagctctatgaagtacacacacgactttagagactattgcttttacacctctggcttcccactaaaaagggttcctacccttagtttagacttcaacattacgagtaagtattgttcttttttctagactttagaaatctacttttcctcatgcttgatgtatattgatgccattgttcacatctactagactgccttcctcaattgtctttgactccagagttggaagagaggaaaactttttacaaatccttctcatccaaagagttgcaagtagagaggatagttaccaccaagaacctcaaggaggtaggcctcattgttccacacatggatgtgagaataatttcgcactccaaatagagttttcgaaaaagaaccctaaactcaaacaatctttttttatgaactctaatttcgaatttcgaatcataattctaagtatggctttgataccatgtagagaatagtgaatcgaattatgtattgtatttcatggaatattatgtttatatacaatgctaggagactaaatgagaaactactaaatacaaataagaaactactaaatacaagttaccctaatttctttacaactaatattctaacaaagttataatattgtcattattttttataatgttgtcattaactttttaagttataatattcttgttagttatttttttgaaatgtttttattattggcgtgataattttttttttctgtgtttgtacttaaaaatgttactatacactatatattagagtaatttctaaaggctgtactaaattatactaaaaaaatcctaataacttttacaaatttaaaataatcactaactatgtacatcattatatatatatatgattatttattaaaaaataaataatgtatatgtaaaatctttattttttttaaaaaaaaaaaaaatagtgactacgtgaagaatcaaaccttgtatctcattattaataggctaattaggatttttgtcccctaaacgttgacatgtaaagtcgttaaaattgaccgctgaactattgagattgttagatttaagaatttttgtccaattttagtaaaaaagtctaacattgatgaaagttcagcggtcatgatttagtacatgtcaatagttcatggggcatttttaacgaacttaaaagttcgggggacataatttagaacatgtcaaagttcagggacaaaaatcccaggtacgatttagtacatgtcaaagttnagggggaaaaattactaattagcaccaaattattatttgaacaattatatcaattatgaattgtataattatagtggtattgagctatttttttatttgatgaaactatatttattagttaaataaaatattgttcttatataatataaaagagagaaatatattagattttttaaaaataatatttattttaattatagtaaaataataaatttatgagcgtctactgagattttcagaaacagaatataaatgataagaattgaagaataaataatcaaaagagaaacggtttttaacgtggttggggccttaactagccttagtctacgagccagtattattcagtaagtgcttagcttgaaaaagccttcaagaatacagagaatatatgttcccaagttttcctgagcaaagtttgcaagagagttcaagtcctaatccgtaagatttgtgaggtatttatagcagttttagaattacattagatttttcatttccctctattggggagttttatagcagttcaacccttaggctatctcatgtagtctaacccataaagaagacgatctgctgactaggaggatcagatttaagttgatttggtcaacattatgtatactgactgtgggcaattaatctgtgaattaattgcataatacttgtcataaaaagttttcccattaatcctaatacgatattctgttatgatctaacaactggaattttcttatttatgtgaaggagtagaaagagaaactaaaagggactttcgagaacacactatctcatccttccgatctcgtggtaccaaacatgcttctgggtacgacttgtcgaaagccgaaggctttgtgagtgcaaagctgagatacatgttcataaggatgtatccaattgggctcgacccattttacctttatggaggatcccactaatgggtcttgggagctgacctgggatccacgtgtcaaatgtatgaaacacagataacatttatcccctaagcttccagaataatatgtatggtgggagcttgcattacccttccaatttgtacatgtgaaaaatacaatcatgacattttgaatgctactcaaccgcggaaggtggcttcaatctgtgatggtgatatgtccacgtgttagtcacatgcgagtagcagggcacaaccattgaggagtcatcttctagaaatagctaaatttttgacaactgttcatttttggctcgaaaatcaaaaaagagcattttcatcattaatctacgcgttggttctggggaacattaattacgaggatacacatagattgttggactccccgaccattggatgaagacttgtgtttctggaagt

SEQ ID NO: 4000 - DNA, 838 bp, Cannabis sativa
tttttcttcatatttttggtgtgcttttgcacccatggcgtgaccattttggacaaatcaatattttttttagatttggggccctttatattgagagtatttataagtctttattactgtagaggttgataattgtatgataaatttatatttatattggtcatttggatttattttataattaattaaacttgttgtgcctgtttaattcttagaccatttagtatattttttttttttacaacaattcaataatttacattaaatatcatacaaaaaatttaaattaaaagatcttgcattttatattatttatattaaaggttctaaattactaatttataatataattaattatatcataattaatagtaagatttaaaattttaaaataatttagtaaaataaaatatttattaaactaattaaatattacaatttttttttttaaaaaattaaataaaattatacctaatgtttattaaattagtattttacataatgcttatttttattattttatattttttagttttattatgttgtttttattttatttaatatcagtatttttatttttgtattttgtaatatgttagtatttaaattaattattactttgtaatgaattttaatttgagaattaaagtgtaaaattaattcttaaactaaattaaaataagaactagagaaatgcattagaaaaagatttacatcaaattggtgtagacttgaaatttaatatggtgtaaaatttggtgtgctattgaaataaaataaaataaaatagtaagaaaatatataatgtaaaaagtatcagtagtgcttaacattcttc

SEQ ID NO: 4001 - DNA, 1040 bp, Cannabis sativa
ttaatattataccgacttaataaaatggtagtaggcatttcaaataatgtatatgtgtcttctcttatcttttgagagtgtcttcataatttgcaatatattgtctttttaatttactctgttggtatatattctttatgatcataattctccaattatctagtaagatatatgatgactaggtagaatgttgatatattttattctataataaggaatattaacatttgcatggggttaataagttgtaatgagatgaagaatgagaagcataacttgtgcattattggtttatagtgactttattatggtcaagtggaattgatgcaaagaccaaatgggaatttatgagaaagaaaagggcacttgaacaagaacaacactaatgaaattctcctaatgcagtaacaatgaattttaagtgataatagtggtaaaagtccataagtagtattctaccaattcctaaatttaaatggaatatgaaaataaagtgaatatattatgtaatttcctctaaatattttacgtttttataagttttagtacttttgtaggactcgtatgttttttttagtaatctttaccatgttgtacacttgagtttcaaaaatatttatcatggattcacattctattcaaacccaacgaactcgttattatctcttcttttaataacaattttgactctcaatttcaaattcagccaacaatgaattcgtaagaataaagcatctaaactattgagttgaggtgctgccactttctttataatgcagccaaaaactcatatttagtgccacctgaatttttctgctcattacaaatggttcttgaactatttacactattgttaattagtttttctgtcaaattttatcacacgtgctaaataaaatgataatatggttgtttagctagttgtgtcccctttgattaagaatttaaactttattgtgtcccgtttatgacactaaaagagtcttactaaaaaaattggataaaaattatacttttactaatattgggtacttatttca

SEQ ID NO: 4002 - DNA, 1726 bp, Cannabis sativa
actatcttaaagttaacattaaaattttaaacattttaattctcaatataatttcaaaaacaaataattataagcctttaatataaaaaaaattatcatgtaaagtagattgatcttttacaattttttaattgatataaattaatatttatataactttattttttaaatatgaattattgtatttattgaattttatatatataaaaaaaaaatctaaaagtgaaaaatataaaataatttttaaacaatcaatttcttgtttttcttaataaaaatagtttgaactaaaaaaataaaacgtgaaaaagtacttattaagttttttttggaaaaagcttgaattcttttagtaaatagagtaatatataggtaaaaaaatgtatgaaaatattgctagctaggttttattattactgtcatattttcttaattttatcacatcttatataagagcatgttttcaataaatgtaaaatataactcattttattaaaaatatattttaataatattctaaattatgatgtaaatatatcatatatcatataataaaaagtaatctagatttaaataataatatagtatgaatcaatgtcaataaatactatatttttatttgttaaaacaaatactatatttttatatttatcattatatcgtttttaattttttattattaaattttagttaacatgttcttttgcattaaatgacttgtattattcttatttttagtattagattttatatttatttttgtattattattttatatttttttagtaaatgatatattaaattttacatcaaaatatttataattatgcaatagagcacaataataaaaattaggataaatactattttagatcttgtgttttgtaaaaattattaattagattttctattttgttaaatgataaactggaccctgtattttttaaaattgtacaaataagattctaaactaatttttttttgtcaaaataaatcgcaataataatctgatctagaaatgttatgacaaaactgattattatattttttgtatctattcgtgttagaaattgtattaaagttggttatattaaaaaaataaaattattgaaaattgagttctggatcttatttttactattttggaaaatataagatttattttatcatttaacaaaatagaaaatctaattgataacttttacaaaatacaggatttaaaaaagtatttatcttaaaaattaatattaaaatatcacaaaattacttttaaaactaaatatagctcaaacttttatattttttattgatgattctctaatgtagatgtaacattgacgaaacacatgtatacatatttattttactttacgaatacagtagttaatactaattattatgcagcagggttgaaataagttagcaatgaaggaattgtttcatataaatatcaaaatgaaccgtataagttatgaaattcaaaccctcctatatttcatacaatctaataattaatatttttttttaaaaaaaagtgagtgaatctcacgccattctccctaattaaaaaaaaaaatcttatgctcttctatcacagtataaaataattatactgtcctaaaatatatgtggcactcaacaactaaacgaattttcattaaaaaaaataataataaaacaaacaacactacgatctaccaagaccaaaaaaaattttggaaaattt

SEQ ID NO: 4003 - DNA, 834 bp, Cannabis sativa
tactaactgtatttattattttttttacaatgactatagtgattggaagtttttgatcccaaaggacactattcctattaagccatacgaaatagactatagcatataatgctaaaatgatcatttctacgaccaagagatatctttcattttcaccagccacacttcaaattatgactcttatacataagcccattaatttgttctaggattttctttgattattattattattttttttttttttttgaatgaattaaggtatgcacagtatgtttacggaagttagtcgccgaaactataataaaaaatttgtacacttgtgtaatacagtagatgagaaattaatgttggaaaaatcatactttattttcgaaagtaaagcatatatatttatgtatatatttgtttttgtactatatacagtatctatagttagatttatcaactgatattctctactatatatcttagttcctacacattaaacaaacatatttctttctttctttttcatggtgtcactgggtgactagaattcgaaaacttgacacaatttaaaaaacatcgatactcctaataataatattgagtagtggtacgtacaaacccaacccaatgatttaatttttgttgaacgcgacaatagtacaacctagttatttggtaaatatgaaagcacgaaaaccgtacaactgatttatgttatttttattatatgtgtgtgcatgtgtggataataacatttgtgtgtacatttatgcatgtatatatgtttttgtatgtgtgcagtatatatatatgaaggatattgcatgcatggagataccaagt

SEQ ID NO: 4004 - DNA, 666 bp, Cannabis sativa
actgagtttgtcgactcatagttactatttacatgtctagctaagggcaaagctaaggttgaacagcagtgagtgcgaaaagatgaagattgtacatgttggggcggttagacctggagcgtacgatctttgggattacaggcagtattttgattagtcactagatgacaagttttgtatttaatattttgtaatacgattgtaaatattttaaatatggaatctcggtatattcaaaggatatttttttcaatcaatgaataatttagtaaaattttaatgaatcacaattttcaacaaactcgttgattagcaacggattgcataattaatataaaatcacaataacttacctaaactagtagggtgttacaatttggatcaaagctaccaggtttcctttcgaagatcgtcacgatatgtaaaataaacatcaaagataagcttgattcacactccagtaagcctttagtactttagtagtttgtcttattagtatgttataagaatagcctgataggaagcatgttggtccgctcctgatccttgtcgattgaaaattgttctttgggtgactcactcccttcaaggagggagtgctcctcttttaccggctattgggacttctagaggtgtctggctggccatggggacttcttcaggtgg

SEQ ID NO: 4005 - DNA, 990 bp, Cannabis sativa
tcttattcgtgtttgctcttttctcagtatttggaaaaacaacatctcagtatttgaagaaatagctatggctgatccaacactaagtgatctatttaaggactccgttcaagtaactacgaatgaactcacactcaatctcaaccccggggaagtcgatctaccggaggaacacagtcgggtgctactgggcaaacttattgtctcaccaggctgggggaaaaagcaattcttggctctttgaagaatgcttggagtactgtcaaagtatggagatgggaggaacgggaagatggactccttcagttcaccttccactccaccactgatgcagataatgtcttattaagaagatcgtggctggtgtgtgggtacctactggttctcatgccttggccctcatggttaactccatctgaagttaagtttgatcagactcccatctgggttcggttgaagagcatcccacccttctactagaacaagactaacctacaagatcttgcaggaaatgtctctaatgtctatgaactaccgaagaacattgaacgtaactttgagagaggctcctttggaatgggcacagtcagattcagagccacggttgatttatcaaagcctttgttttcaggcttctttcttcggagaccagggctgaaggacctatgggtacaatacaaatacgagagactacccaagatgtgttttaaatgtggcattctgactcatgacaaattttgcttcaagaatctgacggtaatcaaaaatggcgaaggagctttcttccccgtgtatggagtctggatggatgaagaggcgaaggagagttcaccgttccagaaacccctgccaaaatggttcaacgattggatcattaacaagaaagccttgaaggatcaaaaatttaggaatcaactaaagaatcaacgtattatccagcaagcggaggcatccgaatgtcgagagttgagactgcaatatccgggaaag

SEQ ID NO: 4006 - DNA, 827 bp, Cannabis sativa
tgtcacttggaagcagtactgacaaaattgttacaatgacaagggatgtgagaaaagaattgcaagcattaatgtggaaatatgttggaattgtccgctctacgaataggcttaatactgcagagaggaagattggtaagttggaggctaagtgggaggagtacttgtttgagcatggttgggagccaactatggtggggctcgaggcttgtgaaatgaggaatctgttttgttgtgcaaagctggtggtaagcagtgccctttctaggcaagagagtcgcgggcttcactacacgactgattttccagatttggaggaaagtaagaggctgccaacaataatcttcccttcatcgcctataaagagtacatggagttcaagacaggtacacaaacaagcccatgtgttaggaagtttggatccttccaatacttgaaatgattggtactcttgataattctaatgaaagtatttacctaggaggatttcaatcttccttcagaaagttggagcagcccttaaatttcatttggtcacggtgtttctacggtaataattctattctttacttcaaaagaaagaaaacatctttaagaaaatcacaggaataagatattgcaattcattttattagtcgcaaatgtgacaaccatgtcaaattgtatattttacaataccaattacaatttagctgcggtgaatgctgtctatacttttcttatggaaattaggaatgaggctgatgtagagcatcttttccccaaggcatcagaaaataaattgtaaaactcaatagctaaggttatttcttagatatgttgaaaat

SEQ ID NO: 4007 - DNA, 775 bp, Cannabis sativa
tatacttaattaaaaacatgttatccattttttctttattacagtttttttcatcggtttgagtattagttgttagaattgctactagctctagcgtacgctttactttaccatgcccgaaagggaatggtgtagttattctcttatatttgttgtgtgtgtttatgaccaatgctagagctttaaccatacaatagtttcttgttcttgtagtgctcgacttattatcttgaaggaagggcttgtttggtaggctgtataacgatcgtattatattaaataataaatcacattatatttgaataaaataatgtattaattattacaaccaaaatttctaatacaatgtaagttgtattatataatatataacatatggtatgtattaacttgttttataatatttacaaataattcgagatcaatcccaatctccaatctaaattcgaattcggactcgggatcaaattcagactgggactgggatcgagaccccgtactaagacccagacccggacccagactgaacctgaacttggacctgacctggagttagtgttgaatcgagtttattgaaaatagattataactttacacaaccttttaatacaagtcaataataaatatagtattgtattaaataatactaatacaatacattataatataatataatacaatacaacgtattaaattaaaagatagagtgaacacatgtatttacattagctaattatatggctaatattcctactaatagtaattgtgtaattat

SEQ ID NO: 4008 - DNA, 1631 bp, Cannabis sativa
ctaactcggttacattttattctctgaatttcaacgtcacaatcaacatgtcttcaacactattttgtgacaacactgcagccatacatatatctacaaatctcgtctaccatgagcgcacaaaacatttcgaaattgactgtcatatagtacgagaaaagatcaccaatagtatgctcaagatgaaccatgtcacctccaccaataagtgagccgacatactaacaaagccactctgtccttctcagttcaacaatattattttcaagatggttgtaaagaatcttcacactccaccttgagggggtctcttagagttgttatatttagtttcacattcgtataagttagttataaagctgttagttgtccaattcttcctcatgtatataaaggcatgtaaactattgtaattacacacaattttaaattaataacaaaatatttctctgtctatgctctgttctaatatctttccctttttctaatttagtttttctacaaactgtaattttactgattaattgttgtgaattgtgtatagatgaatttcataagtattttttctatcaaataattaatttgtattctaattttttcttaaaaaatatatattagttttattgtaaatttagtattaacaacttttccattaatgattaatcaaattattattattattttaaatgaataaaattattatttaccactacatattgcactcatttatttatttggatttataaaattcacaaaaaaaaatatataatttttttagtatatataatttcaattaactttgccagttaaatttgtatcctttatatgtcaattcatctattattacaaaaaatctctaaacaagttaccttattatattttctatttttcttctatttctatctatatatctatttatatatatatatataactaaagtattaagcggtgacataacattctaaaaccatttcaaatagcttgatgtattctcttcttaagtctcacactttattaattttttgttagatttataagattaattaattaagaaaaattataactagaaaatatttttaagaattacctaataatttttaaaaaattaatgagccgtacatattcaatatatgtatagaataattctatttcttcctatattatggtgatattttcttaatcctttgtgcatataactttttggtgtgtacgccatcaaatatatttttgtgtgtatgagattaaatgttttaaaaaattaatgtttaacagttttgacatccaaaacacaaaaatttgaaaacttaaaatatttttaagaaataaatatttattaaactatgtcattgatactcattatgcctagataaaagcctgtgtgtttaaatttaagtctctatgattcaaattaaagcccaaggttatgccgattcttttaactttcctatcctctctctccctctttaatcctcctgcctttattaccgttgaaccaaattttccaaaaaaatcagtaaaaccttttcagatttgaagatgagctccaccgctaaaagtggcagggacaacggaggaggaagcaatagaggatctcattccctagctttctttcagagtaatgagactatgca

SEQ ID NO: 4009 - DNA, 1279 bp, Cannabis sativa
ctattcttcaatacattgatgaagacccaaggctcaggttgataaggtgctagggtcgcaactccctgattgacatttctaagcatttttcctagaaagtctcccaagagttttctccattttcatcaataatgaatatacaagtgttctcaagaagcaaaataaatgatttgatggccaaaacatggacccaacgccaaggttgacactggtgttgggccctgcacctagacgaacatttaacttggttcgcatgcggacattcctcttatcttggtccaaaagagagtaagagaccttgcttgtaatctgaaatgacatagaagtaccagaacaagttttgggaagctcattaatgaacacacaacgcctaagttgacatatgacctggtgcgttaggttatgtttattcgattctagttccgttttgagcatttaactattttttcacagtaaacgagatctacaacttgtgacaattgaaattcttacttttataatttacctttttggcaaagtggaatattagcaaactagtcgcaactttggaagtttcgtaccttatttcgcggaaaagcaacatctttgagaactagtaaacaacttcaccagaactgagaaattagttaagtgatgtcagaatattgcttaggcatcaaaaaatacaagtttgacacgtgttttcactcatacaacgtataggttaacattaggatgtcaacctgggtactgatcgttgaacaaccttcagttaacgaccataactcacttaatattaattcgattaacacaattcaagttgtgtttaaaatatcttttcaagatgtttctatgcatgtctcacattcatatctcaattctaaagatttaaagtcgaaaattcattcccaagtcaagtgcgatttttatttataaaaagcttgaaaaatgatccaacataaacatttcgagctctaaaaactgacgattatcatccggagtcgttttaaccattagatcttgatcaatggtcaagattaatcttgaaatattttttcgtattttttcgtattatttattaatattttaatagatctcattgcctgtaaaaggaaagctccataagctcattttcacattcttctaagtcaccataggtcagagcatctctctctagaaatttgagctcttttcttaatcaattttcttgtaattctcgtgagaaataaaaacgtagcttcattaccatcgcgacatgaagagtaaactactatatattgtgctgtctctaggaatggca

SEQ ID NO: 4010 - DNA, 1087 bp, Cannabis sativa
aaataagctgctgtcagatttgctattggtgaaaccccattgttttagggaatttttgaggttgtcaaaccaagctctaggagcttgtttgaggccatagatagctttgtgaagcttgcacacatagttaggatattgttcactgatgtacccttgtggttgtctcatgtagacatcttcttgtaattctccatgtaaaaaggcattgttaatgtctatttgttgtatgtcccatttatgtgtaacagccaatgtgaatatgattcggatagtgcatggctttatgactgggctgtatgtttcaaagtaatccacaccaggaatttgttgaaaacctttagcaaccaaccttgcttttaatctctccacagaaccatctgcattgaatttaattctatagacccatttattttcaacaatagtcatctcaggggagggaggaacaagagtataagtcttgtttttctttaatgcatccatttcattgtccatggcatgcttccatttcgggttagcaagggcagctttgacagatttaggttcttgttcagttatagtgtttgcaagatatgtcttaggtttataaatgccaagttttgaccttgtgagcatgggatggacattgtggatagatgtctgctgagtgacagatggggcagagatacaatcgggtgaatgagttgtaggttgtttagcagatgggctttctgagtggggaagtggggaaggagggttatgtgagtgatttggagaatctgtagagttattgtgtgatgttgtgggttgagtggcctgagtggtaagtaaatcagatggaatttgataggcatttggatcaagaaatctggtgtgagtgacagaatgtgtggacatgggacaaaaaagatctttatatgggaactcttgttcattaaaggtgacacttctagcaacatagatgcgaccactagggtgaagacatcgatatccctttgaggatatgctatacccgataaaaagacatttagaggatcgaaaagagactttgtgactgtcatagggcctaagaagagggaaacaactacaaccaaaaacttttaaaagattg

SEQ ID NO: 4011 - DNA, 1102 bp, Cannabis sativa
ttagagcaggaggtaactattttatatttgaatagtaagaatattacttcatctcaccattgattcggagattgttggtcctgcattgtttcattcttttctgatagttgttatatttcttttctgatagttgttatataaatcagtttcagtgtgtataattttttggctagaagataataaataaggaataatacgctacttgcttataaaagccagattttgttaaagtataagtactaacatgatgatgattgatgagatatcacttgcttttggaaaggatgaaatggaatgaggcagtatgagaccttgcgttcaaactcagttcaaactgcactattttatttttatttatttggctattcagaattttaatgctaataatatgggtatgattctgaaatgactgttgctaggggcaactgctttgtgcaattatcttgattggcatctaaaactatggtgataaagcatatatacatatgcagaactgtgtttcttcttgaatattttgagttctcattttgggattccattccaccctctactatttttaaaattccttaattatgttgttttgcttcccttgagaaatattaatgtcaatctcatcttattatgtttatttacaggaatacatccaggatgggattgactggactaaagttgagtttgaagacaaccaagactgtcttggtctttttgaaaaggtcagtattgaagcttgttgaatattttccatgagttaaaaatgtatgtaatcattatagagtatcattttcttgatgttcttttaaatccagaaaccattaggactactctccctcttagacgaagagtccacctttcctaatggcacagacttgacatttgctaacaagcttaagcagcatctgaaatcaaactcttgttttagaggagaacgagacaaagcatttgctgtccgtcattatgcaggggaggtatgtttaccttttcacaaatggtcattattctattctcttccattattcaggaaactactgaaattctttaatgctgttcattctctattatgtttgacctttttgtagtagtcttcctctctctctctctctct

SEQ ID NO: 4012 - DNA, 902 bp, Cannabis sativa
gagagagagagagagaaagttaagtgaatagagagacctaagaatttccaaccaaagtgacttccaacctacttggccaccaccatctttgtttttgcaccacccaaaagcacccttacaactccaactatgacccctctcctctccatgtttatttcctaaaaagaaaaaaaaataataataatttaataaaattgtagttttattttgtttcgtggggatggggacttgtatgaggggcgcacgtacgttatcaagtgggcccaagttttttcatcttcctccgatgaggtatgtatgggcccggcccaatccctcttcccgcgttggcccacttcctacactgatcaccaatcggccttttctactcttcggcacgggacccactttcccactacggacgccaccacgtgtcgcttcgattacttaagtttgatttgaagatggtccaacacgtcacgtttgttgcctctctctctctttctctctcctcctttctagctgctgacgtggacaggtagaaagtgggtatgtgggccctattttcagctcagtccctcctctcctgtgggtcccacttcccctaccccagtgcattgtagtatagctggatcctgctgtaaattaaggattaattttataattattttaactggttttgtatttttgcagtgtgaactctctaaaataattataacaattaaaaaaaaagggttattaaaatcaaataaaacgttatttgtttgttgggttatagtttgggagcaattattaattacaaaataataataataataataataataattgagtaattatattataggatatattcgtattcatgacaaattttgcatttctcttatttgtttttttgctacaaaatatcaaacaacaatcgt

SEQ ID NO: 4013 - DNA, 589 bp, Cannabis sativa
aaatcatctcagatgataatccttgacctgggaattgagggtattcaacgtctaaggatttcccagaccttggacattcttaaataaagtaatcatggcgctcggtgacccagaaaatttgagtttgctgcttcctttgatgcattaaggattaaatctaacaaggcaaatttccccctgaaatcataccaccatctttattttttttaatttccatatttatcattgtcgtacagggtaacatttggttttgattttcttcggattaacccgtcttctctttttcataccttcttcttgggtctgaagattattacaattatcataacttataggaacatcaaccaggttgagagcagtagtcaaaggagcatcctgaatagaacccaaaatcatggaattttgaatggtagtattaggcttggaatcacgataaagacccacgaacatctcatccctccaagaattgctttgtttattagatcattgaccctgttgctcctgaatttttcctaccaactacaagacccagaacctcccaaagaatcagcctttgtatcaatgtgaacagcccctgcattatcgagct

SEQ ID NO: 4014 - DNA, 632 bp, Cannabis sativa
ataggattccatgctacgttctattttttgtttttgggttctatatgttttgtgctatcaaagttagcttagtgaattataaattttttcgggaaaaatgaatttgtgttcaataatttcttctcaatttgacgcaggtcgatttgctaactatctcagtcccatctaggagggagcaatggcagatattactagtccatttcggtttcatttgaaattttcatactagctccttgaggtaagtcctttcagaatcagaacccatttcttttggaagaacaataacactaaatgtatgttttaggttaaatatcaattcattggatgatattttatttggcgatttcgatccaactctcttgggtggatttgttttttctttttctattctcttgatctattgtcctgcagtagtaatatgatgtgaaatgatcatatgtattccattgagaaaaaaaaagaaaaaaaaaataagaatgaggctatgttgggttatattattttttattaaataaaacattattaacactctaaatactttttcaattatatgttttaaccaaaataagtttgtcttgccagtgcaattccactctaatactttttctaattatatatgtcaaagttgaaat

SEQ ID NO: 4015 - DNA, 2804 bp, Cannabis sativa
  modified_base (2496)..(2497): a, c, t, g, unknown or other
gcctgtgaaaactgccttaacatctccagctccaaccatggttgagaagaaaccagagttcacagatgcagagctaatgcccttttccatcttcacccctatgaagtttgattcgtcaaatctagcatattctggtaatggaatatgaaagtatgcaagccccggtgcaggtcctttctggggttgtggtttgcttacataagcttgctgcaaagcaatgaattcattaaaattcaatatagaaagaagcttttcattgaatataacagtaagggaagttaccttaagctttgaagaagtacgttcgaaccagaactgttgggaagccttgatccaaccatagccagggatggagggaactgttgagtaatctccactgtctaagaagtaaagattgagagcagatttattctcaaaactagagcctttgactccaccaacctcaagattatagttcccaaaaccatcgatagactttgcctctggggggttaacttgtgataaagtgttgtttaatccaactatgtgtttcattaccccttctcttgaaagagtggattcctggtcatggtttcccaaaactgcagcccaagggatgttggaggctattgctggggcaaatgcagcatttagagacttggcagcatcagtggcatcagacccgtatatattatcccctgttgcacaatataaaaatagagaaaagagaatgagttaattgggctagtgaatgagccaattgggtaattataaagttcatttgctaaagatacaaacccagttattaaattggatcatcaaaccagtaaagaaggaaaagagaaagtttaccagtgaaaacgatgagattgggtttctcagcaaggatcatgcggtggatgaaggcggaggtgttgagatcagagcagcccttgacctggcttgggagcacatcaagacaaggagttgattttccatcggcaaagtgcatatcggccacttggagtatcttaaactcaccattggacccaaatctgagctttggttctgcagctaaagcacttattggaaggaacgacaaggaagctattaacaacaacaatacaacagaggtagtagcactaagaccagacccaaacgacatcttgttcttgttcttcttttttctttattcttctggttttcagagttgatatatatagtaaagacagtgatattagttttgtcatctatgtattgtttgttctcctctgttcgacgtaattaacatacccttattctcttcatgcataggcagttgacgttgacgaggacttcaaaagattttaaattaataaaaataaaaataaaaaagagaaacgaacaaagacttcggttttcattgacccaatcttcaaacacgtctgtaattagcaaaaattaaccattaacagtgtatggaagcataataattaagacttcagaagtttaaaaagacaaaagtaatacagtaaaaaagaatgaagaaaattcaattaaagaaaaagttttttttttatttttttttattttctttgatacaaaaaagactttgattttaatgaaatcgaccccttcaaacgcgttttcatcatcaagactcactagttgactacatacatttcttagcaaaaccatttatatagatgtaatctaattggatagcataatctaattggatagcatcctagggtgacgtaagatttaagaaaataattcttttttaaaaaaatactaattacaacctcctattataactttttagtaaatctccatgtctgaaatcacgtgccgaaatatttttaaattttctttttataatagttacagtatcattcctgtaaattttttcaaaaattccgaatagtttaccgtaccaaaaacagagttcctgatattccagtttaccacgcgggttcaaaaaacttcaaatgtattttttgcacggtaaactattcgaaattttttaaaatttacaaggatgatgttgtaagcataacgtacaccccgtgaaaaaaaaaattgaaaaaaatattctgacatgtattttcgagccatgtattttcgagcgtggagattgactaaaatattgtaacaggaggttaacggtagcactcctcacttttaaaatttatcactaaaagtactattaatgtctaataacaatattcttttaaaaaaaaaaaatactcaagaggaagactactttaaatttcaaaccaaatttttttatgacacaaaacaagtccatacatgttaaatgattggttcaaatgaagttatgtgaagaaattgtcttttttttttttaattacacattactatgccatttaacaaaaaaaatatttggaatacaaacactttcaatgcatcttttaaattcttcaaaatttcacaaaaattaaacaacaaatgtatctttcaagaaattatggtggcatttgataatagttttatttttaaaattttttaatcacgaaaataaaagtaaaatttttnnttttaaaaaataaaaatatattctataaccacttttatttttaattttaaaaataaaaaataaaagtgtattctataaattttatttttatttttttgattttatttaagtcgagttcagatatggggttgggtagtctgggccaggttgggactgggttcgaggttcggggtccaacgttagggttcaagtgtgaggtctgggttcagggtctgggctgaggtcaggtcccggtctggggtcatggtcccgatccagagtcggggctggggtctacgtctaggtcctaagtcaggttctgggccga

SEQ ID NO: 4016 - DNA, 717 bp, Cannabis sativa
cctaaatttatttgaaaatgtcttaatgaatcttaaaaaataaattgaacagtcaccaaataaagcacaaacagccaccaaaaatgatactattaacccgcaatcaaaatacaaattagacaccaaaaatagttaaacaaaataatctattatgcaaatcttacccataaatattaaattattaaagggaagaaataaccttgatatctgtaccactaccacatgtgttttagttgacatttattaattaaaatgaccttttgcaaccaaatagtaacttaaaggtgttatcattaataatttaatttggaattaagtgtaatttttgtccccaaataggaaattttgtctgaattttttattttattttataatgtataaccaaaccaattgttgaatcacaataaaattatttttacaaacttcaaaattatatattggaacaccagaagcaagagaaagacaggaaattacaattattcaaagatagaaagacattttagttactaactaaattaataagaacaattgcacatgcattggaagacaaatgccttagaaagaagagaattggtggtcaaacaaacactggtcctttccaatccaactacaaaaataataaataatagaatgtaacatgctatacgcatctatttctgggtaacaaacacatgactttaatattgtcaatttatgagtgtccaatattacagtaag

SEQ ID NO: 4017 - DNA, 675 bp, Cannabis sativa
gtatgtagacactctctcatcattatacccaataccagacacaaatagaatgagagcctttgtaaaccaggaagacgagaaatagtttagatcaaaggaaagcatcaagattcagaatcctcagtcattaccatcaccgccatagaagaggaggaggaagaagaagaagaatagttggaagcaatctaggtttttatttatttcacatatatttatttttatacattatataaatattttatatatatgtatgaggacattgattgatatgtgtgatatatcgggttgtgtgcatatgcagaagagtgagaatgggggtgatgtacgaggccattcaagggaaggaggaaggagccgatgatctggaattgggcctcaaagtctctaaatcacaatctcaccaacaacattgttttgttcttccttccaatcccaatcacaaaccaccacgactggtctctctcgacgtttttcgcggtcttactgttgcggtaaattaacattatcattatcattgtcttctcttttttattttataatctttttaaataatttttatatataaaaaatgattattaattaggaaatagtcaaattaagagtgcgtttttctctccactgggtcgatcccaagtgtcttccatgaattaaatctcattcattgatacctgcaag

SEQ ID NO: 4018 - DNA, 784 bp, Cannabis sativa
tacctctctctcacacggcttgatatggcttacattgttaacaaattcagttaatctttgaaagctcctacacacttacattgggaagcatgtaagaagttacttcgataccttaaaagcattcagagatggtattcacttcactccttcatttgaaatgactctcacaacttactctgatgctgactgggcaagctgtgtggatgacagaaggtcttttagaggttacttggtgtttttagggaataatcctataagctggtcagcaaagaaacaacatgtcgtggctcgatcaagtatagaaagtgaatttcgagcattggccaatgcagatgttgagttaatgtggattcaatcactgctgcaagaattacaagtacctattcttcacagtcatatcatttgggttaataatcaaagtgcaacagttttggcagctaaccccgtcttccatgctcggtccaaacatattgaaattgacctccattttgtcagggatcaaatcatcaacaagcaattgtctgtccatcatgttcctactcatgatcaggctgttgatgtcctcactaaggctcttacagcagaacgttttctttacttgaagtccaaactagaaatggtatccacaccatttcttttgcgggggatattaatgtaaaaccaaattaaaattctgttatatattgtttttaactgctgcataacagaattcagttagttaatttccttttcttagtttttaatcttcttgtaaaaagagtatttgttactctataaatactct

SEQ ID NO: 4019 - DNA, 927 bp, Cannabis sativa
ctttgtattgatacttttctgcattagctttgttacttgcagcttcagccataataatgtatcattttacttaaatgtgcttctcatatataatgtgtaaaacctgccataggatctaccattaataacattagttgaaaagtgtatattttatttagatttacggcataagttggctagaacttttggaggacttattgtgaaatactttgtgtcaatctagctaaattggtgttatagtcaagaaaggcttctagcttggtgttatagtcaggaagacttctacttgctaaagtaaaatgtcaatttcagtgagactaaaattatgctttctagtttaaatcagtattttaatttcttggttataattgtttgttgttgtctgttatttgtaggattcgactcaaagaatgtggttatattttattattatttaatttgttactgtcaaacttattatatttttttgctatgggtgatggagatagtgatgggataaagagagaatggagagatatgaatctgtacaaataataaattgatgataaatgttacaaatagatgtttgactcattagacattacattatcatagctttgaccattgttattttgtacttagaatacatatattagatattttgataatatacaaaatatattagattttattatattgtaattacgctattttgacaaagataggcattataaaatttaataatttcactataaaaaatacaaaaaaataacattaacaaagtattattattaaaaaacacaagaaattattaagtggatttggactcttgaacgtaatggacgcttttcatgtaaatccacttaccatactcaggctttggaaagagttcctccctgtgaggtggctccatcgctgtggaagagtaaaattctggaacgccataag

SEQ ID NO: 4020 - DNA, 1120 bp, Cannabis sativa
aaaaaggaatgttataattacaataaacatgatgtaaattatgctgctaataacttggagataataaattaagcattgctctacaataggaaaatgaatcaattctatttgttgagacttgaacaaagtaatggaaattgaatattattaatttgggtggtgattccaaatcactgatcatttatctaactatatatctctatctagggattgtgcattattttcttgtgggtagttgaaattttctcatatagtggggcatgtacaaaatgtcgtgctacgtacatcgatgacatagcaatagctagctagccatgaccctatctatagatatataatatatatcaactaggtcattatatctattgaacaatacctaatatctataatatcattcatacattataatttatattatatattcttttcattccctatggttaggcaaacattatgatctatgtaatattagagctcgctatataatgctatatatataggctatagcattatatattatatagtgcacacaatatatatattcttagaataataatgaaaaaaaccaaacaattataaaaaagcaaagtacagtaaacaagagagaacttgatttgtagatgtggtcatatttttaattaagaatcattattcactgttacactaaatcttcaatcattctagtatgacataaatatgcatatttaattatattatagcagccgtttacatatataagtggaatgaatgaacctcgtgtatatatatataataataatgcaacattaaattaatattacatttctctataaatatataaattattatatattcccatgcatgcactcaaatttccatttatacatgcatgctctttttttttttaatcattcaacataatatacatattttttttatcaagattattcaacataatattataggatagtggttaatatgtgattatattgtcgttgataatataatgcgcggtggacccacattgttgtcttggttttgaaaaagcaatctttgaaaccaagctaaaaatcgaacaaaaatcataggaatatattgtagcactatttttttctattattttaatacacttatacgacaa

SEQ ID NO: 4021 - DNA, 618 bp, Cannabis sativa
gaacagccccggggctctccactccggcgaaaaaccagcagagaggccattcactaccgactggcaatccgagaagatggacacattccgccactccatctgcaaaattctgcagcagccccaatgtatcgctgctagttcagccacaaacggagaggataccttcctcttagcagtagcaacctcaatcacagaacccgaacgatccaacaccaagacaacaataataccaaactcaccacggatcgccgcatccacaaaaacattaacatcagtccaaggaacatcccgagggactttcaccacatcgggaatgggcactaacccctgctgatccaaagaaggaggcacaactaaggaccagtcagccaccaacaaagagatctcatgctgaattttgggcacctcaagactatgcccctcatggaaggaagagtttctagtcctccacaacacaaaacaaagagaaatcgcatagatagataactgagcagtatccctctcacctagggggtatcattaggatgcactaaccacttgatcaagtccaagttgtcagaaaacaccatggaatccgaacaaaaatcccacgaacccgatctccaaacctggacagca

SEQ ID NO: 4022 - DNA, 1780 bp, Cannabis sativa
ccaaggttcttcttgttaccccagaacctcactcttacaaagcagctctgtagcatccacagcagaattataccgtgaaatgtgagatgtatgatctccaaaagaaaggtacatgtactttggtaccctttccccctaatggtaccatttttaaattaaaagcaagacttgttgcaaaggacttcttgaaacaaaatggttttaattgaattgagatttttagtccagcgatcaaaccagccacaatcaagattgtcttaactatcactttgtcctacaataggtctttaagacaacttaatgtaaataatgcattcatgaatgaggagcttcaagaagagatttatatggcccaacctcctcgttttattgacactaagaatcctcatcttgtttgcaaactacataaagctttctatggattaaggcaagctccaagagcatgatttgacaagttaaggtttattcttttgtctttttgttttcacctatgcaaaggctgatcaatgcttattttatagacataccagtggttactccacatttcttttggtatatgtggatgacatattgctagcaagtaactccactcttgttgtcaatacattaattaagcacttgcatcagatgttttctcttaaggatctaagccccctcacctatcttctttgtattaatgttgctcatacaacaaatggtttacccttgtgctagaaaaagtaaataataaatcttcttatcaaggccaatatggttcaagctaatactctacctaaccaatgctaggaggggagaaactgtctgctcataatgatgatcaatacagtgatccacattgttggatgggaaaattgccaactaagtcggagttaacaaattctaattaatcaccaataaggagttaaggataataaataaatagaaagaacacatagaattatagagcttcgatcccttagttatgggtattgagttactccccttttagttgtattaattatgagataaatcaatgcagatcgctaaggaagataaagtgaattctagctacaactctcaagatgtttacagagaatattcgacaaagtgctcttaagtgtgagattatgatttcaagtctcttctgcttgtgaactcactcactatttatatggggggaggttgatacaattagctccatagaaggcgtgatccaaaagtagatatttttatattattaggtacagttagcatctgttgaagctcctacaatcttgggtagatcatttggatccacatttgtatgattcagttaaagatatttgtgaaagttgtttcagaaagaaatcaaggcttttgtagccttgtctatcattcatggcatcgtttctcctagccaacacattgacaacctggccagacactttccgagacttgtctctcttgtgggattacttgtgaaacattcttgcaaggtaagtcaatctcgccttctctagctagcatgttaatgggccagctagattctttctagaagcccatctagagcacatggatatcagcatcatatgggatctgccaggtacatttctgcctggaagtctcttgtcatgttaaaggtcagcacgactatggcacgtgtaagtgccacattagatgtgaaaactttgagataacattttccccctaagtcctcgtgcaaacatctattcggatagggacttttgatacttgtacagatgttggcagacatgcaagctccacataattggtactctggtgacttttctatgaagaagtg

SEQ ID NO: 4023 - DNA, 1397 bp, Cannabis sativa
agatcttgaattcaataataaaaacaatctgtatcttatgaaattgtatttatatacaagcgtgattgaagtaaatgcaaattaatatacatcattcctaaaaaaaaaaaaaagtcgattaataaattgcgttgaattttaaaatatctaacattgttgtagagtcgttcttgattaattacctatatttcattggaaattaaggatatagataaaaactaggcacccaaatgatagttggaccaccgtaacaaaaagaataaacgtggatgatttttttactttgtttactattgttgtctttgtgttaaaatattgaattgttgaaatactatcaaaatattgcaggttatggaatctatactagttctcttgatgagcaatgagcgatgggaagaaggaaaaattatgtcaattatgaggctagtgaagaattcataccaaaagattgcaagtatgaacaactcgtccaaattctactctcttcactgacgtgcggccccacaaaaataaccctgctaatctagtaccaagcaaaagatggaataccaccgattaaaatattcaatgatccgggccttttattttatttgcaactgaagatcaaagaaactgatttcaccatatatccattatgcgtcaacacacagaaaaagaacacaataatcgctgcaataccaatgttcacataaaaaaacagcacaagatcaacaaaatgtgggaatgcttgagaacaacgcgccaataatctaatcatatacactggaacaaccagcagaggaagaaggagaaactgaaatagaataaggtgacaaaaaccaattcgacataattgactatgaaaatcttgttgatgaagaaatgatagaaaaaattaaaaacaacaataaaaaaaatagattagaatgttgacatcaacaacacaaagttcataatagataaattccaccctgaagttaaaaaagaacatgcatataaagataaagaaacactcaagagagtactgagctactatgcaatcaaaaataacttccaattcaaggtatggaggtcgtgctcttaagaatattgtttgaagtgtgtttttgaaagctataattggtctctacgagcatcaacaaatgggccaacaaatacattcataatcaagagtttctcaaaaatctacacctacctaataaatgttagatatgaagactgaaggcaagcaacaacaaaattcataggagaatgcatcaaacacatgattctgaacatagagacaaaaacaacaccactagatataaaacgagaattgaaacacaggtacggaatcaagatgaactacatgaaagcttggagaagtaaagagcatgctacaaatgacttaggaagaaatgctaaggaatcatacaacg

SEQ ID NO: 4024 - DNA, 877 bp, Cannabis sativa
tatatacgtacactagtagttatttgtattctcactgtatgaacgtatttttaaatttaggtatgggaaatttaacgtgcacaactagctataatcaaatacgaaatcccataatctcaatataatttaaggcataatatataaaattatattgtttcacttttttccgtttgggtttggcaataatggatatggactgtgcaaaaaaaaagtaatagaaagcaacgtcatttaataattaggtagaaaaagtcaaatagtaggacatttggaagctctcttaagtgtagtcaattattacgaatttaactatgtattgttaattaatatttttttttcctaaatgatgagatttgtggtcggaaactgatcatattgggggacagtcttaataacttaaatttgttaattaatatatttcgaaattcagtcatccctaacatattattgtttgacttcaatatccagccaccagttaaacagtggaagtagctagaactattcatttctcgtcctctatttctgtctcatgattaaccaatatcaccaacagaaaatatcaagtcaaacttcatcaattatattgaggaagagtttccaattatagaaagacgtaccttgaaataatgtggaaaaagattgtgtaacatcatgaaatttgaaattattataatcttaagcctattatttaggaaaagttatttaattaattattgaagaaaaaaataattaattaattatgtagagttctattccctatatatacttgggtgaccaattatacgaatttatacaaaagtcgtaagccgtggaaaatgttgattttatgtttattgacgaatatagatcgatataacactcaatatcatgaattttt

SEQ ID NO: 4025 - DNA, 2250 bp, Cannabis sativa
ttgtgaactacttgaggatagtttcggttgttgtggttcctggaaccaaaaaaaaaagtgcttataagaggtgtctcttgaaagttttgagttggaattcaaattatatattgtaatatataaatgtttaaattaaaaataaaaatattttgatgcgagagttggagatgttaataatttagtattggtggttttctaaattctaattaatagtaatccaatacttagtagggtgtagtattatatgatatcatatataatttatttaattatttattgagattaatataatgattgttgattatatttgttaaagtaagagagatattagaattttatatagactaatataattacaaatataattttatattcacaatcatgttattttttttttcttgagagacaatatgagataatttcatcgcatcatctttcaagatacaaagattcaatgaatcatgttgttttaatttgagtagcctcatgaatattgtaattgaataaggatttacatctaaaactattttatgagttttaatattatgaggccaggatattgtatttgacaattttagactttaatcatataagagaagacgaacatctcaaagattttattgagaatatcaagtttaataagcatgtatgttctagctatcattgttgataagtatataaagctatctatgttggagttttaagttgacattagacaacattaaactattatttaaggaataattagatatatcattcattttgttgctttcgctattattattgatggcctataattggccagattatggtaagaaacttcatatgagaagaaataaagataaagaatcaaaattgatgaacctgtgattccatatacgagataagtttaatttacatgtacctctaaatatataattgatagtcgttggtagcttaatccttatttggagaatttaaatagttatatcatgatttgtaagctatgatcaagggtgagatctaggcttaatccaaaaataattaggagattttcttgatggtggctcattttaaaaataagttgtttgattgtcaaaataaagtgaattaaagcttatagctagcctctaacaataaatttgtttgttagacattattattgaataataaagtgtaaggatgtgggaactaaattgttgttttaagatcttgtcttgttaaatgaattaagtcttaagaaggtaactcacaaggacacccgatttcaatagattaaattcattttgaggaaaaaaaagaaagttataattattgtaattcttaatatggtcaatttgaaacattgtcgtcaatccacactatatgagagatcagtaagagcaatgatatgtttattttgtcacttgatataatacattgctcatattttatgattctagccaattatggagacgaattaatgtgttatttatctgtcaaataaagaattcttgataaaccttatctaatctaaataattaaatttttcatgatgagatcaacagtagaaagattatctcatagtgtgcattgactaactattattgtgattaatgttttgatttcattgaaaatgtttaagtagtctaaagtcactactacaaaaatgaccttttagttagtttttaagtgacatataaaacatttagtttggttggtgtcaccgacactatagctgtagacgcaaatagtcttattttctgtttcacttagtaaccgacgctaaaagacttttgcttcgattcataatcaaagcaaatagtaatagactgatgcaaaatagatttttgcttcaattatgaaccgaagtaaaagagtaaaaagaaaaataaaaaaatcagaaccaccaccaccacacctcatcggaccaccacagatttaaaaaaaaattacaaaaccaaagctatattcaggaaacaatcccaagctaacaaatttgagaagaaaattaaaataaaaacaatattcatgaacatagtaacaaaaatacaattaaactttaaaaaaaattatacaaaatacaatttaagcttttttttgtcactgccacgaaagagctccatccacctaaaaaaatatgagaatgattgagataaagagagagagggaatgatttcagtgagagattaggagagagaaaaaaaatgagatgcttactattacacgacgatggagggaggaggagattggtcactacaacaattaatactaggctaattagtaattttt

SEQ ID NO: 4026 - DNA, 1587 bp, Cannabis sativa
aaaaaagtgttaccaaacactactgaatgtctaaataaaaaaaaatgtactgaaacaactctttaaaaagtgtcttataaaacatcattaaatttgtttgcatatcataatgtataatttttttttaaaaaaaaatcattcaacttttgtgaaaaataaacattaaagacttaattggtactatattaatagaactcattgtttaattgctatattattttttttctcaaactataattcaagtggtatttatgttaaaactctctattaaataatgataaaaatagaaaatgccatgctatatacatcttaatagtttaataatatcgattaaaccctacaaatttgtacgttcaatgaacttaataattcattcgtaccaacttggctttattgaatttatataaagtggaataaataaacatatatatatatataatattaaatgtctttcataagttattttgttttgaattatataaatatggtttacaatcttttaatatattgcatacataatctttatattatattaagagatatttacggatgaattttttttaatatttataattattacacatataattttgataaaaaaaaagttgtggtaaaattactttcttttataattttatggtagttgtattcttttagcttttatatgtcaactcaaaaatatgtgacgatatattattagatcacatattaaataaataaatatttatgttttttgttcaattttttttatttgcttaattaaacaaaatctaatttaacttttttattcaaatttgcatatttttaattaaataataattatttaatacttagtccaataatatgtcgatatttctgagttagcacttaataatcaaaaggattatcttacaacaaaatcatatgataagattttttatcataattttttttttttattacaatcatatgtataagaattacaaatattaaaatagttttgccacaaatatttcttaaatgagttaaaaattgagtttaggctttagaatcagtgctttcggtcttaaactctcttagtctatttatttaaaattattataaagtcgaacatccaagatatgaagttaatgcatatcaacaacagcaaggaaggttccaattatttataaaatcttgaataaagtataaagtttttaaaggattcgttgcaatgttttagtcactatatactatatactcatcatgaacttgtatggtcctgttgtttataaactcgccatattatgtattataatataaatatatatatttttaaatatttaatacagataaaaataaaaataataataaggcagaaagtatgtatcgcgtgcaaacattattttatccagacaaacatatttacacattttttttttgttattattgatattcctatatacacattataaatgttatacataacatattgcaaaaaatatggaacagcttacatgggatgatacgtaaccattcacctaattttcaccacaattttattttctacgatcaattcaataaattactattactaggatactgtaaattgtaataacgtaatactgt

SEQ ID NO: 4027 - DNA, 1072 bp, Cannabis sativa
tgcaaatttatttagttaaaataaataaatgattcacatttattttgaggttgtagtttgtatatgaaggcttgtaatttttattttggtaaaaatgatttacatttcaagactagtagttttcattttggaacgactgttgcatttcaagcataaaagttattaaaaataaaacaacattaaaaatttactataaatgtaactagtaacttaaagttgctactctccacttaatttcctagggaacaaagtaggaacatatcacgaggacaatgtagaaaaacatatacatacttccaacaaaaaataaatcacatgtttcttagagaaacaaaatgaaaaataaacgaatcccaacaatgaaactaaatcaaatcaaatccgatctcaagtaaagaaaacaaaaactccaaaactaagttttcattttatcatcatactcttttttagttattttttaaaagcaaagggtatcaaattatcattttatcaaagctgtgcagaatgttgtaagccacaaacttaataatagcattaaataaacgatccatatagtagctgaggaggagtgtgttagtactgttcacgtataaatggaagaaaagtgagtgagagagaatgaaatgaaatgataggacaagaagaaaaatattaaacaagatcctattgtgattattacccattaatataaacgtacaatattttattttttctgtttggacagtgagaaaagtggggcccatttagtgtactaaaagaatcgtttcaaagatatgggttgagtatttgagtgaccgtacaaagcataaaatataaagaaattattattaataatatttatttatttggtaagttgagctattgaagtgactcttcttaacttaactcttcaatcactagtcacttaatataagactagtctcatcagtcgtcacctcctccttccatggtggtaactggtaaccttctttttttaggccgccgccgccgctgtggttactacctttatttggaaataatacttaattaatttttaatttagagagttgggttttatttattatatttgtga

SEQ ID NO: 4028 - DNA, 917 bp, Cannabis sativa
aaaaaaattaccccttaattattgtttatattatataattagtattaaagtgcatgcatggtgttttgatgtagaaattaggtgagaagcatttgtcaaaatgatctacaagtaaagcactaacaataaaaagttggaaaaggtgccctaaccctagcaagatataataaacctaattgtacaatagatatattatgatttagatatcctaaaaagttaacataagacaaaagcaaacacaatttttatttatttatatagatatatatataagttatatatatatatgaagaggtagaacatagtttatttgagttaaacatgctttttaacctactttggttattgttttgcttttgtcatcttctttaaaaaggttgaaatcaaagtctaaaataaactcttcttctttacccacctctataaatatatatatatatataaatatatatccaacaaaaaaataatgtaggtccaatatttggtttacctaaacccctttttaaattaaaattatttaattatttaattttaaattataaataatattaatatatgaaaatgaattcatcaactttttttttctgcctttaaaaagaagatgctgacatcttaaggcttctaattttttagtggaaaaagataaggaaatatggcctttgaaaaggtgtgattaatattaattaattaattaattaaaattgtcttcttttaataaggatcattataccttttgtattattattatagtattaacagaatattatttgcattaattcctatacacataaactaatgaataaatgggatttaaaataaaaataatttttaattacaaaaataatagaaatggaatgtgtgaatttggatttttatgagggcaaagacaagtatatgacaaagcacaacatttattt

SEQ ID NO: 4029 - DNA, 798 bp, Cannabis sativa
atgtgtttttatcaatttctgtcttgatttccatgtattaaaaacagttggactgtgaacacacatatcgtcatattgagtgacaaattttctgtcttggttaatcttttgaaatcataatagaattcttattaagactttaattaattgacgagatttgtctcaaaacaagccaagaatacttgaaagagtatggctattaagcaccatggtacttaccatcacaaaatattgttctattatgtattatcaatttttagtaatatttatcaaaattaaataagtggaactcaatattaaattgtactaataatgataatatcttaccagaatgctaaaattatttattaatagaaataaaagaaaatattttactagcaagtgtaaattattttgtgttcttagttaatttttatttgaagagtattaccgtcaacttcctgttacaatctcttagtcaacttccgcgttcaaaaacacatgccagaatattttttttcaaatttttttcatgggagtgttcgttatgcttacaacatcatccctgtaaattttttaaaaatttagaatagtttaccgtgccgaaaatacgtttgaagttttttgaatgcgcatggtacactggaatatcaggaactctgttttcagtactgtaaactattcggaatttttcaaaaatttacagggatgatactgtaactataacgaatagcgctataaaaaaaattgaaaaaaaatatttcggcatgtgattttgaacgtgaaagttgtaataggagttgtaattagcattcctct

SEQ ID NO: 4030 - DNA, 657 bp, Cannabis sativa
gtagaataccaggcttaatctatgatgaagtataaaatgataatcgataatgaagtttataattttaatctacaatgaggtttgtaattaaaattttgtgttttgcacactccaaatttggatcttttaaagaatcacctcaaattgacattcgaatgaaaaagttttcaaccaaaatttttattagatttcatcgcatactatcgcaacgacattacaaatgaatcgttaaaatgtcatatatattctttcaaaagttaagttttcctaactctcacaaatgtaccattagatattatttttgccaaaaatttttttttttttgtggcaccatcattaataattaattatagtatctaacaaaagtaagagtgtatctagaactagaaaaatattataattactaaggtaataattaaacttttagtaattacactatattttaaaatactttttataactaaatttataaaaagccacttatataatctttatgtataaataaaggttttgtctttgtttaatgcaagatttaagcattctttcatagtcttcttcatttctctctcctattcttgtttgttttcaatttaaatatgaggtaataattaaatataaattttttcatttaaagaaaatagttagtaattacatagt

SEQ ID NO: 4031 - DNA, 1077 bp, Cannabis sativa
tgcaacttcagcttacttaatggcagctgtggactgaatatgaaagtaacaaactgattactttaggatcgtttttcggagtcttgtaacaaaacaaaagtataatgctttgattgttttgtggactaatgcattacaaattatgagccatgttttgcagaaatgacctttttcttggactttgtagggaacaggactctctgccaaagaatgtgagatatgcgacttctttgtgtatattcctcaatacggaggggggactgcttcactcaatgttactgttgctgcttctattgttttacatcaatttggaggtaacactaataaataataattggatgctttgtcttcacgagcagcttatgtttataagctctttctgtgtgaactaaacatgatgtttccaattgtttctcactttgtcaaaaaaaaaaagattgtttgtggaaacccgccctacgtcttttgcttattgttatttggagtgggttcagatagtgcattaggttcataaattaagcagaaaacagaataaggtttaaggtttctatgattagcattaaaatttatttaaccaaaattttctgagtatagagagaatgttgtgaaactaaggcattacatccctatttggtacgtcattgaatgaacctatgccatatttgagtttatatgaaagtctaattggggttatcaatcatctgttctgtttacggttttttagattgtactgaactttccgactgcaactttcaatgtctcatacacagttttcttcagtttgggcaggtttccctgagagaacccgtgatgggaacaaatttattgtggctgataaacctgaaaaacaaggtaaacgaaattattgtgctgaaacagcagatgctatcattgaagagcgaagatcaagaaaggagaacgcttctaatggtttctttgaagagagcgaaaacagcaattcatcttctaatcttctcgatgcgttgtttgatgatgtaaagatataagtattttgacatcataaagtatagatcagaatgctctataactgggaaaatttagttcccaataattttg

SEQ ID NO: 4032 - DNA, 2584 bp, Cannabis sativa
  modified_base (1991)..(1998): a, c, t, g, unknown or other
catgatgatgaggtacgtaaatttctatatcaacttttttttttgttcttacgtacttatatatcatgttatatacatatataaatcgtatagtgaaataaataagattttataacttcaattccgtgttagtgaattgaagaagattataaaatttgtttcatgtttttctttttgttttttgtttttttaataaaatgaccaaaaactttcttgatgatatgtaaagaaattcttccaactaagtaatattatctaatatctattgagacaaaaaaaaagtaaaataattctgtaatgtatatctagtgaagcaaaatacaatcgtatcaaatatatagttgaaaagatcgataacaaaaatctaaaatttttaaaccagacatacaaacatcatattttctattttctttagaaaaaaaataaaattcttaacaaaaaaaaatctaacggattcaatgtaataattaataaaaaataaaaaaaaatattaattaattatttataatttagaaaataaaaatctagcggattcagtgtaatcatttattatttcaaaaaaggcgtttttgttaattaattgtatatttatttctctaatttgactgtaaacgaagatgatgttttgcatgcatcatttttgttttacatatatattttaaaaaattatataaatactttattaatatttaattaaaaataattatatatatttatataaatataaagtgtatgatagattggtccgtaacctttatgggacaattgtcccaactgaaattgccataggaatgttgttaatatttagagcattgaagttagacacatatagtctctaatacctttatgaggtagttctttgatgagcatgttaatattttttatagtaaagtaaaaatatgtgaaatttaatatttaatattacactactaatattaatattataatatatttattaatccaagattctctttgtaaaacttctcaaaaagaaaaaatgcttatatgtaaatatattttgaaaaatctgttttttttttcttcagataattaatgatttaatgttttaaaaaataaaaaagataataaagtatgagaagaaggtgcttaggttctatttatttgtgcgtgcttgcttaaatacagataaacctttggatattattgtgtctttaatttatttattctaataattataaggttgtgatttgtgaagggatatgttgaaaaggagactaaggaaaagagcttcatgagaaataaaaggacccaaaatgaagatgaagatgataacattggtggtatagatttggaccttaaattatcaccaccaaacgagcactactcatcagtaccaaaaggatcacaatcaaaatcatcatcatcatctcatcaagaaccaaatggtgcatcaaaatatatgtgtagcacaaataatgatcagagagattctgcttctgtagcctcaacggttgaaatggcatcgttagttttgatggggtgtactaactgcttaatgtatgtaatggtgtcccaaattgaacccaaatgcccaaaatgcaagagctctctcttacttgatttctttcgtgaacatccaagcagtgccaagagaccaaggaggagctaagacctttatttatttgttcttttcaacagttttgtgttgtctagttttttcttttttgagaacaatgtgagggttttttcatataaaaactttgaagaaataaaaaattattaagtactattaatatattcctttagttttattcaaaactctctttgcgctaaagctgactaggcccgtgcttggcccccaaagtctagatcccaaaattttgatcaaaattatagatttaaaactaataaatataacttaatatatattgtattaaattttgggctcgttaagtgcgctatattgtattgtattagtattatttaatataatactatttggtatttacttgtattaatagattgtgtannnnnnnnatatattttcaataaactcgactccaacactgactacgggtctgggtcaaggtcccaagttcgggttttgtccaggtttgaattcaggtctgggtccgggtcctaattcctgagtcctaggtccaggtttgggtcccaggctcgagaccgggtttgggtttgggtttgggactcgagtcccaagtccgggtcttgggtctagtttgggtttgggttcaggtcacgcgtccgggttagggtctgggtccgggtccttagtctcgagtcctaggttagggtcccaagttcgagtcctaagtctgggtcctgggtccgggtccgggtttgggtcccgggttcgaatttaggtcttgtgttcgggtctaagtttaggtctcgggttcggatccaggtttgagttcgggtctcgggtcccacgtccagatcctgggtccgggtcccaagtcataggtccaagttcgggtaccaaatccgggtcccgggtccaggcccgagccttaggtctctggtcctggttctggggtcacaactccgggtctagacctgagtccgggtcccaagtctgagtttcgcctcgggttcgggt

SEQ ID NO: 4033 - DNA, 1008 bp, Cannabis sativa
atgttgtgagtgtagtgattttctatgttgtttattaaattaaaaagtgagatttaatattgaattgtaccaataatggtttgacacattttgtggtgtttaatgccttaagatccttagcatttctctaagagcaacttcagttggattatgggagtgttctaggtgctgctcaatcactaactgggtctcaacttgtttttttttttttttaacaaaattctctcaagaaaatggcttaacagtagcaccggtgctgactcctttttttaattattttttttaatttatttaattgtgattcgatatttttaatcaacctccagaccttgtatggccggggagaccatatcctaccgtgtatggccagttaggattgccctggcaagattctttgtacaacctgatacgtggactgcaagctacttacgaattgggccattaacaacccaacaaagtgatgaaaattatctactttcaaggggcaatttagtcttttgtatttaatcaatttagtatgtaaatatttaaggattttaattgtaaattaggatttaggctttcctatataaaggcttttaactctaacctaaaaaagctaagtctaattctagcctccaaatcactctaagtttgattagcattatagagagctatatctgaatagcattatctctagttatcaatacagccaaaaagagagtaggtcattactcgttaactaaaggagccaaacctctataaaaattcttattttatttactttattgttcttgttgtataacacgaggcaaacatcaaattcatacgattccgctgtcagtcagtaactttttgaggtcaatgagtttggcaattatttttagactagatttacatttgtttaggtgtggaccaaatttgggtgagaggaataatctgagttaatatttcttaaatctagtttcattttgaattgatttgtgttgaaataataaattatccttaaattttcattcatggaatcta

SEQ ID NO: 4034 - DNA, 1858 bp, Cannabis sativa
aatttcaaacaattaaaaaaaaaaagatttctcgtaatttttgcaagagttttaagttttatttttggttgaaattaataaagtgagctcttttgtaattataagtatccttgagtcttaacaaaaacaaaattatgactaaaatatgatatttagactctatgttgttattaatataattttattgacaatttattatctatatttatagatttgttgtatttaaaaaaacatttatttttcaataaattctatttttgtgaccaatattattaggttagtaacaaattttgttagaatttaaataggattgttcttttttattattgtcgatatatacacacttttaaatagttaataattctgtagcatatgtttttttcaatttcatttttcttctctaagttacaattgttaattaacataatgtattatcaatattctaagttttaagttttcacccatattattatatatgatcccattttaattaattttggtgattacacaacaggaaagtatatgcattgagtgttgttggtccaattccagaagagctatggactctgaccttcctttccgatctgtatgaaatcttttatattctcttacttatatcattattttttagaacattgctattaatcaacagcaccactgcgaagtgacaccttacgattacgattttttataataattaaaagatatgaaacataatatttaattggactaatagcagaatgacacctcgtagtgatactaaatactacaggtacctttagcatttctctatttttttttatgattaatgctaatggtatttagtatactcaggttgaatataaatcagttaaataacttttaaagaatatcgctaacatattacttactggtgctcaataagaatgatttttttctatgcatataatacttggtttattccatgaattcattttgtaggaacttggcccaaaatttgttgtcaggttctctatctccatcaattggaaacctcactaacatgcaatacttgtaagtccatacctaaaatttaagcataaatttaacataaatgctcaacatgatttggtataactataatgtcttctctgttttggttatgtaatactaggagcttaggcataaatgcactgtcaggagaggtaccaaaggaattgggacaacttactgagctaatatctttgtaagtttgaatgccttcttacaaatttattgcaaccttatccaattccatcatattattgcccttaattctcttacattatattatgtatatatataggtctttttcatcaaacaacttctctggtcctctgccccaagaactagggaacttaagcaaactagaacaactgtaagtttgtaaaatctattaaagatttgatactttttcttggctgcatttagttaagaatccataacataaactctattcattcaatttgtttatttgacagttacattgatagttgtggaattaatggaacaattccttcaacatttgcaaatctccaaagcttgaaaacagtgtaaattatttcttctaactcatcattcaattccttcaacattattatattagaagaaaaaataactaagtatatttttcccctttttctagaaagggatcagatattgaactcacaggcgagatacctgaattcataggaaattggtcaaatcttacttccttgtaagacaagtttaaccaatttgtgtgtgtgtgttttttttagataacattgcaagttgcaaaatctataactatatattaaaatggtagttatatatatatatagttagttggctataatgtgtatgtaggaattttcaagga

SEQ ID NO: 4035 - DNA, 2614 bp, Cannabis sativa
  modified_base (227)..(227): a, c, t, g, unknown or other
agccccaggctggcgagctatgttcatgttaatcgtacagtcatattttttttcactgcaaaaaaaaaaaaaaaaattaaaatttgcgtcataaatacttaagtttaactcccaattataataatacataagttataattttagaacttttatagatacttaactgttaagtgttaagtaaattgccacgtgtcaatttctaattgatccaagtcattaaatttttntttttttaaaaaaattaaatataccaaaaaatgacccgtgaataatcactgaaaatttaacggggagttccagaaatataacttattattgacaaaaattaaacttaggtatttatttgcaactaaaaattaaacttaagtatttataccataaattactccataaatagttataaatagcctaaaataattagttataaaaattttctttgcaaaaaaaaaattaattataataatattttttatgtccacataggaaaaaccagtggccctagaatagagggcttaaaccctattttgtgtatttacagagaaacccaaaacccctggctctgaccttgaacgaactcccgactagccatggccgccgattcaaaagcttccaccaccagaaagagaaaggctatactccgccgcaaacatgaagatgaagttgaagatcaacactatctcaaaagacatcaaattaacttcttagaagaaactgaagaagcggaatccgtacagcccccgattccatggaataacttgcagttgattctatcaatccagaacaaatccatcgacattcaaaagttagcttttttttttttaccttttttatttttaattatttttgtgttttaagatgaattcaggtcattgtgtttaaacaatgtctgtcttgttaacttaggagttgattcattttgacgtaagtcagtgttaatagtgataagaagtaataattgaattgtttgggttatttttaagtgttaaattttgtatctttactgatagtttaggaaatttgaatgtaggaaggtggaacttgcttttgattttgttggttcgaaaatgaaagaaggaaatgatgatgggaaggattgtgagactgtgaagatttcacgtgttgtaatatttcttaatgattgggttcagtctttgttgattccttcagggaagagaattaagaatgatgaagagaaggagaagcctcatggtcaagttgagacatgtttggactttagatgttggaaagtttttaaattctgcttgaagcaatcattgaaattgcatattcctttgaatttttcgagaaaccttttacggtcgttttctttctttgcaaatgatacattgtctttaatcaacaatgtatcttcgtctttgataggatcatattttgttggtgaaggatttgagttgcgtaaagatgtgcttgattgtgtcttgttattgttctcaagtcatggtggtttgtcaaatgaaaatttagaactgtggctttcgactgttgttacagtgcttgagcttgttcacaagattttcgctgagaatctggttactggagatgcgggtgtttatgtattgcggttctcgtgcttgatatttgaaccgtttgccaagtttttgagggcacacccttgtaaaaaaaatgccttttctgattttattgacaaacttcttgaacctctattgcatcttctcggtatcttgcatagtgaaatggatgaatgttgtcttgattggaaaagaaatttgttgaagttagttgaagatattttgtctcatgggttgtttcatcctgtgcatattgacgggtttttgtgcttacgtggttcagaaaagtatgctgcagaccatagtgaggctaaaactgacactaaaacagtcattatgagttaccatagacacttgtttactaaattggaagaggttatggctacaaagaaggaattggcaacaagtagcataggaaggttatttcgcctgcttgttgatcgaattaaaaatcctaaaggagctttagtgatctctgaaaataccacgatggcagagaaaaccgagtgttcaacacaactagaaggtaatatgttgggtgatacggctacagcattttctcaaagtagcacagttttagaacagagtaactgctcaacttatataactgcagaaaaacgaaagtcccttcttaacttttttgtaagtgttatggaacctcttttgcttgagattaatggccaccatcaatcaaaacaaggaggggaatctgtgttttcggatgccctttgtacacttaaatctataaatagtttacttgctagctttatgcacgaaaaggtgtacttgagaacagaggatgcttcagagggagcttgccttaatttcttgaagaatgtttatgatacagtaacattactgtcatctaatttaatcaaatcttataagtttgatgttgataacagaaaggagggggaaatgctggctttattagccgaggaggtacttgttgctgttggttatattttggaaattgagtataatgttatgggggatgatctggtaggcttatggcttatgatgttttcatacttggtacttgggttttctttgaccaatgtggc

SEQ ID NO: 4036 - DNA, 790 bp, Cannabis sativa
atttaatttcttactttttttttggaaaaagtaaaagaacaagaaaaattaagaagcgagtaaacttaccgaatgtagcttgggaattgatatagatatcgtggtaagttgacccatatttgactcgaacccgaatcgttggtggcggggctttggtgtgatcagagtcagtgcgtttctggaccaacattcctccaggtctaagctcccactctgacagcgtggactcggcttcagctccagctccagaggcggctgctgagccgacattcatttgtgataatcctggacctggggtcttattcttcatcttcatcatcgtcttcacttgatatttctctctcaataactcagatcttaaaggggtttcggaccctggtgatctgcgtcaaaaattgaaaatacccagtagaaaagggaagatactagaccctgtttcacaagcctctgacccgagcattccccgagtcaaaccccccaacaccaaaacgtgtctttagaatacaaaagcttttcttttacagaatcaatggcgtcttacaaaagtaaattattgaaacacacttagcaccaaaccaaaccaaactccaccgaaccggtttgtttgatgttggagaagctgttgtaatgtacccgaagaaacccagaaccttccagatcacagatctttccagcaaaatgtaccccaattgctctaactttctcgggtcaaaactaaaattttcccagaaagaattgtaacccaatagtaataataataataatctcaaacctgtagaatgaaaaatga

SEQ ID NO: 4037 - DNA, 1097 bp, Cannabis sativa
attagcctttctcgataaatatatattgcaatttagacatggttgtccatagcagtagtactttaaacaaatatatttttatttattttattgtattcataataaatcgtatggcaattaggttaaaataaataaaaattctattccattttatactttattatactatagtaattttatcacgttatttcataatttttatcaaacaaaagaatagaaattccattctatttctatattcttattacctttttttttaagaaaaatgtctcaaccaccaaataccaaaagcaacaggcactatactaaggtaggggtgaggatttattcaaagatagcatcagctatcaactaattctgaatacaattgtgaatttttgaacaccaaacaatattactacgtgccaacaaagcaagtttgaccgaacaacaccattacaagatgtattataatggataaaactaacaaattaaacttattacaaagatcaataatatcatataataaagacctatattctcattactatattactatcattcctattctattttcattttgtaaccataccccaatattaattgcttttgcataattgttattaatagtattatatatatatgtattattaatattgaatatagatgaaccattttctaaactaaacattattattattatttagtctatatagggtggtcaacaatatgaattattattgtgaataataaattacatatttgtcaaaaatatgagaggactaattaactatagtccacttcgcatcatatagtatgactttgcaagaactgagtgcactacatagtcgaaaaccaatgaaccgaccaattttattaatttgtggacttggttgaattgaagttcacaaaatatctaacaaatatgtatatattattgttattattattgttgttataggacccaaaatgaaataattttgatcacaagggtcccatcccatgcatatatataattcaattaaattattacctttgaatggagcactagagttggtcccgcattttacagctcataaaagcaatattcgtctacaaatattatgattaattttttt

SEQ ID NO: 4038 - DNA, 891 bp, Cannabis sativa
attttatttatttaaattataaataaataaacataataatttaataattacataaatatattgacaaaataatttaaacaacatattaattaaataaatatatctaaaaaaatataattaacttattataaataattaatttatcttaagtttgttaaaattgtattttttttagtttttattaaaaataattttcctaaactttttagattttttaattgttttattaactaaatattgattatttatataaattatattaatttaatatttacataatttttcaaaaaaaaaaaatcaacttccttattataaataattacatattttaaaaataaattaatatttaaaagatttattaaaatatttaaattataaatttttattatcaacaactcctattttaaaaattatataattacataaatttattaaaaaaatttacttactaattaagaataattatactaaatgttcatataattttttaatttataattaagataattgaactaaactttctaattttttttaactaaaattttactaaatataaaactaaattttttaataacacaaataatcaaaatatctaaatattgtaaaaaaaaacaatatcacattattcaaaatatctaaaaaaaaattatattaataattaatctcaaattataatccaactattataaatatttaacaaaacaaaatatattccattaacatattatatttatatatataaaatatatgtatttatatatataaaaatatatatttatatatatacatatttataaaaatatctatatctataaaatatcataacagcaatatatttaagatttatatcataactacattttattactataatttaaaaaaaaaaaaaaa

SEQ ID NO: 4039 - DNA, 1407 bp, Cannabis sativa
ttaacgtaagttttgtgaacattttcagtttttactctttttgatttttcaaaatatttaaatctctaaaaaaaaattcatttttggcaaagttctttaggataaaacacttagatcaaatatgacctttcttgccacaaaaatggcagctatgaatgaatttttcaagcttaccattatttttacctgctagctatagctgatctgttagtactacaaagccagttgatgcaacaactttctaaaaagttggaacagacataccagcaagcagaattccaccagaaacaaaaacaattttttttgaaatttgagactttgacgctaagagcccacatgattcctttgacctaaatcctgtatctcctcaaaaatagaagaaataggattaagcattcttacttttttttcaagtgcatttaaatcttttgacaacttactaatttcatctttttttgaaattatttcttcttcaaatttttcatttaattcagaaagttgtttgatttgaaatagaaattctttattcttgcttaccaaggttcgattttcagaacaaattttcaaccaagaatcatacatctctttgtaagattctcttaaagattcattatcaaattcaaattcatcactatctggattttcttaatctttggagatattattcaaacacaaaatttttttacctttggatacagaattcggcataacagaagttaaaacaatattaccttcctcatcttcactgctctcaaagtcattgtcactccaagaggcgatcataccttttttattcatcttcaaggtatttgcatattctgactagatatgaccaaatctctcacactaaatatttttccactcagattgaaaaggtttaaaagaataagaaaaacattttggagtcttagcattaggcttctgatttctaattttctttatgtatttctaaaatttttttgcaagaaaagccatgttattatcactatcttcatcatccgatgcttccttttagtacttttgaaagaaatagtcttttctttttccttggaggtactcggtttctcctttgaatgaatctattaatttaaatcaaaggtacgaagagaccccatcaattcttctactttcatagtactgaaatcctttgccttttccatagccataagtttaacattgaacctttcaggaagtactcgtactatctttcgcaccaagggcaaactattcattagaaatgtcgtattaccttttataaaattcagaaagtgtttcagaatcatccattcttagatcatcaacccttgtttgtaacatgataaatctagatcatttagcatcggcagtttcttcaaactaagtttaaagaatagtccacgcatatttagcagatatacaagtagaaac

SEQ ID NO: 4040 - DNA, 633 bp, Cannabis sativa
gtgtggccgactaattcttgtgaaggagctgggttgtcactttatgcctgtttgagcacccgggtctccgtttgctttggtgctaacttggccttcctatttgtgagttgtactgccatgtggcactgattttgtccacgtaagcatgccatgtaaggatgacaaaaattggataacatttgccccccaagtccctatgtgaacatctatacggatgaggactttaccagctatgttggtgatgtcgggattattgtagaccttgctaaataaaagttgatgcattttttagccttttgaagcactttgtcttaactgacggatttcaacgctgtagagaaatagctgctttagttgcctttatgatgtgtaggtgaggtaagtgaagaaaaggggcccacatgcattacacaatggacttttagggggaaaaccttttttcacttctcagattttacattccactttctctcactagaaacttgctttagaaaaatcgcttccttctctccaaagggccaaaacacacaagcatcatcttcctaggatttttatgccatttcgattatccaagcttctcacccttctttccaatgacatcttgcagtgggtaagctttctatgctcgccatt

SEQ ID NO: 4041 - DNA, 524 bp, Cannabis sativa
tctagtcttcttttttcgccaaacttggacgggcttaggagaagttctttgatggaagccttccaagtccaggaatgcactggagatgaaatgcatttgggaaatccgttcgtttttaaaaggcgtaaaagagatgagtacaagaggttgaaggagagtctcatgaagcgcttggaagggtggaaactcaagctcttatcatttgcggggtgtgccacccttatccaatcggtggctttaagtttgcctatatacactatgactacttgcaaggttccactatccacctgcagagaacttgatgcagtgattcgaaaatattggtggacggggaatatgtcgaaggagagattcaacgctactttatgctgggacaaaatttgcaaaccaaagcgcttgggtggcttggggtttagaagacttgaagacaccaaccgggctcttatagctaagcttgcttggaatgttgcaagtaatagcaacaagttatgggttcattgtttacaggcaaaatattgtaacaa

SEQ ID NO: 4042 - DNA, 1517 bp, Cannabis sativa
gtagaaatatgtatttatatatgtttctcatgttagaaggctttccaataagactagtcttggcctgtcaaaacaagctcttcttcctctcccatatactttgttattgtaaatgaaggttcatgatttgatttataatagaagatctttcccttaagaaatgcataataaagtttttgatacattaacaacttgtatgagaagacagccagaaaatcagttcgagtacatatggttaaacaccttaggaggaaagatttgctggagagatgaaacaggtacttatcattacaaatatctttctttgcatatttgtgaaccagtaaaacacttgaaagaaacaatatgcttcaaaattttgaacttgttatttttttcctgtacccaaatgtgtttatagggatattacttttcattggagtgtttctgtaaagtggcatcttttctatacttacgtatactgaccaatgccttcaagaggcgtttgtttaagccagaatgcagttcaggacttttagctctgtctctttcttgacgagtagacattgaacttgatctccatgactctttgggatactgcaaatacaggaggaatgagttgaatatcatgtttgctattaaactgttaattttcattctaataaaatttaaggtaaatactactttcaactccgtgtttagcaaaagttatcgattaaacattctgctaagttttgttaactgactatttagacacacgtaccttgagttcaaaatgaaacgtaataatacttagatgaaagtattatgactaagtttcacttgtttgttcttgtaggttagttatattttagttagagtaaataacggtataagtatttaaagttttaagtttgtaaatgtttattttcagcgtaaaactgtaattttctttaaaaattaacattgaatttatgtcatttacaagtttaaaattttaggtagctatactgctatttatcttttttatatattaaaaaagaaattgattaaaattaggctcagactattattatatatcattttaaaaaatacagagttcggtaacttttacaaacttcagaaactaaaatatgcttacctgttgtttagaggtagatgaatttatagtcattgatctcttgacaacagatccagatcgtttgactggaaaatggtatgatgatagctctttcatatctgattacataaaaatcatcaaataataataataacacaacagaactaaattttcacatgttttatattctatgagatataaaatttttacaaacctggtatggatgcagttctcttcaattgaaaagtcttaggtgaagaagaacgtggggtctgtgcagatatagatctttgttccctgaattaaaatttacatagacatgtatgagattcataaggttattataggcatgatatatttaagtttgggctaattagaattttctatcccgacatgtaccaaattgtgtctttcaaaccttttaggttataaatttttt

SEQ ID NO: 4043 - DNA, 1002 bp, Cannabis sativa
tcttggttgaggttgaagatgatcctgccattgatgattttatatgatcatgatccagattgcaatgattacactataaagtaagttagcttatatatatatatattgatgttttttatgagagtgttgactgtttgagtaaactacggttttagaaatggggttgttaatattatacacatatatatacattggtttaataaataatggttgttggacgttaataaaaatatggagacttataataattaattataaagtagcttagatgtagtactgtctttttgtgtacctttttttaatatgtatatacttttttaaagaataaaaaattgataacatgatatgatccggctttctggctttgtttgagttcgtacaataaaaagagaatgagaaacttccaatgtgtgaaggtttatttcaacttttcttcgatcatataataaagcaggccaagcattattatgtaatatgtatagtaatttgaacgcgtaaaatcacgataatctcatatagaatttaagggtgcatggtttcaattcaaaacaatcagcttaccttataatattattagaccacttataacgcattacatacttttcatacaataataatttgtattcaattaattacaatattgatttttttttttcaatttaatttattttataaaagttgattaaatccttattacttcatttatatattatttcggcatatgttttttatagattgtttatcttatcttcaaagcaggaaagttcacaattattcacattgtagccttaacggtggtattggatttgttgctaaaattagatcttctccttaattttgttaagttggattattatttagatttttttttttttgataaataaaaaatggatcacgtggtgtagattccactcctaccccttcgaacatttttggcaatcttgggaccacgtgttagttaaaggagcattatacctcagcctatttttttttttttttttt

SEQ ID NO: 4044 - DNA, 604 bp, Cannabis sativa
cattaatttaatcttgaatactttcgtgacacatgtcatcatactcaccacgtctctcttatcaaaatttgagtaaacaatttatataattcataatttacttagaaaatattactttttttttttagtaatatcaaaatgaaagataattttatttaaacaacacatttatataatagttatccaaacataaaaaacaagttaaaactttaagttagcttatactttaatttagctacaagcaaaattagaaatttacccaaatgagactaaaatgttagagagtttcatattgataatgtgtggatgcatgtgttacttctctcattgtcaaatagttttgaaaaagaacctcgtgcatcttaccatacaccacctcactctatcctactttctcaaccatgctttcacatgttaacatgatatccaatccaaatccaatagccgatctaaaaagaatagttaaaagaaccgcttgtaatagagttgtctaagattggtgagcaaacaaaatagtcaccatcttaaggggatgttagagagtcctacattaataatgtgtgaaaacataataccatatattagatgcatgtgctaatattct

SEQ ID NO: 4045 - DNA, 1193 bp, Cannabis sativa
aattgaaactaatattaatcaataattatatatgaatgagccctagaattattctagtgtaaatatataaatatatatatacacacacaatatatatgttgaatcaatgggaccttcttggagctttcatttcacaaatagacaagcaaacccaaactaagaattggttaatgcatcaacaaaaaattccacttttcattttatagtactatggaacaactaaaagaaagaaaaaaagatccaaaacccaccttcctttccttctcaaatttcctctcaatttttttatttattttttttcaccacttttatttttcttcctttcaaaagacatgactccactcccccaccttctaccaatggcatgtgaatggttgatggtgtaagaaagctactttaggttgtaattgtcatccctatgagagagagtgtgaatttgacaatggaatctcaattgatagagattgggctctctctttagtagacatgcatcatgacctttgtatcatggtttgtctcacctattgggagcatcaagggtcctatctatctctctttcttagggaattttgtccaattatagttttttttacactaaacattgatttgattagactcactcaccatagattttttattatttttactaatccaaagtttgggaattgtaattttggagcaaagaactttgtgttttgttatttttcaatgacatgtaaaaacaatccaaaacattgtcatttgtcacatccccctttaaaatgtgtatacatacatgtatgtattatttgcagtttttttttgtaaatcatgacatacatagttgcaaaatacaaaaatctacacaaaatattgtagcttgaaatgtttgggcttgagagctcttgaaaggcttgggctggaccatgatttgaaagatggtaatggacctaaaaacggaaagagtattttgggccttacatatcatagtggcccttttctatagggcttgattggaaaactcattcgggaatttatgacgagttttcaaccaaaatttgatttattaggatttagattttttatttttattttaaatgggatcttagttttttaatcaaaactcatagattgtttttaggctatgatttttttttcttaaagtgtgtgtttgatttctttttagtaaggaattatataattttttaaaataa

SEQ ID NO: 4046 - DNA, 906 bp, Cannabis sativa
aaaaaaaaaagtaaagttaaatattaaaaactgttattaccataaaacaccttaaattaagcttccatatataattttcctattaataaaagcttattttatcatcattttattttacatcctaattcaaaattaccaaattacccctcttaaaaatgtccacctcggtcattagagggtgcaaagtcaaggagttgcttggaatttctcatccaaggcttcaccaccaccaccgaatcgaacactctcttctccgatcctccgccgccgtcgccatctctcttcaccggcaccgccgccaccttcaaataatacttgatccccgaaaccacttgtttctgagcctcaacaacctccgagaacctcaactctccgtcgacggcggcgctgtcgccggcaagtcggccgctgtgtgtacggattaagctccggttatactcctcgacggcaaatcgaccgagttgttgaatttccttgttagttttgacgtcttttatgacggttcttcctccgaccattttgcgcgacggctctccgccgtgtacggcggagatgaggaggaggaagagggtgagggatgagaatgtgagagagggtgagtttagcattgccataattgaattggaattaatagagattaattattattggttttgtgtttgggaattgggtttgggaatatttatagggagaggaaaaggagaggtagtgtttgtttggacacgggaattaagaaaggtgaggttagggataagaggaaatgcacaaacggcgtgccgcgtataatggaatacgaccaaattgtttttgtttctttctttctttctttggttaatattaatttataacgtatcaaacttggaccaccacatcacacatgcttttctctcttcatatcaattttac

SEQ ID NO: 4047 - DNA, 655 bp, Cannabis sativa
agggacttccggataggaaaagagttagctggaatcgacttatccggaactcctttccaggaggaaccactagccattcgtaactccttcctgaaggaggactagttttccaaaagacagcactcgaagtggacatgatagccatctggaaacgcccttccgaatggaaactatcatttcacgagactcctcttgaatggacaagttaactatctgagaacctacttccaagagacagtcttatggaaatcttttcctttgaagaaactatactacagagtccaccactcaatagttagtaccatcaccttgctgctttttatgatcactctagcaaaatcaaataaacagtttatcttggtttatgcttttggtttgtgatacaccaatttatattatcaaggttctaaagtaaccatacctcatattaaataatttatacataacaaatagacattatttactcttgatttgtaacctccttatatcaatgacagcgagaatgcagttcttgctattgtgaacttagtataatactttacataatcatttctactcaaaatactaaatattcaaatctaacctgatcaatacaatgtttttttttatatatacattaaaatagtacacactcaattgttatattaatctagta

SEQ ID NO: 4048 - DNA, 904 bp, Cannabis sativa
tttttttttaatagaatagtcattgcaccaaaagagtagaaagagcattcgaatacttaaaaatacaacaaaatgaaagaatagaatgaaaattattttttttccatttcattacgtccaatcaaacgcccacctaaaagttttgtaagtgaagaatagtaattgttcatgggtcatttaaattgaaaagggtgagagagcaaccaacctgggtctattccatctgtgttaggaacggtaactggggcaagaattgtgagaccttggataattacattgctgcacattaattcatccacatcatcatcatcatcattataatttgttttaatttagtttaatttggtaaagaaaaatggaagtgaaagtgtgtatatagtcaaacctgcagtaaatgggatgaacaaaccaagaaggagaattaatcaaagtgagattaaagatttggacttgatcagagtacaaaatctcaatgatgtaaggcctcgttgcatttagctgaccagctttgaacttagcccaccatggtgcaccttgcccatcgatggtcccattatgacctttttcaattttaaattaaaaacaaattcaaatacatcaaaaattaaccattaataattaaacactgaattattcaccacaaaaattaccagtaataacgacatcagtgagatttgttccgtaaatcagactactgaaccttgcgtcgggggcatcccttcctactccataagaaggcaaaagctccactagtggccattctgactcgtcctatcaaataaattaaataaatatatgagtttttattctcaatatattttcatttatgaattattaacattattgtgtatttgtattttggacaatgaaccaaatataaacaaaattaccacatataaagaaa

SEQ ID NO: 4049 - DNA, 1197 bp, Cannabis sativa
atttcaaaattgtaataatgtcacacatatgtatcatcacatgaaatgttaagcataagaaacacacatgtagaatgagatgatccatgctatgaaaataccaaatacaatcaataacaaacataagaaaatagaggaagaccttagacaagattttttccaatgaggaaaatggtgaattttggtccaaagatctatcactgaaatcccacattctccagctacagaaacacatgccttggcatacgccccagcagcttcatttgtcctttcaggctcgttcgtcaaattttccacataaggatgccttaaacaaaataatcatcaaattccccccactttttaaacaaaatacactaattaatatgctgaaatttaataatactatggaaaaaattaatttatatacagtagaagctgccaaattggtgttctagtttggaaatttattattgacattaattacataactttgaataaaaaattacaacattggctatatttgaattttgtccacagataaaggcagtactcattaaattaaattgtgtaggagtgaagaccaagcacttttaaaatttgttaaaatatacctcaagcgcccttcttcatcaatgggaggaggagtaatgagtataatacgagttgtaggccatcgtttctgcaagtattaattaaaacacgctgtttaatataaaaaagcctgaaatctaatataacacagtaaacgtatgatttctctttgtggtagaagattagctttcgcttatttcatatcacggtaacaaatcttatacttattcatatgaatcaaatgaaagtgacagtatcatttgaagtcaattagtgatcttcctattgttgccatgatgaaaaagtttgctagagaaacagttaactatgtcccaatgccatacattttaaatttgtggtggtaaatctacttttcacttcaatcaatttaatcatcaactatgttaacaaaataaagtaaaaaacttgatcaaatattttgcaaggatccatcacaatcactaagccacgcctttttattagaaacgtaataatcatggaacactaacgctaatgaaatgttagtggtcaataatgactagttgaatatactgatgcatattcggatttagagaatacaaatcattaaagtatactgtatacctctctgttccattccaaatt

SEQ ID NO: 4050 - DNA, 1189 bp, Cannabis sativa
ccattaaaatatgaataagattccacctcaattttatgcagcccttgaacttcatttagattgaggctctcatacctatttacatggtgaattccagaaggaaaccaaagagtaagtatacaacttctagcaaaattataatttaaaaaaaattcttccttgcaaactattaatccaaaataacatgggcctaaaatttcagattgtcttctcacaaaaaataaaagtgtaccattgcaaattcaagtgtatggaatcaatttaatgctctcttgcctattatagttacacttgaattcctctgcctgcctgaaccttaaagaatgccataataatcaatgtaggaaagacaacatgcactgcactacaatagaccagactttctatactcattacttccctaaaaggaagtattcaaaggcaggcagaaagcaacctcatatataacatttacgcatcattttaccacaatctatttaggtactagaattatgttttgcagagtactttcaaatgaagagtatctcatcacaatgaagcggcattaatgtagtcgttattaaagaatgaacaatgaaatggtccagagattactttggtaatatgacctccaccaaatgaccctttctctgcaatgcacgagataagcctgttatgtaagacgccatagatccaactgagatcaatggtgccatttcagtacatatgtggacaatgtaaaatccattcctggattaagaaatttatgttagagcagggggaagaaaaaggagaggaggcaagagaatagataaagtggaaagacgaaacataataaaaaacaacagacaatagaggaaacaaatatattaacaactttaaaggagcaaaatatcttcaaaatcttgaaaacataacaaagacaaatgatagatacaggaagctttgattgtgacagggatgagaaaaaggcatttaaaggcacttccatattatacagattttatgttgcggtacaaagaacattctaaattgcatatatgcttctgaaattgttatatttatttcaggtcaataactgagacggtatcagaaataaattcaaagaagagcccatctgtcattcatgtgcatgcatttcttgaatctagccttctcagcagcaaaggattacaagttatacacaaataaccaagtgtgatatttctta

SEQ ID NO: 4051 - DNA, 1364 bp, Cannabis sativa
tagcatttaattgaaatttttaaacgaaaaatgtaaaaagtaaaatagaataagaattcaataggttatacagttaaaattttaatttatgtaattaagtgtaaaaaataaatttcattttcatctagttttgccgtgaataaggaacaaatatgatttaagtaaaaaatttaaaaaacaaacaatatagaaaactgtcctaatctggaccgcgtatagaagtctgcttactaacaagaaataacatatatgtacgtgtggaaataatcatacatggcggcctacggggtcgcctaaattatagatgtgttaatcaattaattatctttaattaattaacgaatttgtggtgggaatggacagtggagtcaaatgtacgtgttaattaattactaaacattttccccatccttttgaaaagtataatactaccaaactaattaatgaatattctttaataaaaacttcgtctataaatagatcaactgtctctaaggattattcaaataaatcatcataccataaattgatcaccctctctctctctcataataataataataataattataataacaattttgtccccgagaaatgaaggtaattatgcatggaaaaatatatgaggttaaataagcatagaattataattattagtatattaatgagcaaacaatcaatgatgtatttaaatattgtatgtatatatgtatacttttttgcagcaaaagataactgtgagtgtgcggatgagctgtggcaaatgcaggaccaaagtcatgaaaattgctgcagttgaatcaggtgatcaatatatatatatataactttggaacattgtatattatcataaattattatatattaattagcattatacgtactctatatattaaaatatattaattaatgtatagaattaatttgataatgcaggagtaaactcagtacagatggcaggggacaaagatcaagtgatagtaattggagaagttgattcagttagattgactcgatctctaaggaagaagtttgggtctgcaaccttagttagtgtagaacaagtaaataattaagttaaccttattaagcctggataaccagagagacagcattattcttattaatattaattcctcatcaattaatctcaacattataataatcaaaaatcaaaccaaaatgacaatgtataatcatacatgtaacagttgtggcgttcttcatccaaattttcatcatctgaataattttcattattaatttattattcggccaattgggttttttctgcctacttacttgcacaactttcaatgtcttaaattttcttgatcggaatgtagttttattatcggccaatt

SEQ ID NO: 4052 - DNA, 1384 bp, Cannabis sativa
gggcttcctcttggatggtgccaactctttgtgtttgagtggatagagctatagcctagagcgttactcgggcctcagctttatcattctcctcctaagaaaagttaaggtcttcttaggttttgcttatgttttctcgaagagagattatagtcacctagacaaccttctcagcttcggccttgtggttctcatagagtttccagtagttggaaattataactttttcttccaaggctagattggcatcacaattgtcctgggcctttttgatgtagaggacaacttgggttttgaatcactcaacttcagtgcttaaggtcccattctcggttgtcaaagactgatctttgatgcaaagttgccttagctagatggtcatgctgcttgttttttggtggccaccgatatcatgtacaggtctagactgctactcacagcccatttttttgatgtaagctcactcatgctaaggcccacattgttcaacatctctgcagcataaggggtacggctctaccaaccttaggaaccaaggcctggctcactgtggcaatgtccattattgggccaggtgagaagggacagcaaatcccttcaacaatctctactgtcttaatagaggatagccacgtagcccgttttcggagaatcacttgctccctctcatgatattttttgagggtagcattcgattcgcttgccttggttaggtagtcatgactaagaatagtaggccttatggagacaagaagcccaagaggggaatcctattgaaggacatgggatgaggcagatcagtagtggtaggcctaggaagttggtgccctgttggatgttggggcgcatgcagctagaatgagagtggagcagattgggatgggactatttgccattgattgggcaataaagtcagctgttgttgctgctattgcggttgttgttgttgtggttattgttgttgttgttgctgttgctgctattgttgttgttgatgcaatgatggtggtgtagtagatgatagatcagatgcagctagatttggagttgaagggtaggattttttagtgctattgcttggaaaggttgtcgacctgttgcatttagaatttgcaggagtctcctttgggagataaacaagcccatccaagctgttgtcagagcccctacattcagtgctatgtcagggattgctccaacccctaggtgggacttcccttaaggctttgctctcccatagcaacgggtgctttggatgtctcacggagggtggcagagtttttctccccacctactggagccgaagagcctaagaccatagacccggcctttgtgggaggagtaatctctcgtacattcgatgacgaggaagttgagggagaac

SEQ ID NO: 4053 - DNA, 758 bp, Cannabis sativa
aagttttaatagacaatatcaagcaatcaattcagaacacagtaatgactcaattatcatgctccttaagtatacaaatcaaattagtcaaacaatgaataagtctaatttcataaataggaaattccagcagtgagataatagttgaacagtatcagtttcgacaaatacttaacaactatttaggttgaataactttgatttatgtatggaaatcactagtgggaaagatataacacaccataaccatccaaatgtcaggctcagcctcaaaaaacacatgggagtgcctctctgcttctatgtcttcacatgcagcctctggagagaagattctgcataatagttaaaccaccaatcaaagagtcaatcaaaacattaagagggaattatcaaaccaataagtttttatcacttttaaaaacaaacaaccttaacacggaaatatataaacatatatacacactcatatacaaatatgatgtaagtttcattcaattgacatatttcccacaaaatattaaagacatcccatgactgctaacctggtaaaggtgatgagtccttcactaagaccaatcacagaaagctgggtagaaaagggcaaatcaggtggataaaagaacaatatcttgtccagctcctgcccttcttgctgtcctctcctcaaatcaaatatgcaaaactgtaccccttcagcagtagtagtagcagtagatgacaaccccatatttccctccaattcataaaccctaatt

SEQ ID NO: 4054 - DNA, 559 bp, Cannabis sativa
ctactttgttctctgtgtttatctgcggctttcagttgttttgttgtatcagtaaagtatggcggttttcagttgtttctgtaatgaaggtattagctctcagctgttgcctgtttcttaatcctctgtaaatgcgtttgagaattatatctattattcctgatttggattattatataactgctttatccaatttgttaatttccttttaatgtgttagtaaacactactatctgataaggtggataaattgaattacattttcattggtgtgttcatttcgttggtttgattcctcatgggcgccttcaaccagaaattttatataagtttcctgcctccaaaatagagcaggcttcaaagggaggacaatcgtcaaataaataaataaatatatattttgctgttgcgttatatatctgtattgagattgagaacatcctttattaccattgtctgtttagttgatgtagtgttggaatatatttgctcattgaaggatttttttaaactcttgtaaatttctttatttatcccttcctatatgaatctagtagct

SEQ ID NO: 4055 - DNA, 638 bp, Cannabis sativa
taggcgtccgttagtaaaattgaagaaattagacgaaagtccttgaattcgataattttaatagatcaggataatttttaacagtctgaaaagttcgaaggcacgatttggttcatgttaaaatttggaataaaaaaatcttaattagtctttttagatgttcaccctttttatgtagctgtttgaaatatgttacttggggtacttcagactgaatgtttttcccatttctgattgtgaaaggcagtttgttatttgaacaactatggggatgatttcagtggaggacttttccactttcaggatggtgaaccacagactattgtacctttgagaggagtaagtaaaataccctttggaagtgtttgaatgtctcaaattagaaataaggaaagaaataacaagagttgcttgagatttagtttcagttatttgctcattacttagcaattctatattttcaggatgttgtgatatacagagctgataaccgcaacattcattctgttgatgaggtagctctctctttagattttcttttgctacatacatagggccgtgatttcgtttgctcattttatattgtggctagaagtttgacattttaaagagtttatttgctcattcaattatctcag

SEQ ID NO: 4056 - DNA, 1435 bp, Cannabis sativa
agatatcctgcaaagaagtctattacacatactttttttttattttatatacgtgtgaaatagactgtttgaactctactttttgcattataaattattttaaatttcttaaaactttgcaagatgccttaaatgtcttaaaaaaataaggaataaaactttcaagatgtaaaaaatacgactgaggtgtattaatgcgcccctttccttttggagggtagcactatagaaacccctaaaaatgtattagcaaaataacttgtaagttttttattagcaaaataatcacgcaagtcacatgcgcaatcttaaaattacattgcacgacgtgatctttttaggatcatcctgcgatcattatgatcacataatataaattgaatatgcttattttgcaaatttgaaatttaacattaaccttaaaacttatgggccaagaatacattaaccttgccatttttccacaaagttgttgcttccattcaaactctcttaaaacatccactgtttctctagtctacaaacaatgtccacacaaatccaatctaatttaaccgcactgccggtctctcaccttccatcaccactgaggctcccatgatatttacataaaaaaaaaatgtttaaatgatgagaaatttaatccgaaacttaaagtgaagtatttaatgaagatactaatttaaaaaaaattctgaaccattttatacaagttttttttacgtgattttttgttccaattgagttttgaacagaatggtgcttcattaatggacccataaaaacttatgacctccaacggtggcaccaaaaagagttatctattgaggcaagaaatgatgtaaaattaagtttccgtgtgaccgtcactgtagtctgaagcatcacaaaagaaatgcaatttcattgttttaatgtttaagaataaaaataaaaaatttcagaagactatcgttctaacatcgccaaacatcgtttttacctcaaaaaacaagttcccatgagaaccactgcgacaaaaaaaaaaacaaacaaggtttcatggcagcatcgtaagagcatcgttttgtgcaaaattctacaaacacatacaacaccaaaaaatcttgcacagaactattcgaaaatcgaaattcaaaattagtgccttaaaggaatattttacttaaaagatcaacaagcattttacatgacgtatcaaaattaaccccatgatgtttcaagtaagaaaccatgagaaattttaataaacacaaattaaccctatgaaatccacaccaaaatctcttgaacttgggatgggattcctgagttcgcaacggtagtcaacatatttaaaaaggcatgttcattcaataagatgacaaaagagaacaatggtaacaaagaggggtgaatgaacaatttcattaagatatgtaattttccatgatat

SEQ ID NO: 4057 - DNA, 1588 bp, Cannabis sativa
  modified_base (155)..(157): a, c, t, g, unknown or other
atttttgagtttgagtttctcaggtttgggtttgaaatcttgttttgggaccaaactcgcccatatggagatcgagtgtttcaggttttgggtccgattgggacgagtttgggtgggttgggttggatttcgggttaggctaggctttttttttnnnatcacttttttaacaaaaaaaaaaaaactacaaaataatacaattatacaacatattattattatatatacatattcataagctaacacattaacaatttaatacacaattacaaattcacaataaaaaatgaaatatataatataattatataatatatatacataaaaaataaaaaataaaaatgctaatcgggtttcaggttttgagtttttaaaaaatattaaatttgaacccggcccggtacagaatcgggttacacccaaccccagtacaaaactaggctacacctgaactcaatatactaaaattgaaacccattttttttcttgaggttttctgggtttcgagtcaggtagattttgggtgagtttcaagtttcgagtataaatgtgcactcctaatactaaatcactataaattataaatattaagtatttttattgcacaaatatttcattaatttattattttttaatgaagaatgcctcaaaagagagcataaaaaaaatataagaagatgaaactaattattataaagagcagattttaaattaataaaaaaagtattatgttaatgtaagcaaaaaaaagtacaatctgtccaaaaagaaaaacatttggttctaatattgatagtatcattttacattattacctctaaatattattttcaaaaaaataatattattttaaaaataagaaaaactattaaaatatacatctaacttgaaaaaattgacaagaggtaaaaaaaaattgtcctatttgagaaattgtataagtccccactataataatacactactttttttatcactccaatcaatttgaagattctcttatattaaagattcaaacttattgttacatttttaatgtcttgaacagttgcctctgtgaccattaaatttatagagcagcctactactttggtagtcttctcttctcaattagtcaaacttatttactattctcttatgcagtcaatgtctaaaattaattcctggctcttgtttttcttttgataactcaatgcctcgctcctaacaccattcaagatttcaaccacttgtaaaattattgctatggaaaaaaccaacatacccttttctccaatgactatggctatcatatatcggaccccaaaagtggaaattcacttggaaaatgaaccttggcataaatgtatatagaaaacaatttaaggggacattgagggtcaaaggtggtgtaaatgtcctgatttgccaatgacatgtacaaactattgtcagatgaattttgtggtcaaattacgactataagaccatacgatatgatccataacttatacattggaattgaatagagagaaatgatcaaaaacactattggtgtttactactatgttaaactagtattaggttaatttaagttgatagatatttt

SEQ ID NO: 4058 - DNA, 1365 bp, Cannabis sativa
cgggtaagtattttgagtgttcttttagcttgtggcaatttaggagctttgagaaaaggtgaatggcttcatagttatgttatccaaactggatttgagtatgatattcttgttgcaactgctgttatggatatgtataccaagtgtgggagtttagaattggctcgcaggttgtttgatgacacaccaggtaaagatgttgtttgttggagtgctatgattgctagttatggaattcacgggcaaggaagaaagtcacttgatgttttcaatgacatgttaagagcaaaagtgaaaccaaatcatgtgaccttcacctgtattctctcatcttgcagccactcaggattactagaacaaggcaagaaatgtttcgagtcaatggcgaaggatttcgggatttcaccacaactcaacaattacgcgtgcatggttgatcttctcggccgttcagggcaactatccgaagcagaggagctgatacagaacatgccagtagaagctgatgctagcatttggggttctttgcttggtgcttgcagaatctatggtaatctagatttagcagaacgaatagcagaccgcatatttgaactcgacccctttcatgccggttatcatgttctgctgtccaacatctacgcagcgaaatcaagatggaaagaggttgaaagagtaagaaggatgatggttcgaagaggaaccaacaaagttcaaggcttgagtttaattgagtttaacaatgttgttcataagtttggggtgagagacaggtctcatcctcagtcagataaaatctatgatcttctcgacgaactagttggtccaatgaaacggttggggtatgtaccattgacagactttgttcttcatgacattgaagaggaagcaaaagaggaagctcttctttaccatagtgaaaaactagccattgcttttggcctcatcaacactcctccaggtaccccaattcgtgtgactaaaaatttgaggatatgtggggattgccataatgccattaagatcatctcaagaattgttaataggattatcattgtaagagacatgcataggtttcaccattttgaggatggtcattgctcttgtggtgattactggtaagaaaccaaatatttgtttaacattgcattattattattattattattattattattttttgcaagaaaattgttgtcaataattaacttccaagtgtatacaatcgtcaaataagtaataaatgagtatcatctacatagggattaattatgtaaaaatcaatactacataatttgggcaaaacaaataaaaagtgatgatttgaactatattaaaaactaaacaagaatgtaaataaaatga

SEQ ID NO: 4059 - DNA, 825 bp, Cannabis sativa
tgatgcatctaatactttctaaaggaaagttgttcaagggctctgttctggccttttttactatgaaagatctttgggttctctcatgattttcatgctaacggaaaagttgttgattaacaatttagtcagcttttcttcataagatgtgattggcctcgaaggcagctgttgaaactgttaggaattttgtagtacttggacgctcaatttcatttggatttgagatatgaaaatgagaacctcaaataaagttaatttatatgatttagccacctcctgagatggacccgaaaagcactaaaaacaatagaatagtaactagaaaagaatagcaacacaccagcagaaaactaaaccataccagccttggttcttgattgtatttctcaaagatgaaagcaataacagatagagaagacagtggtcctttcagaccttgatgtagagagagaaatatcaattcttacgtaacctttcccgctaaaactagctatttgcctttccaaccaatcaacaattacgaaaaggccctgacacacatctctttgccctttacatattagttcccttattactcttggcccttctagcataagtaaacctgataggaggtctaacaattccccctccccggaaaaaaaaaaatccgtaaccatgtcgtcaaggttagaaaaaggaaattgtgtgtggatgctctcaaattgttcccaagtcgcttcaaaatttggcaagtcttggcactcaatcaacacccccactcctctggcagtatcttccttagagtggctcacatccaagaaagccgttagggtcacttgcaac

SEQ ID NO: 4060 - DNA, 3208 bp, Cannabis sativa
ctcggcatggagtttccctgcctcagtggccctgatggttaccacgttattgcagttgaatcttcctccaccattgaagatgtgcctttggcatcttgtaataaaatgtatgatattatgtctgttcctcatacactttatgctgttgacagaaaatatctttatatgaattgggctaaacccaattgttctcgttgtggagtattgggatatggatgtcgattaaagaacaatgacaccaaaagtgaaacagagtgttatgcatatcctaaaccaagtaagcacttatatcttttttttttttttgttttacttaacaaaagagagaaaaatgaaagaaaatgatcaaacaatagagaaggagagcagtatttatagagctctgtgtcgtggggttctatctcaaaatcgattggtgatgagtggagtagcccatgttcttatatatggtttaatactttttacatttaatctatgtgggacaatgttcaccaataagctttcaagtacaaaagattaactacttataacagaactagttacaaactaattaatagctgttataactaacaacaacactaactaactgaacttactgctattatattcaatagttttgatctatttcttaatcacaagatcttcattgtattgtttgcaggtcaaacaaagaaatttgtaactattggtgtaacaattggtactgctgttcttacactgctacttgttgtggcttatcgagcttacaattctaataagcaagagaaagaaaatcaacggagaatagagagttttttggaggattacaaggctttaaagccaagtagatattcttattctgacatcaaacatattacaggcgagttcaaggaaaaattgggtgaaggagcctatggtgcagtatttaagggaaagctctcagcagaattctttgttgctgtgaaaatccttcacagttcaaaaggaaatggagatgagtttataaatgaagttggcactattggtcgaattcaccatatcaatgtggttcgcttggttggttattgtgctgatggatttagaagagctcttgtttatgagttcttaccaaatggttcacttcaacagtatatatcttcaccagattctgatcatttcttaggttgggagaaacttatggatattactttaggcatagccaaaggtgttgagtatcttcaccaagggtgtgatcaaagaatccttcatttcgatatcaagcctcataatgtcttgctagaccaaaactttattcccaaaatttctgattttggtttggccaagttgtgctcaaaagatcaaagtatggtgtcaatgtctacagctagaggaaccatgggatacattgcacccgaagttttttctagaaactttggaaatgtttcatacaagtcagatatttacagtttcgggatggtgttgcttgaaatggttggtgggaagaagattacagatgttaaagaagacaacactagtcaagtttattatcccgaatggatctataatctcctagaagaaggagaagacttacgaatccatatcgagaaagaagaagacgctaagattgccaagaaacttgcaattgtaggtttatggtgcattcagtggcaccctacggatcgcccttccatgaaagttgtggtacaaatgcttgaaggaggagaaaagttaacattgcctcctaatccttttggctctactggtcaaccaaaatcaattgttgataagcctagaagacgcaagaatccagagctagaagctatatctgaattagaatgagcattgagtaatagctttggaaataaagaaaagataacacaaaatttcacaatatgaaatgagagaatcaagtgtatatgagtcagaaacattgaccaaagagtatttatttacttaaaaatgtgatctaattttggattattgggacaaacaagtcacaagggtcctcaaaaattcagagacttattatgtataataacttacataaagaaaaagggagcaatgtttttgtccttgtcttgggctgtatttatgctttttggatactttgtggagattttagcagggtctgatcaagtttgatttttgtaaccataaaaagaacagagttgtttaagaagaaaagctgaactaataaataatttgtttatttatagttttttcttgtacattacaaatatatgtagttgaaatcttatccttaatttggtacatgagttaaagtagtattatctgagtaattgtaccctgtggatggccacattgaggatgaactacactctccatgatcctcatttgaatagtaagagaatttagttggaggcaattccaaggactcagtttgttcttcaagcatctcaacaactttggtcattgaaggacgatcagaaggcttgaactgtatgcaccacaatgcaactatcatcatcttctttattatctttgattcctccattgtgtcaacaccaaaatcaatgtccattccttcactaaattggttagaaacccaagatgggaaatgaactcgactcgacttctcagctgaattcagattcctccttctactcgccatttccatcagtaacatgccaaaactatacacatcggctttgtaagaaactcctccaatgtttttataaaacaattcgggagctatgtatcctaaggttcctcttgctgcagtgagagacacagtattattgtccaatggacataatctcgccaagccaaaatctgaaacttttgttacaaaattctcatccaaaagaatgttgtgaggcttgatatcgaaatgcaaaatttgcatttcacatcctcgatgaagatactcaataccacgagccactccaagtgacatttcaaacatcatcttgtaactcaaagactcaattccttcctttgagaaaatatgtttatcaagagatccattcgccataaaatcatatacaagagcacgctttgaaccctcgacacaaaatccgatcaatctaacaacattgacatgatgaatcctacctattgtagcaacttcgtttatgaaatcctctccattgcctttggatgtatccatcatcttaattgctacgaaatgaccactacgaagtcttcctttgtatacagaaccatagcctccttcacctaatttatctttaaatccatggctcatctttttaatatctgaataagagta

SEQ ID NO: 4061 - DNA, 3624 bp, Cannabis sativa
tgtcgctaattattaaagtaattgttgtagtgataattattacacaaatttgttaaagttaaattaaatttatagatatgcaaaatttaacacaaattttacacatctcggagatggtctacaaaaataaatttggcataaagaagtttacatcaaataaaacactgtcggtaacggcaaaatgatattatcatcattaattacctatttaaatcatattattatctattgttaatacatatatatttagccaaatcactagtcaaaatattggcttatgtaagccttatagaaatatatatacatttatatatttatataatggcttctcttattatccaaaccatatcaagcttatatgcttgtttatatttgatgtgtacaatgtttattattatattttgttagttaattattattgttatcaaaatattttttatttaaatatattatttaatttatttaaaatttcattgatatgaataaaataaatatttgaaagacaattaatgataatataataattaaaaaacatgtattaaagtccaaatttaaaagttaataacaaaactgcaattgaaaatattgcattattgatgttttgtttgtttaagaattatttttgtagtcttgtgctcgttagttgtattagtgccaaaaaaaactcaactaatgcaaaattttactgtcagtttcatatctaacagtttgtgaagggacgtcattaaatcaaaagatttgaaaattttggtggggtagcaaggtggatctctaggcaaaacatatttcagcatgtttctatggaagtcagaaggtactgttgcgtcaatcggtacgctgagttatttcggtgattgggctttcatttttgtcagtatacgtgactagcattgggctctcagcgctgccggcaacagctgcgacagctatactaacagttttaaatttgaccttccatggccagaagccgatggtgtgtagattgtgtaacatttgacacaattttaggatgtgaaaaatttgacatatgatgatataacacactattaacgaattaattttttaaaatatattaggacatcactggtttagcaatctctagttgttattagttgtttcatatatagttagccaaatcataccattataaatagctaatgttatgagtagtgttgacgttaaaaaatggctaatactagctcgctagattggcgagatgaataatgaatgtaagtatataatttagagaaacataccaaatttacagtagttcattcccgatgtcgcgatggtaattgaactatttatacttcgagtttttatttctcacgtgattataagaaaattagctaattgtgaaagctctagtttctagagagatattctgaccttgtgggtacttcttagaatgtgaaaaatgagctagagtagctttcttaaggaggtccttgaaaataggaataaaataatccaaaaaaatatgaaaaagtacaagttggctattttttaccaaagatgatgatctaatagtgaaattaacttctctaagttgatgaaaaattttcaaaatctgggtcacgatagtgggacccattctgagtaagttgtagcttcaattcataactcccttggtgatgaaatttggaactgataacttcaaaattgcgtttgatatgtgagacatcacttgatatataatttaattagctacgaaacaaaagcttatatacgtcaattagatcaatatttgagtgaattatgactattttgctgaaggctattatgggcccaatgcaggtttgacatgtgatgtcaacctagatgctgcgtgagtggtaaaacgtgtcgaaaatgtattttttgttgcctaagtgatattttgacatcacttagcctaaatttgtgttcttgtaaagttggtaactagttcttggagatgttgctgttctgcagacacaagagactcgaaactttcccatttttgagtaaattaccttgtcagaatgcgaaaatatgaagttatgaatttgaatttttgactgaatggttctcaattattgtgaaaattagacgaacggtcgagacggaatcaaaattgaaaaagcagaagcgcactaggctatttgtcaacctaggcgctaggtgcttaattcggagcttccgggatgtcgttttagtacttccaagattctagaacctgaggacgaggtctcctaccctatttttaaccattccaaagagaattcttagagcagaattggcatttgagtgatcgaaaccagcgcactaggttcattgtcaaccttggcactaggcccaacaccaagtcaacctgggggctgggctatgtttccaggcctttcgatttgtggttttctcctcgagtttccttctatctttgttatttttgataataaaaaaaatgtttggaacacttttttgagaaactaattggaatgggcctaagttgacaatatgtcagcctgggcgctgggtctaacttcaggcctcttggaagtttcattttgtccccaaaaatagttgaatgttaatctttgctgaaaaataaagaatatgcatgccttgaaaggttctaaaaaaatcctaaaagatggcccaagttgaaaatatgtcaactcgggtgttgggccagcccgaagtgtcaacctgggctctaggcctttgttctaacacccagaaagtgttctttctcccctaaaagtacttctttccccgtttttaatgaagaagaataagaagcataagacagattttttatctgatacttggaagtggcccaagctgacaaattatcaacctgggtgctacggtgctcagacaatatgtgtgggtgatcaaaaataaacgttctttgaatatgattctaatgcctcaaatatgtttatggtatgtttagttcatgtcccaatgtaaagtttgaaccatttgcactaagacgttcccaaaaactgaaatcgtagttggagttgtcaacttgggtgctgggtgaaaccctaggtgcccaggttgatttttgaggtgctgatccgtgtattttcagctcctagggcctagacttggatgtttcatgtcttcatggtatagaatacttatagatagagagttggaaacaacttggcttgatttaaatacccattttggagttcccaaagtcaacctgggcgcagggctacagacccctcccaggtcgacttgctatgattcaggattattcaacttcgatatgttttctttcttgtcacgtgccaaacattgatgtccacatcattaggactacttttggtgtaaatattttcccctaagtcaactttacacttgtgtgaggttgacttaataacgcaaactaagcccatttctctcaaaactaccaagtgggcatcaattttggcattcttggacaattgtttttgttcattgatcattcatactaagagtaggattttgaattcttattccttcttgaacagtagaatttgaaattctaagtgtaaaaggagaagagaaaagatagtcatcttttcttattatttatcttttcctttccaacataaaatttgaataactctatgagtgatttccttcattagaatgtcaacacttact

SEQ ID NO: 4062 - DNA, 1194 bp, Cannabis sativa
tactattaaaagaaatagtagctaaagaagttggaactatttaaataaattgcgagtgagattctcacaatgtgtgagtgagattctcacaatgaaagtcagacttcttaagcacccaactagccaaaattgtaggctcttccatttcctcccactagcatacttcttcaaccccatttcaatgttcttataacttcttcaaggttttcacattttttacttagagtttctcatcaacacctccccaagacacctagccaaaatgacaccgacttctagagcagaccattcgccttggccgatagagggaatttccggccgcacaaacattgcttttgttaatgcttttccatagatgctcccatggtgatggtggtctaaatctaagttgaaatatgacttgaagggttctatttttgttgcctcaaatacattccttacttcaattcactcaacacaaaatctcttgatttatctagattctcctttagctctttctctacatttttatgcaacaaccaaactaaaacaacacatatcaacataagttaaattacttcttattcataatttacttaaaagcattggtaccttgctctagagatggcaccagttcccatactctgtgtgtagctttattaaattctaaacaatcagttcattctatcagacccaatcaacacctttcaatatttcataataaaaagaaaaatttaagactaataaatcactagttttgaatttggggcaagatcttgaatatttccagtgttacaatagtgcatatttctagtattacatgtgttacatctataatttagatgatgtttttttacattagcatacacagaataagtacagcaagatcaccagtaatctccacaagaacatgaaccatttacaaaatggtgaaatcggtttctgtctctcattatgatctttcttcctgtaatctttgaaatcaactttgtaacggcatgacaatccgaacaaactcggaggttctttacaatggttattgtggttcctggctttgtactgattagcccaaaagccatggcaagcttctcactgtgaacttggagagattgctccttttgtctctcacccaaatcatgtaatactatatctgtatgtggggtgtaaccctgagccttaagccaaccatttatctcttccaacatcttgtatatt

SEQ ID NO: 4063 - DNA, 775 bp, Cannabis sativa
ataatgagttagatgaaactttcagttatggaagggttaccaagatagcactttttccttgtgcatgccatgtttcagcatcctcagcactgaacacaatctgtcctactgcagctcctggagatgcaggcagaccagtggccactactttgtctgcataagcagttggatcctcgaactagcacaacattatatcaatcagtttacaccatggaaattttatccaaggtagataaaggatgtattcaggaattcatatattagtccttttatatagtgatgtcagataatcttccgttggccctttttattttattttagggagaagggttgaaaatgagcacactatacctgtggatgaagaagttggtcaagatgctggggttcaaccatcttaatggcagaaggagtatcaacaagtccttcattaaccatgtctacagctatctttactgctcctttaccagttcgcttgcctgatcggcactgcaacatccacaacctgttttcttggacagtgaactctatgtcctgtatacaccagagattagccagcttagcaatcttttcattaaaatccagagtgtttcactagttaattgtcaaaaggtttcaaaaatatgttttacatatagctttagtcatgtaaactgccagataattcatgtaatctaatatgaaagtcaatatctatctttatagagtaatttttaccatcatgtctttgtaatgccgttcaagaatttcacagttctctacaagctcctggtaagca

SEQ ID NO: 4064 - DNA, 1368 bp, Cannabis sativa
actgatacctgtattaattaagcaaacgaaaagttattagggaccaagcaactagctttaaagaaataaaaaccttttcagtggaaacatttcaagtcacctcttctaactctcattaattaccacaaaaaagtaaaaagactaaggtaaatattagcaaaaataaaaatactgcgtttgcaaaaactactacatcctaaacagccctaacttcttccatgtacaacattctaaggattctcattttggtatcttcaagtgccatacttataaaattgagaatcgagataatatatgaaaatgatacttgtaaagaaattaaataccaaaggtttttctagatttaatgaatacctttccccagtcagaacttaagccaccacatctcatcttcaagtaaatcatctttgatcccagttctgtctccactttctttcgcaaataggtctcatcaggcccaaatgcttccaaataggtattgtagcgactgaaaattgtttgaagtgcattcgcatgctcttttgacaagggctttatattctacaaacaagatcaaacatcaaactcatgaggaccaacaccaaggacaagaacatgtagcaaataatcagcaagcatacttcatgcacacaacaatacctcgccactcattccaacagtgtcatcgaattccatctttaaattcatgatgatctcaccaaattcctcagatgctacagcagcacgaaaaacattggttaaagcttcctttccagcattgtcatcggtattcttagacaaagcagcctttacttcatggacaagactatcagggaggtcatcccaactagcagccaacaaatccttaaaagccctatttagatcagggtctgtcacgacaggcatgtgagttacatcttcactataagatcgtgtgcttcccatactcaacgaaagaggagacctgcaatctatacagttcaaaaaatgggggacaaacaaaggaatcatttacacatttaaagagggaaaagaaaaagttctgtagaatgaaaaaattcgagaatatgactagacaatggacatattgacgatgattaccaacaacagcatacttcatagctacaaggtccgtgaaatgtaagagtatagctaaaatggattatgtatcaatgaattaaagttttaacagcagtagaaaatagaatcatataaacgataggactctttaacttggctcaagttttaatctttagctacatgaaaactgaaagcttcataaatttttgatcctcaatgaacccccaatcagtatctgaagcaaaaaatcggtaatcgcaagcatgaactgatcattacaaacttataacgcataaacccagctcaaag

SEQ ID NO: 4065 - DNA, 571 bp, Cannabis sativa
acctatattatatatgatcacaagttattatttgtaacagtcactcaataatatatttatatatacatatatgctatgtaagaattaggtcaactatatatttataaaattacaaacaacgtgtactatacggaaagtgcatgcattgattatggattaaactttaaaatattatacgcagcatacgtcatcatcaacttataatcgaaaattaattaacagtaattaatatatatatcaatcttttcaaaaaaaatatatatatatatatatcaatgtcaaaaaataaaaaaataaaaagtacactgaacatgcctctctctctctcgatttatttttatatatttttttatttgccgatgataaatatgcaggtatataatcatcatattccccaataacaatttttccataagattataatatattctgtttttaattggtttttattatatgcttattttaagcaggttgcataggctttaatgtggtcctaatttctttaacgctggttttacggattccttttcaaagtaataatattttaatatttgtttggcttttgttctta

SEQ ID NO: 4066 - DNA, 1134 bp, Cannabis sativa
gattgttgcagcatgtaagaccaagggccactccttaaatccaccataactgcagcaagacctgttgcaccactttgccaagaagcatctgtcatcagcaacacagcagcatccgaaggtatatacccatccagattgaggttatcttcgagaccctccaatcgaacaccagtagtccgtgacaattccaacatttcgagagccatttggaaagaatctgattcttaagttgaaccatatcaatccctgaccttttaaacaaaattctgtttctgaggctctaaatttcttgacaaacacaccccataaaacagagcaaatgcaatctatcctccttaggcgcagtcaataatagattttcagcaaaatccaaaaaaagtcaccaggaatgttatcactacacataggaagaggacctgagaaccacatcgcttttgccacaggacattctttgaaaatatgcatgctagtttcagagttctcaccacatatcaaacaatttttctcaacacaaaagggcaatttactacgcaagggtaaagcttcatttaagattctccacagaaaagtgccaatccgaggatgtatttttgaattccaaacccatctccacaatgatctcctctgtcccaaaacgatgttcttgatcgatactaataggcacttttaacagagaaaatgccattctcattgcctttccacactacctgatcatgatgatgaaggggaatccttgggatttccaaaattctcctcccaatatcagcaccaaaaacatcagtgaccacctctctattccaccttccatttgttgagatatctgcaacagtagtaattgagagagtatttctatctaagcttcccataaaatgaccaaaaccaattgggtcaagccatggaatccaaggttgtgcccagaaatcaatagaacttccatcagcagcaagtgtgaccgagcctttcagcacaatattcctggttgagagaatgctcttccaaagaaaagaatccccattccttggttcaacagcccagaaagaggctctgctgcagtatttactcaggagacacttgacccaaggggagtcttgattttgagccaagctccaggccaatttagagatcaaagctcta

SEQ ID NO: 4067 - DNA, 1239 bp, Cannabis sativa
ttagacatttcaagtgaataaaaagcgccggataataggcctcgtgattgaggaaggcttgtcctggatctagtgggaaaatgagaacctgcgggatccacaatgttcctccttatttggttactctttatttttattattattattatttttatttttatgtgttataataaataaatacaagtaatgataatggttgatttattaaacattatctaattaataattatgctttttgtttagtgctatttttggataattttaattttatgaaccactacaatataaagatttttcttttttatggaaatatcaagaggtttgttagattaaataaattatctctccaaataataaatatttgtttagttccttatgtcatgtaacactccaaataataaataatatatttttcttattaaaagcaaatgaataattttagatttatcaaaaagagaaataataaacttgaaggctgacattttaatacatatttttaaaactccatggtgataagtgggaattccttcattggtattggtggtgtgatttgcaacgacggttgattcgatgggggcatgttttgggcgacattatgggtggacattcgactcaattcaacatgttttttctcatctaatccaattcaattagtaatttaatttagaaaatcatcatcaaatttatttcaattagaccttaaaatctaattcaatctaattaataatgagtgacaattgttgctgagaattttcgagttaatgtgggagttgttggtactaatatatggcttgcttatcctgtatatatagcttggtattaattagtattcaagtagagtgtgactctactcatatgattccttgggttgccatttcgttgagtgatacttgtacgtttggtactattaattctgtaggtgtggccatctttaggcagtcttattctcatttttttcaattttttttaatgaaatgctacaattgattttgcttgataatatacccttcatttgtgaaaatataaaatatatatttttttaatttaagtgtttatattataatcatgtaatataaaatatatatagtttttatagttttactactctcattacataacttaacattttcagttggaaaataattggattaggcaataacagtaatatcaatgtaacgacaaacatgtataattatttaaacttaaattactactggctaatttattaaatgtgagcta

SEQ ID NO: 4068 - DNA, 955 bp, Cannabis sativa
  modified_base (668)..(674): a, c, t, g, unknown or other
gtgagaaataaaagcttgaagtaaaagtatcaccattatcgtcgcgagtaggggtgtgtataaatcgatccaatctaatgaaaactgactgatttaattataaccgaccgacaaatattagatgtctaaatgtgattggatcaaattaaatgttatttttgaatatccaattagattagatcggatactatccaatatccaatcgaactaagtatcattttcatttagtttagatgagtaattagattttatattgttataagtaaaatatatatgtatatataaaaattaatagtaaaattttactcttttttccttgaattgaatggatccaatccaatgcatattggactaaaatattagatggatccgatttgataaaaaaatactacgtctaaaatattagataaaccaaaattaaactaataaatatatatgaaatagaattgatccatttcaatattaattggatgactaaaattaattaaattggatggtaaaatttaatatccaatgtataattggatctcaatctgaatagacaaaaaaaaatattaagtccaataaacattcctaatggtactgtcactagcattttgactttttaataatataagtaactaataatgtggaaaccttgttatattgttcaaaataataataataannnnnnnaataataataataaaaagaaaatgaagaaagaaatgtgtggaatctttctcacgtatattttttatatataaaaagagtcaagtgatcaagtttattcaatacaatattatggaaattgaaattattcccatttattaatatacgtttcaatacacatggtatatgttctacttgtattaaactaaagtttgttgtgaacatatcatatacgatgaactgcttcattttgatttatttaatggctggtctcaccatatcagtaccggaatttcagactttt

SEQ ID NO: 4069 - DNA, 978 bp, Cannabis sativa
tcccagaatgacatatgtgaagcatataactgaaatcctaaaaaatatattaaaaaacacatataactgatattaatattatattaaaataaatatctgtgtatatatgggtgtatactactcgtgttatgaattcttaatatataactcccaaataaggcttattttcagcattgaactaatgaaattttataatgcaacaacaaatttttatggtagtaatatatattcattatttagttgtttcacactttttcgaaaaaaaaaattcaaaataatgttaaaagaaaattattaaaataattatatataatataatgagttctaaagttaaaggaaaggcttacaacaaaaatctctaagaccatcctaactcacttttagctcttaagtcctcaatctcaaatattttacgtttgaattcccatccttatataaaaggttacacttggttaacagtgagggccaaaaggaagaaaaattacaaaagggaccaaactgtaaattttgatgaaaattagaaaaatctacaaaaataaaaattcactacaatttggggccaacatggacccttgggtgggtccgtcttaatatattcctttttagttttttcactttttcatccacatgtattttataaaaaaaattctacaatatacttctttaaaaaaaaaacattaatacatttatatatatttttattaactcagatttctgttaacaataaatgaagtcttgtaaataaagaattaatacttataattaataaacatatgtataacacagagtattttatgtggttttgtagttaaatctacaaactccacgagtcaatattatttctggatatttctaacgaaaaaaacttttgagtacagaggaataaatatgaatattcactcattctcatagggtctttgtccttcacaaaatgatcaatccctttccccctaagttctgtccctatttataggggtt

SEQ ID NO: 4070 - DNA, 1809 bp, Cannabis sativa
gtttgccatagcagcaaggaaactcatgtggtttgcagaaaggaaaaagcgagtggtaagtacaacagaaaaaaaaacatgaaaaacaagatcatatgttatgactgcaggaaatagagcatcaacgacctattcatttcccaattctctctggcaaactactaccggagttaacttctttgtcacctcagtcatgaaacacaattaatatccctgaatagtttggatcattttgaatggaatcatccccttcagagatgttcttatcttctaagatcgctttaaatccattaacagtttcactttgaccgtcttcttcatctttaagaggcatagtgaaagagtccttagcgaagtgagcatccaaataaacttgctgacttgtcattatcaatccaaatttgtaaatattttcagtggtaaataaattactcccttctctcccatgttttgatgtcattgagcatgtcatctactctccttttcatgttaatcagcggagcatgtctcttgaatggatgagccttctggaaggtaatatgcctcgaatgaagaaccgaggtatagaagtattcctaatggtagaggttgcaattactgttggttacattctcaatgtatgaattaaattgatggaagtgatacaacccttcctcttttcaagtggacttctcttcagataacataggaagttgatctcgtgaggggtgggaataatccaattcctaagacgatagaagatgaagaaggtcgaaaaaatcttgtagccattcaaatttatttggtagggacaaactccaaaataatccacaactgagataaacaacgggtgtaaaggcaagtaagtacccacgtttatatggattcgcaaccaagtgctacaacacgaatactgaaaaccattaggacatccaagttgaggttttcaaacaacaattttaggaagaagatagtcatttgatcaactcgacttgatgttcgaatatagtacaaaataagaggtcttaacttgaatgcttgatctctctaatcatcactctcaatggaaaccttatggagtttggtttccatctctttcccacaacccgtgttgtctaaatttttaaacttgagtgttgtgagcttagctctaatgaattaagccacatgtggatcatattcatcaagtattctttgagttctctttatatgaggcaggacgacttcaaacctcaacttaattcaacttagaacaagtaaatcacagctcaaataagctcctttcaaccttattaagacgatatcaagattattgcaccttgccggacaggagaattttagctcaaatgactaacataaaaatcatatatttgatttttggaggtcttatcaatggagtttaagaatttccaatcaaccttagaatccttaaaccaagctctacagaatgggaataaaaaaatattgaaaagaatatttttctacctaaagatttgatttgaagaacacttgaagtttgatgaagttgaaacactcagagctctcagagaagcttgggacgtgtgaaacaagaaaggaagtggagagaaaataaatgaagagctttcttatttatagtgatacaagtcccctattcgtaaagcaattagaagtgttttaaatttttaatttaaaaggaaaggatcaaagataagtaaaagatgatggacatcttttctctcctccttttctacttaaaattttgaattcctcattagaagaggaatataaattcaaaatttaaaaggacacccaaactcctaatgcatttaggattcaagcaaattctat

SEQ ID NO: 4071 - DNA, 724 bp, Cannabis sativa
attattattatttcatttccaatatatgattatgataacaaattatataaaattataatatataaattaattatcaatgttgtttaaaattacttattaagctcaactattatgtttgatatattgttgcatatagatcaaaattttctgttaaaaaatagtgttaaactaatttaaatttaacgcgtcaattaattttttatttattaaaaaattaaatttttaattgatttaacatagtgtaagacaatattattttttaacaggaaattttgattcatcgcacataatgtaatttatccgaaaaaaaattaataatataatataataaagttttacataataaaataatgcaataataatcttctacagatgaccaaaagctttgtacaactgtttggttacataattattagttttattcaaacaaaacaaaattagtaacatttgaaaaatgctactaaatcatagtttaaaaaattactattaaaaatgatataatatatcttcattttatttagttttatatttttgagtagtaataagtacaaattaataagtttacaaactttacttttgttatactaataattgttttttcaatttgagaccaaaccaataccaaaagcaacaccttcctctcctctcattgatttatttttagctaatactatatatatatttgattattatttttttgaccataatttttttctttaatatt

SEQ ID NO: 4072 - DNA, 1189 bp, Cannabis sativa
attacaatgcaaaattattcattactagtagcaacgccaatactgcccaatccagttagtacaaaccgataaagagaaaaataaaatgacataaaaaaccagggaaaacgataaacaacaaataagaagagaaaaaaagaaaaaagaataaaagcccatatgtgatgcaccaaaaccaacaagtaaaacaacaaagtttagatagatcaaagatttcataaaccaatcacattaatcgaagaaaaaggaatcaaaataaacaaatatatttcctagaaaacatataagataagaaaaaagataatatcaagatgagcacttccccactgttttctgacacttaccggagatagagagaagccaatctatggtgggccctcccataaccagggtccaacctcacagcctcctcacactccctcaccgcttcccctaacctcccaagagccgtcaatgccgccgccctgttactccggtaagcggcgttatccggtgacaatgaaatagctcgatcatacaacgataatgcctccacaaaatatccttttctataaagctcgtttcctgaccttttcacctcctctggatcagaattcgccaatgccctcttcatcgttcctggttctccggaaaactgtacaatcccaggtccgccaacggtggtgttcgattctccggcacctccactcaattttgcgcccccccgcatgatattaccatggccgtagttcacagtaccagagcccaacacatcagtcttagtggaggttctagaccccattccagacttcaaaaccttcccggagggacaaatattgccgctcgggaaaatagtgctgccgccggagtttgaaggggacgaagttgcggtgttcccactgcctccaccaccaataccgccgccgccattactagcactgttaatggcactaaagcttccaccagagtagatcaatgggggtccagccgagaccgatctccgatgacccggcttgaaattacgcgttgcggaagcagatcggtgactctcgtggacactcggactggtttccgacgagaacgatagctcaccggagtggtttttgacttctttcgcatccgatcttctacccaattgggcattattagtttttcccgaagccgaaccggaagagctcgagctactactcgaagtagtagcgccacctcc

SEQ ID NO: 4073 - DNA, 586 bp, Cannabis sativa
ttaggtagaaacgcaactaacggcaaccaaacggcgtcgtcttcaaacgatgccatgacggtgacggagcaccaagtggcgaaactcatggaggaagatatggggtcagctatgcaatatctccaaggcaaaggactctgtctcatgccgatttcgttagctacggctatatctactgccacgtgtcacactaggaaccccatgatgaacaacccccagatgccatcgaacggtgagggaccttcctcacccagcatgtccgtgttgaccgtccagtcagccacgatgggtaacggcgtgactgacggttccggtaaagatgccgcttctgtctccaagccgtgataacgatcgttgactgactttttatattgttaaaaaggaaaagaaaaaaaaaaggaaaagaaaaaaaagtgtcgtttggagttttaaaaaggccgactaaagtctacggaaataaggcttcgttgctcattggggctttaaacggcgccgtatttgcatagactttggttaaagttaacccctctatgtctcaactcaactaaaagtgccaataccaactaaattaatccttataaatcgt

SEQ ID NO: 4074 - DNA, 2148 bp, Cannabis sativa
gaagtgtgagaatcattaacttattacctaatttctactatatatatcacttgtatattatggtgacctaagagcatctcaaatggtgttttttatttttatccaaattaactttagctaaacagttaaaaagttaaaatagagagttacttttattattcttgctccaaactatgcttgttactttagttagcatttaattattttaataatattttataacttaaattttatgaattaatttattacaataataaaaaaaatgtaatagtatttttattttagtaatattaaaaaaaatagcaaaaaagtagaaagttttttatccattctttattatagagaaccattatttatgttttttttttcaagtgtttatatatacatacattgcacaatttgagactccaacccaaattccccctcacacaccctctcatgccccccctcaaataatttttaaattttaggagtacaacatgaagacttcctaggatgtcactcatcttatagtactactttcccttaagtatgtttaactgccgagttctaatcaggaccgaccctaaggatatgctaactaggcgtgcgtctcgggccctaaaattgtgaaaaaaaaattattcatatataaataaaatattaaataagaaaaaagtataataatattatttggtgtatactttaagccaaaaagctaaaaatcaatttctgatccctactttttttaaaaaatatttatgtatatatataaatatatttaatgagattcagtacattagtactgatatattgcactcaactaatttttatggttggaacttaatttttaagacttattctctatttcaattaaagagtgttgaaaaaacgtgattaaagatagagagcagtattaaattccatttcaattaaagagtgttgtgattgaagatagagagcagtattaaattattggttgtaaatgcatgtgggctagagtagactttgtgacgcaggagcttattatgaggcacgtaaacatacaccatatcatgaaaaagagaaatgctaaagggcaccagtattgtcaatattactattgattcaattaagtatcgagtctcatataatttaatataatagtttttaaaaagtatcgctagccaatcgcaacgtaacatgtcgagaaggtgctagacaccactaataactaatagcaatggtgcatgcaaaatatatgatgtgaattattgactattcttattaattacacattattatctgatgccaataaatactattctcctatttgatgtcttcgccaataattaaattaaaatatataaaaaccatttttaattgtaaaatatttcacacaacaccaattttgaccaacaaactcataacaacaagttcaaaagcaagcatcacgtgtaatttaagcgcaaatgcttctaatttggcaaaactctatataatttttagttatatataaagtaagataataacaaaactatgagataacttctgtcaaggaaaaaaaattggagatgattaatttattttagaagtatttgaagtataaatatttaatattttatctttatacattaatcgtattatttattttgtttcaacagtctaaatagtacttatgacattatttctaatgtcaccactttgttatagtaacacttgtcaccttgttattggaccacatcatacctttattaataaaaataactcattttaaaaataagaaaagtaacttaccatatcaacatgacaccaatttagataaaaaaaaataataataatatgtcactacataatttacctagtaatttttaatgtttttttaatttaaaatgtgtaagagtctatattaaaaaatgtactaataataatacacttatttttttaatcgtgctgtcagtataagtgtcattatttttaataagacaatacttataattagtaaaagcacacacattattttaaaatatattttttttttattttccttcttatttacgtatttaataatttttcatacaaaaattaatctaatgattaataatttcaaaaattacttactaaagtctcacatgctactttttaaataacattttaatgggctggtttgataaagtaattttttttttt

SEQ ID NO: 4075 - DNA, 1369 bp, Cannabis sativa
ttgtcacttacagggatttttcctgaaagttctgcaaaaggtgtgtttattttcatcactttgttttgttaaaggtggtagatgatgaaaataatttcaaactactttactgacttatttttttttttttttagattatagtccttgtactgagctcttttatttgcttgttgggcgtttaagaatgtattgataaatgagtatttaaagttttatgtttataattaatgcatttaataatttttttagtgcataaatactcaatataaaactgtaattaggggtgcacaaaatatggaccaaaccattcaacccagccaacccaatttattttttgtagtaaagggttatgttaagagtagatcattgctgattggattgaaaagtgataagccatataattatgggttggttatgggttggacacattttaactctatataacacaaaccaactaatttcttgaaagatgttccaaatttgagacaacttacatacatataatataatttatatttttatacataaataaattatattgtgataaccttagaaggtgaattgatcaaaacacatcactaacatgtagtctatagtttccctactacttctaccaacaagcctaatgtaagaatcaatcactactattattaactttcctactcacacaatgataccactactatgcactaggttgaataattttatcctgttaatttataacataaaaattaaagtttaaaatattcatctcaactcaatgaactcaacccaacccacccctatattattgtactaagtaaggttgggttgtacaataaaaaaaaattgaatggtgtatagcttatccaaaccgcaattattgggttggcctattaaaatacctctaacctaggcaaccagctcatgtgcacccctaactgtaacttccgtctaatttcgtcaaaaaagactcgattttgaattcatgttaagaatctagaagtgtatggttgaggaagtagaaacaggtgagtgtttggtaagatacatggggtttctcttaaaaccaattaataataaaaggagcggtatgcatcttatctacggtatttaattttcatatattatcaatgtataagactctctaacaatttatattaccgagaccaataataatttagaatcttggtcttaacagaatttagactaacaaaactagacaaaaattatatttttattaacattgaatacttatagccctgaaaaaacattaagcctgcttatgtcgcttaaaaattcaacacttataagtacgtatcactatttaaactattatctaatgaattattctcttccataatagtaataatatgataagcttctacaa

SEQ ID NO: 4076 - DNA, 1720 bp, Cannabis sativa
taaagtttgtgtttggtttcttgttaaatgaacatttgatttcaaaattgagaatccaaagtaaagtgtttgaattttgtcaaccgatttgatcttattctatcgaattgatcactcaaccaatctgatctgatacaatgaatacattagattggatcggttctaaccattaaatacattaaatggtcatttattgaattagatcgaatccatccaatcttttttagctattatttaggttaaattcattaaataatagataaaataagcacaatttaaaacttgtttctcattgtgataaaacacaaatcaaacatatatatataatcaacattagtccaacataatttttacgatcacataatgataatataataaaaatcaaattcaacttacataataatactatcaaaattcatatacaccttagtacataggcaggagatccacgttgatcggcgaggtggggcagtcgcccttgaaaaaaattgagaaaaaaatgtatatattttttagttaattaaaacatatatttgtgattaaaagtgataatattaaacataatacaagctatgacatagtggttaagttatctcatatgcatagtagatatcatgagtttgaatcccaacaaatactataaaaatacaactttgcatcaatttttaacatgttatatcatgtagaaaaaaatggcacaccccctcacaaaaaaagtacgctcccgtcaacttaaatcctaaatctgccactatttagtatgtacatatatataattaaaaatatttgtttattcttaaacgcgtgtgtaataaagaataaaattaataatttgcaaaaaaaaaaattaatatatattattaaataatagcagcggtttagttacttatccatttaatctaatgtcccattggataacctatccaatctaattggatttttaaagtttacatctaaaccaaagccaattatcactacaagaatgaagaaactgcgccaacaaaagtattctatttgcgctgggaaagctttgccggcgctgaatggtgcttgcaaagcctgccagtaatgctgcgttgctgaaattttttgatggcgtgctttctagcgtcgaaaaaagtctttttgccggtgtaacaaatctagcataaatggcaaaacaaaaaaaaaaaaatgaaagagaaaacttttagcatgagctaaatttgacacactttaaacactatttgaatattatttttcataaacatatatgagagtaaggtttgtgtcttgggcccactgagctcaaggatcaaaaaaatttctcctttaataaatatatattttttttactaattttaaaaatattatattttttcttcttctatgacccactaaagtttatggtcggccctacttctttctctctatgttaattaatattcggatttaacttattcaaagttaaaaaattaatacagattgattacttttctatttcagttacatgaattgataaaggtaattgttgttagactatttagaattttgcccctcaaattatgatttatttattagtgtgctcattgaaattttcagtctgttaaaaatggtctatgaactatttaaagtattataaattggtctttttgccaagttttgtcacacgcagcaaacaaaataatgacatagctacttagctagttgtcacgtcagttccatgtcaacgccacatatg

SEQ ID NO: 4077 - DNA, 1753 bp, Cannabis sativa
agcaaattttgcacctttggatatagattacgtaatttaaatctaaagtactataagaaagaaatatggtaagaaaaaaattactccttcgaaacatattgctcagaagctccagactggatcaacatgtggaagaaagcttctgctccgatgcaatttacaccggaggcatcagggaatgtgaaattctctgcattatctgctctaatccttctaaattggtccggcacagatttcaactgcatatatacattgaatgcataaaccaacttcagtactaagtaagagcagagatgatctcttaataacggcaatcaaagtagcattaatcaattaccatgtgttgggatggaggccctccaaaatattccctgacatacattcttgatttctgaaaagggtatcgactaaaaacccttccttttgaacaagaatgttcagagtaaaatgtagataaacctgaaagaacttatagctaaataaggatgataaaattttatcattaattgaaaactaatttctttaaatgcatcaatgaattttaccattaggagcaaaagaagcattgcttttcataggggtggagaacttggaactacggggcctcttgaatgaagatttagaaactctaagaactttcctcttttcattgattccctgtttatcttttgcagaaactgtaccaatggtgtttgatatatcagccaattgccttcctgttgatttaacatcctgattctttcttaaaccaatagtactttccgaggagttgtctgccactgtacccaaaggctcttgttggcaagtaaggtttctatttaacttacaaacattatcatggctaactgaatcaaatcgtctgatcaagttagcccctaaatttttagtttccgaattgaccaacgatggcattagtttggaagatgatcgtagtggagatataaagctcttaggcatagagttgttctttcccgttccctgatgatttacactagttggggggtcattatccttccttaatccagaatcaaccatcattttattttttgaaaatgaaagttctgtctcatctgcatccccaatctccaagaaatttcctaactctggatcacccagaagactccttgcacgcttcagtgcatcactggaaacagatatagattttccacctgctgtttgaaactttaccggtggtgttttggttgctgaattatacatccttgatggagtcaaatatggttttgcttcactgagtttatcttgacctgaatcaatcttacaaaacaatgaagatctcggaaccaaagcatcatccatacttttatagttgttgacaccctctctaactaccaattgagaaacattttgacacccagaagtggaatcggtactagataactttcttgtctcttgaaagccttgaaaactgccaggatcattgtcttcaaccaatcccaacaacgtctttgctcttgctatacctgctggagatatattaaccattttcccagagcccgtctggaaaagggaattcgagaaatctaatttcttatctctaacatccatttgatctgaaaaagacattaaggttcaaataaattatggtaatactttctgaaattcggggttttaatattactaactcaattatataatcaatttgaaactgtgaaaaggattttttacactttcgattgattgcaaagttattttttcatttcattgagaaccatttcagtgactgaatcttatg

SEQ ID NO: 4078 - DNA, 2556 bp, Cannabis sativa
tagttctctttatgttagatttgtatatttacaatatagacattaatcactaccaaggttccaaagatctttcatcttcatcattggggtaattccccaaataagtactccaaaactctgcattatctctataagacacaacttcattgctctcattatggccatcctcaaaaactgaatcttcagattcaaacaaattctcaaaaccatcaccataatcatcgtcgtcttcactatcaccatcatcttcatcgcgtttatcatcattagaatcgcaaatgtcaatgccactcttccgagctcttctcctgtctctcctcattctcttcccctctataaccaatttcattaactcttctcttatatccaaagatggatctttctccaaaagcctgccattatcatcaaacccttctaccaagagcactgaatctcgatgccctttcaagctcacatagaataactccggatgtcttatgatcatccctctcaacttgttggacagtccaaactcctttctaaaatgagtcaagtgatcaatcaatgtcctcttctctactgtcattcctaacacctcacgcaccaccgcgcaacctcttttctcagcctcaatagactccttcaccaactcagcagcaggagttttgtaaggacaaacatcaggaatttcaccaaacttaattaaaaaatcatgatgacgcctcttcaagttcaatcctttcctcaatctcaaatgcttaaacttcaacggcctatcaactatcaactcccgcgatttaacatcaggagaaggtaaagcctttgcaagatcttcctcccaagtgacaagttcaagtgctcggccatacgaagtgtcaacaatcttgaacttatccgggtgatcattacaaaggcgcgatctaaaattaggaggaagaccaagatcaggagcaagatgaacgattttcgacaaaagcaatctcttatgagaagagagcataagaagtttctgaagcttttgtaccaatgtagccgaaatagctaacttgtagcttaattcccgggctgcaagagcctctgcagccggggttaaacgaacacagagttggggatatgtcttggtcgcattgagtggaaatggtggccattcaatagaaaagagttcaaatattgtggggtaacgacatatcattgaaagaattgactttggtgttgaaatagagagataaggtctacatttggaaagtatatgaagaggtatatagtgttttggtttagataagagtaaagttatcaacttttgaacaaaccttatcttgtgttgctttactatatgcctatctaaactaggactacgaactgttttaatggaagaacaagaaattgaaagggaaagatttggttttggttttgttttactgtctttacataattttcctatgttgcccagatagcaacgagcagggtttctagggaggaattcagttattgggtattctctttgagtggtggaaaatggtaaagataatgccattgatgacattgatgattttcaagaacagaccatcaaaacgaaagagtaacgaaggagcccatgaatcaaattaagatgtaaaacgagaatttgagactaattagagagagatagagaagggggcagaataaaaataccttctttagggttgataagggagaagagcggcggatgtgggtgtggtggtggtggtgccgccgtggtgtggtggtgtgtaggccgccgtttgagagaattttagagagaaagggataagagaacgatagtgattagagcatctcctattctaatagctgaaaaaataaaaataataaaaaaaaatgattatttaaaaaaaaataaagaaaaaaacttttttattattagacttcaaaaccgttttttttttttattaaaaaaaaatctacataaaaacttttattgtaattaactaacggaataacctaaattataataaaaaaaatattatagcaatccacataaacaactttagaaacccagactgtaaatttgaaataaaaaaattaaaaaaaataatatatgaaataatttctctaaatttaaaagttctctatttatttttttaatatttattttgtacttaattatttactcccattagctcatgttattatattatattactttttaattgttttctttaactttaattaatataaatattttatttaaatgagtaaagtaaaataaaaataaataaagttgaccccaaaaatgattaagtgtaattttttgtcattaatattatatccaaaaaatttactaagtataaaatttcaaaatacactaaaagcatattgacaagaaagcgaaagtcaatccacgtaaagggacaagtcgacacgtcaagactcggtttgagctccctgcacgaggagctccccgctgccgctccaccatctccgcgcgtccaagggagatccccgctcccagtccccacatgcaccaagggagctccgactctcatcactccccacatgcatcaagggagctccataccctcttgatctctctatctctcc

SEQ ID NO: 4079 - DNA, 1076 bp, Cannabis sativa
tctttacatgggtaggccttgtaatttcattgaagaggacttgaaaccttattgtttatcggagaattaggtatccttgaaaggaaagttaagactatgctagttagagtggaaaataggagtcaggtgctgacttagtagagctggaattagttgagctcgatttcaaacctgagatggattttctagccaagtattcggccagcattaattgtacgcaggaaatgataacttttcaaccggaggacaaagatccatctatttatattgaattttctcagggtttcgaatttcggttatttcagttttaagagctaaatatttactatacaatagatgtataggatttttagccattgtgattgactccagtagacttgaaacatttgggcctgaactagtcagaattgtaaaagaatttctcaacgtatttctcgaggagttgtcgggattatcgccacaacgagaaataaattctataactgatttggcacttggtgtgggacttgttacaaaagtgttatacaggatggtttcagcaaaactcaaggagttaattacaacttcaagatatacttgatttagggattattcgacccagtgtatcgtcttggagagctccggttttgttgtgaaaaagaagaatggttcccttcaaatatgtattaataattgggaactaaacaagttaacgatcaggaataagtatctgttgcctaggatggatgatttgttcgattagctttatggaaagtctatattttctaaaattaacttgcggcttggttatcatcagctcaaaactcggggagaagataatccgaaaaattagtcattacgagtttttggtaatgttattcagattgataagtgctctagcggcctctacggatctcatgagtagagtattcaaggattttctcgataactatattatagtggttatcgatgacatccttgtgtactctcagatggaggaggagcaggagaaacatctctgaatgatattacaacaactcaaggatcacaagccgtatgcaaacttaaaaagtgtgaattctgattattggaggttt

SEQ ID NO: 4080 - DNA, 2539 bp, Cannabis sativa
tccattgttctctgttttcattcatggtatcagagctatggcttcgaatcgaccacaagctccagaaaatatcaatccagttcaagaagctgctccacctcaagctcctgaagcgattttaccgaacaacaacctgcttccactcaatctccgacttgatcgatcaaatttcaccctgtggagatctctagttcttgctgccgttcgtgcttacaaccttgatggctatcttcttggcacgattcccagacctccacaacttcttgcaggtaatgctcctaaccctgcttttcaacaatggattcggtttgatcaattcatcatgcactggctaatgaactctataactgaaccaatgcttggttatgtaatcaactgtgaaacgtctgctgagatctggacaatcttcactcaactttttgccaccagatcaagagccagattacttcaaatccgtggattattgcaatccacaaagaaaggctctctttcaattgatgaatacttcctcaagatgaaacaatatgcagatgctcttgatgcagctggtcaaccaatctcaaatgatgacttgattctttatattctcggtggccttggttctgagtatgaagccgtggttgttaatctcacttctcgatccgacaacccaaccctgcaagaagtgcagttcatgctccacagtcaagaaatgcgaatcaatcaattgacaactgattctctcacaaatgtacaagcgaatctgaccaacacaaccaataccagaggtggctaccaaggaaactcaggccgtggttatcgcggtttcagaggtggccgaggcaacagaggtggtaggggaaatcgccctatatgtcagttgtgtggcagagccggtcacacaggactcaaatgctaccacagattcgacattaccttcacaggccctcccccaaatcaagatgcttcctcatcttcaatccctcccaatatcaacccacaggccaatctctcagaacttcccaataccactgatctgtctggagcttggtatctcgacacaggtgccacgcaccacatcaccaacaccccagacaacctgtctcattctgcagattacaaaggcaaagctcaagtagtggttggtaatggctctacccttcccattaatcatattggtaaatctgtcattcccacatgttcaagtaataaacctcttgtactaaaagacatcttacatgttcccacttttacaaagaatttactcagtatttctcaatttacctcacacaataatataaccattgaatttgattctgtttcttgccttattaaggacaagatcaccaaggaagttcttcttcggggaactgtccgtgatggcctctaccaactccaagtacctccctcacagtccaagcaatcctgcaacaattcagcaaccacagtgtcatccaatcctcatgttttcaattacactactacttgtaatcctgtttttgataagtccaaaactgtcccaatttggcattgtcggttaggacatccatccaagaatgttctaaccaaagtcttgtctagaatatcaccaaataccaaatgtaccactactgatttctgtaatgcctgtcaaataggcaaactacatcagttttctttcaagcaaacatccaataaaactacaatgcctttccaattaatattctctgatgtttggggcccttcattttacccatctaatgatggttacaaatactacattagctttgtagatgattttactagattcacatggctctttcccatgaaatccaaaactgaagctgcatctatttttttacaatttaatgcctatgttgaacgtttctttcaacaaaaaataaagagtgtccaattggatttagggaaagaataccaacccctctacaatctgtttgcaaagcttggcattgtcaaacgcaattcatgcccccatacccaccagcagcaagggagagttgagagaaaacatcgacatgtggtcgatgttggtctcacacttcttgcccaagctgaaatgccacttcacttctggtgggaagccttcacatctgctgcctatttaataaataggctccctgccccaaacatcaactatgaaaccccctacaccaaattatttcatcatgaacccgattacaatatgttaaaagtgtttggctgttcttgtttcccacttctcagaccttatcaaaaccataaagtctcttttcgatcctccaaatgtctctttttgggctattgtttatcctccaaaggctacaggtgccttcacccaagtggaaggatatatgttgcaaggagtgtcaccttcaatgaaagtgaatttccttacaacactcttttttcaccttcaacttccacaccaagtaatgcacctgtcatttttgacagcaatgcctttaaaattccccaattttctgccccttctccaccatctgcaactccttccccacatcctgctgtcttcaacaattccaacacacagccaacccatttttctcaatctgctacttcaaac

SEQ ID NO: 4081 - DNA, 2230 bp, Cannabis sativa
taacataatttgtgaaaaaacgtggaaagttttttaaataatattataaatgaaaagtaacattaattagtaacaaaaaagttttgttctataactaaaaatattatgatgatggtgatttgggaaagagataatggattccctcaaggagagtgaaaagggaatgccttatgagattgataaatatagaactatatatatatatatttatagtgttacattttgacttataatgcacaaacaaaatctccactagtctctatatcgtctatgtcagcatcagcatcaatgtcatcatcaagatccatgcttccaccaagaaactgccctccaagtttggcaccatccccaggagtccttgcttctttaactatggccactatctcttcttcactctgtgatgatgagtactcattttcttcttcattgttaaccaacccacctcccttctcctcatccatgaattcaactggcaaattctttaaaaaccaagaatgcttcttaatttccggtattgttattctctgtaccaaaatcaaacaaaaaagtcaaatattagtataagactagtataactcatgagttccttaaaggttaaaatttacacacaatatatgattttatactaccttttcagggctggcaacgaaaattcgtgataggagatgtttacattccatggatacacgaacatagtctggaattgagtagtgtacactcagaattctctgccataacaaattagagagatttttaattgttcaattctatcgtatatcgtttggaagtgaaaaatgaatgcaatgtcatattggagtttttagatgtttggttaggtaaaaattgaacattaaagggctttcataaccaattaacctgtagtgtttttctgaagtttcttggatcttctggatcttcaaagggataagccccaaccagcatcacatataatgtaaccccacaagaccaaacatctgctatctgtgattttcaaacatgtaacgagatatatatatttaggtatatgtaaagaagtgattatgcaatgatacacgttaggtgaccaaaattgggatggacctaatatgaaaatgaccaaaaaatgaaaaacaacaaaatataataataataataaaaaaaacaaagactaccttcccatcatattcttttcttgacaagacctctggtgcgatataggccggtgttccaacagtggatttgggttgtgaatgcagaacagatgactgttaaagaacaatgcaatattaaaaactgaaactaattcatataaggtttgataataagtggacattaatgagttattattattattgccttcgaataaccaaagtcacaaattttgagacgtggggctgagcttccatcaagaagtgtgttttccaacttaagatctctgtgacaaatttgctgcagcacaagaaattgatccataaaataggccattataaagtttggtgaagaaacaattaaactacttctcttttagttgatttgagagaaaaggatatatttaccattgaatggcagtaactaactcctgaaatcagctgttggaagaagtatcttgcctgatattagtataaagaaacagaaaaaagaagaatgtaattaagtgaggtttatcaaaaccattaaaagaaaaatggaattaatagtgagttttttcatttttgttattttgaatttacctcatcttcagcgaatctaccagcattgcatattctttcaaaaagttctccaccagctgcatattccatgactatggctaaatgagttggagttaataaaacctgccaagagtgatcactagtaagaaattgttgaaaataaaataaccatttatcttgtacgtgtacaataatacaaacattattccaataaactataaaaagtttggtgagagcttcatcagtatagaactctactaatatatatatggagaaaaagaaaaagtcaacagttttggattcatcaacttcatcacaccttcaacaaccctcataaacattcttatactttaatttattttactgttttaggtatgagtcttatcttagccaattgaataatgcacacatatggattatgaagacaattgactactattccattgcaattcttatctgaagcaagcaaaaagtcaactatgagaatgatcacattcaaaattcggttcatatagttactgcaacaatagcttcttcttctt

SEQ ID NO: 4082 - DNA, 963 bp, Cannabis sativa
acaaaaataaatggaacaagtgtgctattgggtgtgcagtgttcatcaaactgcacaaatcactcacaccacaccacataaaaatacaatttgaaattttttgcacggttgtaatttgtatttttgccgaaaatcacgtggtacggtgtattttgcaattttaaatttaataatcacggttctaatcgcactatactatatattacaaagctatcgatttttacaatatgattttttttctataaaaaacaaatatatatataatatgtgtatattacattattttttagggacaatttaatataataacttaatgattagtatatatatttcgatgttaaaattttattaatatatatttttttttgttgttgttaaagcattatgagattgatttttgaattttcattataatatttgataataatgatagtgtaaactactcaaatcgcaccacactatactgcattttcgtggtgtggttttgcaattttaagattttgcggttgcagtgtgagaaattataaaaactacatatgcaaattggtttgaaaaaatgtcacaactcgcactatctgcatcgtgaacacccctagaacctaacaacagttctagtttatagtcatgactttctttcatggcagtcatgaccactttctcacttttataacaataataattatcacattactttcataacggtaatgactatcaccttgcttttataacggtaataatcgtcacattgctttcataacgataataactgtcacttgctttcataacagtaatgaccgtcttgttattttcataactatttaattcacaaatgatcgtaatcgtacttggcatgttatgtggtacaaatatatgtttcttacatttaatctagatttatgcattcggccaacccgagtggagaaaatacctgatgacctcggccctacgtcacaacaacggtaa

SEQ ID NO: 4083 - DNA, 873 bp, Cannabis sativa
aaatatgtattatctaaatgtaatcaagagttggtagtgttgttttgtcgtaagttgctgattttttcttttttctggcagctgccgtgtgtgtaggccttgtgcctttgcttgtattgtttagtttttttgaataaagtttcctctttttcaaaaaaaaaataataaaaataaataactaataatcgaatacaacaaatcttctagcaacatgtgcagaaacagtaataataattatatagcagtagcattaacatcaactcatatgcacataacaaaaaaaaaagcaaatataaaaagaataattgaaatcctagcagcaactccaacaacaactctaacaacaatttgtaaagacaatcaaattctctaactctaacaacaaatctaacagcaaaaacaatccattatgtgaaaacaatcaaattcagcaatttgaatcatactcaaatataaaaacaagatgaagaataagtaaaatctagcacccaaattcaaatttacccataatatcaataaaagagaatttcaagttttaaattaccttaattaaaaattagaatgaatataataaaccttcaatttgaaattaataattattgctgagatttaaagggctagaaaaagtttttttttttattccaataaatcgaattttttgttaaattgttgaaattcttataaacttggatgaaattgaagaataagttagaaggttgcttatttaattctttggattttttaggagtgatagataaatgtcagtagctttgatgtcgaaatcttgccgaaactaaagaaaatgataccgtgaagcttcagacaatagatactatagtttgtttttttttttttttttttttttgaaaaaaa

SEQ ID NO: 4084 - DNA, 793 bp, Cannabis sativa
gttgtgcggcctccttcactatactgaccatacccattgttgccaacttggcaatgtacgggtcagatggtggtgcactctggtatgagcgcttagttcttgccataatgtatcaatgccagctcaaaatcactcagaaagttacttgggaacagactagatgcaacctcacaaaagcaagactgattggacctatgacaatgcggttgtcacctccctagacaaacactaaaaatcacatgcatagaagagacaaggggaggtgcgtaacctaacaaagctacaaataaaactctggccaattatactcaagggtacttgccaaataaactacattctacaaggttgggtatcagtaaagtaccgtctcaagtatacctacttagacaaatggcgagtcttaagttgtacattcgactataatagactcactaccaagtcttatacagagtttccaatggaaccacgtatgatattacaattttatatgcctacaaggctgtcacgaaacccttattgagttcaaaagaggacaaatacttggacgccttcttggaaccttggccttggccagccaaggttcccaagctcagagagggtcggctaggtcccatgacccagccaaggaccagccagggaccctatggccaggcatgggccggccaacttttggggtacccccatatggtcggccaactcccatgataaagacccatggacggtcgggtcttgaacaaactcctattgtcggccagggtgtgctttggatctaaacgtgtgttttttaggaact

SEQ ID NO: 4085 - DNA, 578 bp, Cannabis sativa
atatcatatatcatatatatgatatgtgatatgctgatgaaattggttatgtttgtattgtattgttatgtgtgacttggaatatgtgtttaataatatggattatgtaaatgattgattaatttaattgtgttgacaaattaacttaattaatcttatgcaagtgattatgtaaaagaagagaaagcttaagtgtgtaaagatgtttaattattttgtaatatgtgtcaattggtactttttagtgtcaattttggtaatatgtgttaatatacaatatcaatttaatacctcttttgaggcttaatttacaacccttgaaacaaccacataaaatggtcatttgagcaaagaatattattaataaaaaagtaaatactattttagactatatattttacagaaattattactgattagacttttattttattaaataacaatttagacttaggcttaattatgatcaaattaaaatttaataataatttcacttaaaggtattatgacatgaatgattatatttatttgtatctattcgtactaaaaactgatttcaagttgattatattaaaaaa

SEQ ID NO: 4086 - DNA, 887 bp, Cannabis sativa
tctacacatagatcttaattcaccagagagagatagtgagaaagaaagagaagtttatattgatatggcgtccacgtcccaggccatggtgaaccaagggttgtatgaggatgaagaagcagtaccagcccagttgggtttcttttcttatgccccaaacagcagttatttgaccctaatcccaccattggtttgccttaaaaatttctcttcttcttcttcttctcctccttcttctacaactactactacctttttgccatcctctaataataataataataataatatgtctcatgaaaccctactttcctctctaagcagtactactgctaattattctaagcaaagagaagatcacttctctttgtctgatcatcataatcattatgattcaggatcccaactcctttctttgcagagatcaaccgctaatttacggtaataataaatcaaaaccctattaacagttattttatttttcctttcatgcaaatatatacatgtattatgtgattttttttatgtatactatatatataggtcatggggtgatgtgaatgagtgcttgggaagcaagagatcaagtatcataaataatggaggggagttaggccatgaatatcgtgatcatcatcatcatcagcatcggcatattggggtttcaacgatgaagatgaagaagatcaaagggagaaggaaagtgagagaaccaaggttttgctttaagaccatgagcgaggtcgatgtgcttgatgatggttacaagtggagaaagtacggacagaaagtggtcaagaacacacagcatcccaggtacctaattaatattcatttattcattaatttataatattaacaactctaacaatgccattaatattaaa

SEQ ID NO: 4087 - DNA, 1468 bp, Cannabis sativa
atccttaactgatcaccattactatgcctctagagcctcttagaaaagcctgttgatgatgaggtcataactactctgaaagtgtataggatggtaatataaatgaatgtgtatagaattggacattgttcatcctctctaatactttcataattatatactacacgaaccaagggtggcctaatccaccttcaatagccaccatgtccgaattcatttgacatgtaagtaaacgtctaacaatcattcatatatacaatcatggcactgaagtcaatttcttaaaagttgctcatcatgtaatgtatcaattatatacatatatgtagtcaggccaaatcattaaaaattatattggacactgttcaaagatatataatgtaaaggagtcgaatactgattcaatgagagcaaattagaatttaaagcagtaagaaatattcccataaaattctgatagtgactaaaaattataagtcattctgctttgcccaaaatattctctcaaattttgttgggtccaactttaaaatataagattataaattatttgacacaaactttcgagtaattttgaattttatttcacagttcttttgaattataactctggtatctaaattcattcaagtgagattataaatttgagtttcaatttaacataaactcaatgtattcaaagaatagaagattaccagaaaaattgatgaactatgttcgacttgattcgtaggcaacctaattagtaaaattagatacagacttacaatcacacattctcaaatttctcgcaaggtcatcacctgaacaaaattctaaatgggagatcattcaccttaataaatttttttagtaaagtcatttatctcaaaatatcaattgagttaattctttacaaagttctggaagataaaaaaaatccttgaacttcgctcaacttgattgctaaatgataaagaattccataacatgatcatataccggtatttttcagttcaaaatctcaaatgccctattccagattactattagcttgatctaaagaaagtatgtaggaagtccaatatcgtaattataatcaaaaggttttcttttcacaaaaagattagatgggtcaaacttaaattaataaactcggcataggtgaaattgtatttgtatttattttaaatatttttgtttgacaatgtctttgattgcttttgtcgtttctgatgctgattttcttcatgtgcttacttcgatgtagtgtctgataatttgttatttccacttcaggagaggaaggagttgttaaaagggtcttacagggatagacacttcaatgcaggctccatacttttaggatttggagtccttgaggctgtaggtggatgtctcaacacatggttgagaacaggaaagctattcccggggcctcatttgtttgcaggagcaggtaaagtatctgaatgttgtccctaagatc

SEQ ID NO: 4088 - DNA, 666 bp, Cannabis sativa
attttgcgaaaaaggaaaaatgggaaacacgaaacagagagaagcagaaatgttttattgattcactacagaacttagtattacagcttatatagcagagtaaataaatatcagctgtattcataacagaatacagttaattcagttagaaagaaaaagggacaagttagttacaagaggggaaaggattaactaactgactaagatcagatactgcaactatataaacttaataaacaaaaaccaaaatcaatatacactaacaaaatctgatttgttaaaaaccacaaaacattaataccaaattcatatagcagatattaaagacccaaagaaaaaatattgcagcagtagtcaaaaaagagtttctatttttttggagcaacaaatgtgtattgcatactcatcaatatatgtatttcagatcacaataatttattacatatcagcagtaattaacaaagtaaatgaataaaatgaggcagttgttaaattcttaatctttttcaattctcaccaacataagaaataaaagcaacaaccttgaccgacatatataattcaggccatcatcttacacaattatacatttaccaatatatatttggtagaaaattgtgaaatgagattaggaatcaaatttgatgccaaaaaaaaaaaaaaaaa

SEQ ID NO: 4089 - DNA, 644 bp, Cannabis sativa
gaggcaaaaattctaattagcatattattttacttttgaattaatgaaatgaaaacatgttatttctcaataatatattactttctagaatttaattagtaataaatatttttttctctaatatataatatatatacatatatttatgtagggttataatagttggactctgtaatttacaaaatttaccgattggatcctgcattttttaaaatattacactttagcgttttgaactcaatttttgacaatttttaatataaccaatttaaaaataatttataacacaaatagatacagaaaatataatcagtcttgccgtaatacctataaatcaaatttttattgagtttttcttgtcaaaaaatcagccgatcagaatatatatatactatattttttactattttgaaaaatgcataatccaatttataatttaacaaaatagagattttaatcaataacttaagcaaaaggcaaaattgaaaatggtatgagtttctaaattaatttgagttgaaattaatatttgttgttgaaataattgcaggatagtgacagacattccaggaacaactgatgtgtcatttggtaattattatatagtaaatatgtatatgtttttaattttgtaagaatgaatt

SEQ ID NO: 4090 - DNA, 1643 bp, Cannabis sativa
tcttttactttcttttcttaatgtccaaacatttcaacatgctatcagagcgggaacttccaccattgacaacgaacgtggctcagattagagctcaagttaatggtcaatgtcttccaattacgaacagaaccactagagatactcaggctactagccaaggtcttctaactacaaacagagccatcatagacgattccgcatcgatctcccttaatcatagtttgtcgatccatctcaataatcacaactatctactttggaaacaacaagttctggcagccataagagaaacaaattgcagagattcattttcgatcctcttccgccttgaatgatgaagattgcattcttcgcaatgtcagtcttgcgttcaacgattaggaagttcagggtcaccttctggggtctttacttatttcctcaatgacaaaaagtcttctcagacgcatggttagttgcgaaataactcgtcataactcagtcaatattgatcttattgacacgactccacttgtgtttgaaagctcgtttcaagatctttcaagtcatattttatacttatattacaattctgaatattttaagtcaaaattttgtcctcaagtcaagtgcgattttttctacagataacccaaaaatgatccaacggacacgacttgagctccaaaaattaacaattttcattggtagtcaaatttagccattagatcatcatcaatggtcaagatcaagccagagtgattttttcatatttttttgtattattttagtggattttcttgcctataaagtgagagctccattagcttatttttcacattcaaaaaagtccctacaaggtcaaggcatctctctctagaaatctgagctcttgccttagttaattttcttgtaattctcttgagaaataaaaactcaaagtcgacgtagttctattactgtcgtgacacaataaggagtgaactactataaatcttgtgtgtgtctcttatttacttacttaactcttatctcatctcgtatctagcaagcgagtgttgaccaattttttacaacaacaatcactgctgagattacttggctacactctctgttttcaaaattacacattcacaataaagactccctaccatatggtgtgacaacttaagcacatttttgttaactgtcaatccaacgttgcaaaccaaacatagtactttatcaaagaaaaggttcaacaagggtttatcgaggtgagacatgtccctgatcaacttgcagaaagtttaagcaaagccatcactagtgcacaatttgctaattttagaactaaactcaaaattaaagatgtgtcaattataagtttgagggttggtgtagctcattagttagctattaagtttgttaaagtagttagttagttagttagaactggtttgtaactagctgaagcttgtatataaatcaactcttgtattaatcattcaatgaaaactactctttcatattcattttctttctctcagactttcactttcttttctcaatgtccaaacatttcaacatagctgtctaaaattgatatgcagaaaataaccactatcttgaaaggatattagagagcctcatattattaatgtatagaaactaaatactaa

SEQ ID NO: 4091 - DNA, 2664 bp, Cannabis sativa
acaatatgtttgttaacgtgtgaaaaatgactattttgtttacttttcttacatatttttgctgttttttcgtccatatttaattttctccttatgaattttcagagtggtgtgaagggcaggttactgagtatcttgttgcaacgtttggtgattatttcaatgatgtgaaattgtaagttcttttctttctttctttctttccctctggaactggtaatgattctgttgtttttgacacatgcctctctaatcaagctttatgtttgtttaaggtacgttgaagaaagatcttttagaagatttgttgaggcttgtctagaggaaactgtcgtggtttatgtcgatcatcttctaacacaggtatgatatatattacaaataaattatctggtaatttcctttgaataatacataatattcacaacaaattataatttttgttaccaagacttttttttacagattttcagtcacaaactttgttacctaatcatttgtttcctttaattgcagaggaaccattttaaggaagagaccattgaacgaatgagattagatgaggaggttctcatggacttcttcagggagtatataagtgtttctgtaagtgcaatctctatctttgactttggtgaaacactcgattttcttcatgttactgctgattatcgtcaccgataattgcttctaacctttccacattttggtttttttgacctggctgcagaaagttgaaaacagagtaagaatactgagtgatttaagagaacttgcttcagcagagagcctggatacgttcacgctcatttacacaaatattctcgaacatcaacctgactgcccggtaacttatctgattactaccagaaattgcattttgttctaagcattgctttcggtttttacctttgtttttaaccaacttgctgcctcaaatcatttattgataatttccgatacaactctattgcagcctgaggttgttgagaaactcgttgggctcagagaaggcataccgcgtaaggatgccaaagaggtacagtcacgactcccaattttcacttaattgttaagttaagcttgagccgaagtttgagattgtattttctgttttgttgaacaggttgtgcaagaatgcaaagagatttacgagaattctctcgttgataaaaatcctcctaaggcaggtttcgttttcccaagagtaaaatgcttaacagcttcgaagggatcgttatggcgaaagctgacatagttaaactgtgtggatggtttttcgatcagtagagagactctatgttttttttttttggtcatcaaaatcaagttcccattcatttgttataatatgctttacttttatttaggctataagtcaatttttctctggttgtacatccaattttatttaccttgggtttgttttgtaaattagatggagcttttagtgaagagatttttattttattttcaaatgaatttgaaattggttttgttaaaagccttttcttcctatgtgcaatctatctttgatattttatgaggaataaatatagtgttttttttctcttttggatagaatcacaccaagtatgtttttggttattaggtcccattttaattttaagatataataggaagtttcaagattatcagttacatttagatatagaaattaggcggttaatgtacgggaaatgtaaccattgctatctatttatgtctccatccttgtcccatctctatctaataactagtggattaggtgtaggagaatattcatcggttatggagaatctattaagtgttcattaaggtaaaatgaaaaagaaaaaaagtaataatttaaaataattgaaataaatctaataaattaaaaagtaaataaagatgaaactaagaatctagaagaaaatatttttacacttgtaattcacaatcatcaattcattactgtcattagattttcataatttaagcatatgatatacaatttctattatagatgattatcaaaataatcttaattattaatgatatatatactatatacgttaaaaataaaaaataaattatatatatctatatcggggtcaaatatagtacgagtagtattattcccgtctctgtcccatcctcgctttgggtattgaaattattttccgccagtaccaccgtcccattaaccgccaagacgagaaattcccaccccattaggggtggaatcttgcagttaaccattcctgcagtattaattttatctttagttatattttgagtaaatgtttatttaactaaattgtggagaacaaaatttaaagatctagaaacctttgaagaaattgcattctaaaaacgagcttattaattttctatatgtgagaacaatattattacacttgcacgtatcaatattaaggtatagtgccttgtgaatgtacattgcaatgggatagcaatggagctcaatattatttaatatggcatgtagtaattaacacaatttaatatggagtcttaaatattataattttaaataaaacatgtgagacaaattataatgtgttgcttcaaagagttactatagagcactatagtgtgtaacactatttttgtattaattgtattttgaattaattattgcaatgccaagtagtgttg

SEQ ID NO: 4092 - DNA, 736 bp, Cannabis sativa
tggattttttaaatgttggttttagatcgatacctcaacttgagggtactctatagagtcaaaattttaaattaagcaaaactcaaaccgacaccaaaagtatatctttttagtattaaacctctacattgcctctcaaattattattgttccttgatacattcagccctcacctcctacttcctctctgtctatgccttccatctcacgagtctagtcaaagcttccatactggctatttctagtcatcccgatccaattccttctagtcaggcagctagtgttcctaagtagaaaatgatatgcaagctaagctctcttctcttgaacagaacaatgcacattctattatgagtttacccctagtaaacatgttttgggatgacaataagtatataaaatcaagtattatatattcagatggctcttctagtgaaaggtattattctagattggtagctaagggtcacactcaactagagggcatcagctacaatgaagcttttacattagtggtaaaattagtcactatcaaagtggtcctagctctagctgcaaaaaaaaaatggcttcttcatcatctagatgttaataatacctttctcatagaaatttttataaggaagagtttctgactctacatcaaggttatagtcttaccacaatatctaattacaaatctctatacggcttaaagcaagcctctaagaaatggttagctaagttttctagtgca

SEQ ID NO: 4093 - DNA, 1261 bp, Cannabis sativa
agtattgtcttttagcacttaattaatcaattaaacacttttaaccttacaaaatgatacaattgataataaattacttcaattacacaatatttatatatgtataattatagggaaaaacaaaaagggggactatatgcatcaatataaacacattcataattcatattgcttttgcttcattaagacttacaaaacactaaacaactctaccaaaaactgccataaccttactataagagagaaatagccagaaaaaaaaaaagaagaaaaaaaggatttaaacattccccttcacactgcaaaaggttttcatataccggccacccgaaaatgacaccaccacccctacctaacaaaaatttaactctacatcatcgtacaagttcacatcagtaatttaacaaggagtatttcactctcaatataattttacctttctccacacccagctttcccccggtaaccatccaatgccccggatggtcttggggtcccttgctcatctcggacatatcaacgaatttcgccaacttattaccaccggagtgttctcttgaagaatctgaacttgagtctccagaattagagttacctttcgcggttgatactttttttgatttttcatttgggatatgatcccataacgatcttcgtatggtacagcctggaagtctagaatacaacagtttcatgtacaagacatttcttgatccgaaatcccagacaccaagttgtgctccagtgactatgtagactccagagaggtcgccgatgtaggtttcagggttctcgataggtgcagtgctcacatgggagaagtttttccacttgactggctcaaaccatcggctatcttgttcctcgggtccctgccatttaggagcaccgattgccacatgggtatcccagtaaggttgaaggatctttggaagagaggctaagtgttgaacatgaatacacagccgattctgcttaactccctccagacacagccgcaagcctgttactggctttcgcccaactgatacctgcaataaaatttcaaggtctgagtcataagagcttcctttactgtgcgggaattggattatgactcaatcagattattagaatgacagatacgatactaggactcgagtaatgaattgtttttcacttgaagttttccttcgtctatttgggttttctagtttcattcaagtatatcaaggaaacattaacccattatgaccaaaaggaaaaccgagttccgaattat

SEQ ID NO: 4094 - DNA, 1689 bp, Cannabis sativa
tatttataactcgcagactgcacaatcttcagagagacaaggaaatgcaaactattgtttcacgtattgacgagaaaccatttcgcatcagaaatcttaatactgcacagcgaggcatcaacgttgctatatgtaaaaaggtgttaatgagacgtgtttgatgttaggacacttagcgtataatatatattatagtaactaagtataacagtatgaaggacatgaataacgattggcgagacatctatatcactataggaagacatattattggtaccttcactaatcacctctagatatctttcaatgagatccacagctacgtcgcgtcaactctctcagaaagaagctgacattcaaatgaagttagttttcggagttcacattgtcaccaagaactgcaattgtcagatggagcgttatgtcttcaatcgcagagctgacgggatttacattatcaatctcggaaagacatgggaaaagcttcaactcgctgccagggttatttttgctattcaagtttctagcgagatgccccagcgagataaacattgcagcgtatctaaatccacatcaatattgatccattaaaagcggttaaatcacagttgtataattttcaaatcataactgcatttaatgtacgtggagtgtaattaaggcccacgattttagggaaatattattgtgggattcatatcataatgtaattaattgccaccctaggttactataaataggggcagaatgtacagaaaaggggacgaaaaattcttgagagaaaaaaccctagtttgtatcagaataatttgaacatgattgactcgtggactatgcagagttaactgcaaaaccacacaaaaacttggtgttgtttttgctttattattcttttttagattttaactaatttctgtgtttatcctatcacgaaataggcttattaccgttaacaaaaatctgcgttaatagtttggttctttcattgagagcttacatgaaaaaaaagctcagaaaaaatccatcctgaccaaaagaaaaacttttctccatggctaacaacggggaaaatgacaatattcaacttggagaaactactcactgtcctggaaaagagtcggcgggctcacgaaggcctcccaactcacgaacaacacgatcgacacgttcaaggagtaaccaacctgaaggcggccaaaacctagaaactacaaggaaacactcctagaagtgggggtttttatgtgcccaacaggtatgttccgttagttgagttggaaaactgccaactcaagtgacaattggaggaggcaaactgaagaaacactgagttggagcaagaggcagccgcagccagggcagcttaggaaaatgacgctcaaaaccaacttactcctaaggttcgaggccacgaggcaaacctcgcagcaacttgaaccacgagccaggatacaacaaagggggaccctcaaaacgctcagtaagaataacctggggagactaaggatgcccctcactactataaaattgggctttagaagcagtttttaagggcttttagcgttagttttggtaaaattcgctaccgactctgttccaggttacgttgtagggtttataacaatcgacgctatatggtccctatggcgtcagttttttcatagcaaccgacgccataaggtcttggta

SEQ ID NO: 4095 - DNA, 1463 bp, Cannabis sativa
aaaaagcctctccaatcatctctttcatccaacacaaccacatctgtcacttctggtgcctcatcatctaaagcagcctttcaatgtcagcaatctagttctaatgtacctttttctactttccatctttggcataatcgattaggtcatccttccaagcatattgttcaatcgattatgaccaaatgtaatatctcttccattaataaaaatgcatttgaattgtgtacagcctgctgccttggcaaacaccataaattaccttatccaaattcacaaactgtttacacagctcctttacaaatgctacacacagacctatggggccctgcccctatggtctcttctaatggatatagatattatataagcttcgttgatgcttatactaggtacacttggctatatcttcttagaactaaagatgaggctttacctacattcattaagtttaagactcaaatcgagttgcaacttaatttaccaataaaagctttacaatccgattggggaggggaatttagagcattcacttcacttgttgagtcttgtggtattgtccatagagtatcttgccctcattctcatgaacaaaatggtgttatagaacgcaaacataggcacattgttgaatcaggtctaactttgttagctcatgcgtctatgcctctcaagtattgggatgaggcttatagaacctctgtttatctaataaacagaatgccaaccaaagttctcaacaatctcacccctcataaaaccttgtttcataccaaacctgactattctgctctaaagaccttcggctgtcaatgtttccccaatctgagaccttataatcgacacaagatgtcctacaggtctacatcctgcacatttattggctatagtctcactcaaaaaggctataagtgtcttgccaatgatggtagaatatacatgtctcgtgatgtgttgtttaatgaaactgtatttccattccagcatataatcacttcacctgctgctatgtctactgctgctccaactccttcattacctactgccactcctcccaccctttctaccatccacattccaccatcatcatccatttcatcatccgctggttctacaccagcaacatccactccttcatgtcatccttttccatcttctaccactcaacaaaatcctctcacctcacctgctcctaccttaaacactgcccccacacctataatcaaccaacaccctatgcaaactcgagccaaagctggaattcgcaagcctaaagtgcttactgcttcactaataccagctactgtaaagacagctattcaagatcctaagtggaacaatgcaatggggactgaatattatgctttaaagaaaaataacacttggatattggtcaggttaccacctggtaggcagtgtataggatgcaaatggatctttcgaatcaaagaaaatgaagatgg

SEQ ID NO: 4096 - DNA, 927 bp, Cannabis sativa
ttgggctagacttcatttccctttgttgggctcatcttttaggcccttggtgagcatattctctttcttggccttggatagggtcaagttgtagcagtgacgggcagactatttgtcttctctaacacatgccactccatgtcttgttagaaatttgaggcgcaggtggtagacgtatgtgaccgccttcaggtcattgagagttggttggcctatcatagcattgaaggttgatggaatgtcgattatgacaactgcgccattagaaattcggtggttggattttctccagctgtgaggggtaatctgctatacctggtagatgtgataccttggtcaaagaagccatacatcatttggttgtagggcgccaggttagtgagctagacctccatctttttatatgttgaattgaaaagaatgttggaggaggctccattgtccaccatgcatcttgctacggtcgtgttcccaatttttgcagtaatgaacaaggtgtcattgtgtgggaaactgaccttagccgcgtctttttctgtgaaggagatcgtgggctatataagctttggttgcttagatccctatcttcaatagctaggatattgcttttaggctcgtgacggagtgtttgagcatagcgctccatagctttgctggtctcacctgtaatgtggggtccgcgaatgatgacccctaggtgtcctacaactagtgatggcattggatctctgttctgggcatcttgtgcctgagtttggtcattctacagataacaacgcaggtggagattgttacaccttatgagctattcaatctctctctttagattctgacactcattggtgtcatggccgaagtcattgtgatatcggtaaaactttgacatgtcccccttattcttctcccttttaataggaaagggttttc

SEQ ID NO: 4097 - DNA, 1318 bp, Cannabis sativa
tctctctctctctctctcctgtggcattctctctcttttttgtctaacacgcccacacctattcaaggtgtgtgtgacatcaaaatcctaatctcgttacagtatctcatgagttgactatacactgtaatacctaaatctgttcatccaataagatctaatagcccactctattcctgaatattaaggttggcttggaagatcaagctgtagattcttcaacgaagttcttggattggatgttcgattgttatactaaaagaatgtcctgataggcttcaagaggtaatcgattttctttcagtagtttagatttaatctatatacattatgtcaagatcattgggcttatagttcatattataaaataaaaattatcaaaattatgcttccactattataactctgatatggactataaaagccaacaacgtctgcttggcttgctcaccatacttgtaacttgaaattgccaaagtgaattacgctacacacttgggggcaccaaaaaaagagagggaaatttttcaaatcgacaaggactagctacccttggttgacaagagaaatgcacctactttaccaaacaaaagttacttagccaaaagaggtcttgaaagacactcatggcctaacgctgaaacgagagggacgcctcttgggcataagcaaacacttccaaatcaagagggtgactaagtcaagtacaataagttccctcacattcgagtggaaggatgaataaataataagaggatgagaccgctcaaagaataatactcccttaattgaaaacctgcttaccacagcagagaaagtcacttggccaaagagtaaccctcacaatcacttggccaacatcagttacaaaagtaacttggccaaagggtaacccttagagtcactcgactaacattagttacaaaagtcacttatccaaaagagtaaccctttgagtcactcggccaacatctgttacaaaagtcacttggccaaagagtaacccttagagtcactcagtcaacatcagttacaaaagtcacttggccaaagggtaaccctccgagtcactcgactaacatcaattacgaaagtcacttggctaaagagtaaccctcagagtcactcggccaatatcggttaaaactatcactcggctgcattgtggctaaggtcattcgacaacaaaaaaatatttagaaaaaagagttagacacagtgaggataattttacactacaccaaggtgttgctatgaagtaaaattcaaggaagggaagcctcctatatatagtgggaactgttggaattattttacc

SEQ ID NO: 4098 - DNA, 526 bp, Cannabis sativa
tgctactccacttaatctttggcaaaagataagatccaaagtaaaactttttaaaaaatacatagaatccaaactttgaaaatataggatccaaaaatatttttgagaacctaaaataaaaaatcacactttccattatctatttgtaaatataagacaaaaactcaaattctacacctaattaacaattaaaacaaatctcactaacttttggtcggtaatcagcctatatatattataataatgatttagtaataataatatactaattcattcattaattcctccaacctatactgtatctgaattctgaatatttcttcaaccaaactcagtctttctcatctcccaaaatcgcgctcccaatcccataaacgttatgaatatacaatttatatatgtatatacacatatcagtatatgaatcaaatcaagaaataagagattaaaaaataaatatatcaagaaaagttacaaaatgaatattattgctattgaaaagagaagtagaagcagtttttttttt

SEQ ID NO: 4099 - DNA, 2624 bp, Cannabis sativa
acagttgtacataatgatttttctaactaatatgtgctaactaactctctacttaacataccatttcctccaaacccaaaactgtatttagacataactccaaataaatagcttataatagaagagaatctaagatcaaaaggcaaaatataaattttatacaaattttcaaaacataaaaaatacaagatattattataatatatatttataaagattttttttctttaatgagagtagaaaaattatcaccctcccataaagataagtttatctttagtttaaaaccgtcattgaattttattggacacaggccctacctcggttcaacatagtttcgtcccttactgcagttgtgttgtggaaaaagttactgagtctttagtaaattataaaattaaagtttttactaaaacaatatgatttagtgttgtcaaattttaaaaaattaaaatatatgttttatttaattaaaatattaaagatactaaacatactaaaattatttcaatataaatattttattttaaattttagcccttaatccttacatagaaataaagttgaattgaaaggaaagaatcaaagtaacctaactctaccctcttctctttgaattttgtttaaaaaaacttagaattttgtgttttgatgaattaggttcagtagtgtttgattgggtttagaattacttgttaactatttgttgttgagttttatgctgaattgtgaaggattttgctactgtagctagtgttgggtgagtttgagtttttgaacataaatctcactcaacaatggtgaattgtgattcttagcataattgtggattgttttggaaattttggtaggttttgagaaagttttggggtaggtttgaagtgtaaaatctcaaaactctgttaggaagcggttaaccgtttttgtagaaacggtagactgtttcctcagttatccagttacccgtttgggggatctggttaattgtttagggtgtttctcgagtgccaagatttttcgtgttttctcgatatttatggtatttctacgctatttattgatagggaagcctctagtttgagtttaagttttagaacagattaaaacgagttatttaccaatttacaactgttgtgacataggtccttgaatcgtcatgcattttccacacaggttgactgacacacctaaatttggacacgaggtaagaaaaatacaattgtactgcatagcatgtcaaaatgtgatacaataattaccttttataacatatagtacaattgtaccgcataacatgtcaaaatgtgatattataattaccgtttataacatatagttattactctattttgaaactattgttaagtttctatatatatatatatatatatcgattgtctcattatgcaatggtattgacattagttgtctcaataggcaatgatatttaaaaggttgtctcattaggtaacaatatttaaaaggttgtctcattagacaacgaaaaatatgattaccttattaagtaatggtatcaatttgtcttattaggaaaatatcggatgttaataattgtttgtattgtatgatgaaattttctatttatggattaagtatgtgattacttggttatgagtatatttgtgtattactgtgtaatattttgttattacttttctacttgagtctttgtgactcacgtgtgctctgcggtgcatgtaaggaaaatgacaagataggacaaccatgagttagaagtctttcctgacaaatgtacatatcggctcatccggagagcaatgtcgagtttttgggattttatttatggcgcttttgacttatgtatattttgatatagtactatttggctatcttttgaaagaaaaattagaaggtaatctccaaccttaaatagtttataatgccaaaataattttatatttcaattaattagtaaagtctttaattagatcatacattttattaaaccattagtttattattataaactaacttttaaaatcacacatgtagcgtccttaagggatagggctctacaacttggtatcagagcgaccacaattttaaaggtcctaaagactggcaagatatgtaatttttttgtgaagacaattttgactcatagtatagtaagtgttattttttatttgtttatttgctcatttgtttattatatgataatttgaaatatgtattattagaaaaatatgataggagtttgtgtattagtgatgtagtatctatttatgtgtgaaaagacttattagcattgttatttggttggaacttctaaattattgtaagttggtggtcacatgtgtattgggcaatgcatttgaggcgatccaacagacttagtcacgagttgtctgggctcgggggtggcggtgaggatgtgaatcctccactatttcagaattgggaatagatgtatgttgtcatgcaagaaacaatctagcagcaaggtgatcaaactagagaactgagggagcaacaagctcgatcttctcatgttcctattccttctacacctttggttgtgccacaagacgtgggaaattgtttggaactgttgtaagaatggttcaggaagcagaatactc

SEQ ID NO: 4100 - DNA, 1963 bp, Cannabis sativa
gaattaaaagattttggtgtatcatatcaccttttagcatgtcatgtcatcttattttagaatggacactctaatatatagtcattttgttttgtagtggacgtcaggtgtggattaaaaatctacgaattctttcctagagacttcaaaaataattatttattatcgtttatgactattataattttttattactattcttcattcaaggtcgtcttgacttaaactgcattgtacagccaggctatgctgcataatagtaatgactaaatgatctagttgtctggatgactctattacaagtcataaacaaaagttttatccaaatagtttgtggaatatgtacactatctagagcatcggaaataacataaccattgcattcttgatatttcttggcttttgtttaaagatagtagttgttgaagaataaagtaaatttccacgcaacatgtggtgtaactatcaagaaacccaacaacttttgttttgagtttaggaccttaggtcgttgactttacttagtgccaaaacggtaccctaaaaccaagaatttcatgaaagctaagctttgaatataaaattaggaaactaacacaaattacttaaaatacaaactttttttttaagatttcttttacagttgtacaaactgatattttaagaggaaaaataatgttatttttgttttgctacaatataacacttgttgactcagaaatttagattagacttattggccaaaatgaataagtagttaataattataagagaggcacagtaaatttattgtagttcactttctttatcgcgatagtaatagaactacgcttacttcgagtttttatttctcacgagatggtattacagaaaaagactaagtattagaagctccaatttctaaagagagaatatagagaaaagttctaaccttgtgggaagtttcccgaacttaaaaaataaggtaagcgaagtctctttttataggtgaacgaggctcacaaaaatagaaaaaatacaaattggatatttttgaccattgatgatgatctattggcaaaaattagctcttgatggtgatagcttttttttcggagcatggggagcccgctgcagataacgtggagcttattttcataactcctttggggtgaaatttgacgatgatagcttcagaattacgattgaagggtgagacatgaattggtagagcatttaattagcttcgaaattcaagttgaatcgcaccagcgagatcaatattgaggagttatgattgttttattgaaggcagtacattacccaacacccaggttaacatcctagcgcctaggttgaaatatgacgtcaacctagacactgggtaagtgtaaaaacatccaagggatgtactttaagatgctcaactgatattttcacatcacatggcatgtttctatgttctggcaaagctagtcaccagttctcggagatgttgttcttttgcagaaatgagagactcaagactctttattttcgagtgaattttctatgttggaaatgaaaaatgcaaagttgtgaatttgacttctctgacatcaagcatctcagttattctgaaaaataggcaaacggttgaaacaaaatcatattcgaataagtagaacctagcgtgccatgccatttgtcaacctgggcactgggcaccctattcttgagcttccgagatctcgttttcttatttccaaggttcgtgaaactgaggacgagatctcctaacccacttttaccattctggattcatttgtcgaattagatttggcattttagcaatcgaaagtagtgcactaggttcattatcaacttgggcgctgggcccagcactaggttaacttgggccttgggtcctatttttaggggctcaggtttgtggttttctttccaagtttgcttgaatcttctttattttttataacaaaaaaaa

SEQ ID NO: 4101 - DNA, 965 bp, Cannabis sativa
taaatattcctctaatattgtatttaaataataatgtactgtgttaaagtcaaaatcagatttcaaacctcttataattgttcaaagtgactccacctcattatgaacccatatatatatatatcatcaagtccagtcttatatatctatacttgtgaacaggtcgttaattgagcctacagtactcactcttggagatttataaaagaagcaagtctttctcaaatgctgcttatataagcatgttatatatatatatatatatacattaagtaactaagaaaagcaaatcaagtgctatgcattggggtgtaagaacctgcaaattaagctgcttggacatttagtcatcttttcttacagtaaataatatcaatacttgaattgtgtgaggccgagtaaatttgaaaaattaatggtgtgtatgaaaaaggcattattcacgagaacatctgagtcaaaacttgatgaccatatatatatatatatatatattcttttcctatgttatgttttgccgagtcaagacacatcaatttctctcaacacaaagctcagtactggcaatcgctctctagctatcttatcatatcataaatcattgatcaattttaacaaatttctatggagcccctcaaattttgatagacacttagtacggcacaactgaatatctctgatggttcttagcttcaaaacgtttgctgacctatccgacggctgaagatcgattaacgataaaaccagatgtcgatgccggacgtaggtagctagattttcaacaacattccacacagtacaatcttaaagtatgattcgaagacttcggggtcaacttggggaggatggggttggggtggtcccttaatgaccttgaccctaacccagatctccccccaaatattatattattcaatagatagttagtcttagagatatataactacctacttatataaatatat

SEQ ID NO: 4102 - DNA, 592 bp, Cannabis sativa
acaattgtaaaatctcaatcaaaacgccataatatgtgatatactcattgtcatgatcaccttcagtacaaaccccagaacactgtgtttgaagagtgtcatcacgctttttacatcaaaatcgaacaccattcacaatacaactttgataactattgtatcgttcaattggaccttgagatatagagtataaatcatcattgacaaggggtaatttttgtactcgcatttgagaaatctacataatggaagaaaataagtgaagaaacaatgacgtgtaacaagaaataaataagaaatcatcaatgataatctctcacctttgttttaaaccaagacaagaattcttctttttggtgatttgcaatttctgattctgaaaggcctctttgttctaacaattttttgtgttcactacatatcagattaataattatcaatgagtgaagtttatattattagatttaagaagaataagaattatatagattattactcacttaagataatcttgaatatcatcgatagaattattcaatatataccattgaatgaactttctccaattttgtaacaacttgacagatgatgc

SEQ ID NO: 4103 - DNA, 1980 bp, Cannabis sativa
caacactaagcaacaatacaacatggtgctggaatctatgttggagcaagaaatgactccatatttttttaaaaaaaaaacatgagtgaaaataatattaaagttgaaacttactttgctactctgaactagtaagatgatctattaataattttttttaaatataagtcttttgtaattttgtttcattcattatgaataggtgcacatcccaacatcttcactgttactatacaccatggaggaaactggtttactctatctggaaacaataaatatgaaggtggtgaagttggacattttgattgggttcactttaattatttcactaaaaaagaattagatggaatggtgatagacttgggatataaactccctgttggctttctatacaaaccaataggcaagacacttaatatgggtttcatggtggtggtggataaggatatcaagatgattattgaagatattgagagcaatagggctacagaaattcatgtatatcttgtctttcctaaggtagtacatgctttgggttggaaggaagattcagaagttgttaatcatgtcccttctaaggctttacctcctttaaaaggatgtgttattgaggaactacctgacgattatgatgtccctgtggatgtttttggtatctcaattattaatattgaagaagatcatgaagaacgagaagttataatgctttgtgattcaaatcacggtactgttgatgtggggatggaagaagcaaatgaggtgaggaatcatgattttgaggaaaatctaggagaagctgaagaggtgaggatgaacaagaaaggtaaaagaaaggtggttgaagaagattttattttggaggaggaggaatttatacaagatgttgaagctgagaaagaaatgggtacaaaggctgaccccaagaggtggtggggttcaattgcaaatttttgtgctaatactgcaggtgatggagactctgatggtatttgttctgaggatgacctacgagaattgaactctgatgacgaagatggaatttgtaaaagttctatagaattcaacccaaaaaccaatattaagaactttaattttgaacttcacatggagtttgcaactgttacacttttgagggatactataagggagtacttcattgtgaatgatatggaatttgtcttcattgcaaatgactcaaacagagtaagggttaaatgcaaggccccaggttgtaagtggatgttgtttgcttcactgatcaacaaaatcgaaggcaagacaatgaaggtgaaaaaacttgagaatgagcacacttgtggcatggttttcaacaataaaaaagtgaactccgcttggattgtaaagcattttcttgatgaatttagacttgatccgaacatgcaatattctacatttagggagagggtttcaaagaccaaattctcacgtggattttctttttatagagccaagaggagggctatggcgatgttgcttggatctgttaacgaacaatatgccattcttgatgattactgtaagaaattgctagaaactaatccgggatccactgtgaaattgaagactaaaatggttaatgggagaagaatatttcaatgaatttacatttgtttgaaggcatgtaaagatgggtggttaggtggttgtagacctctaattgggcttgatggctgctttttgaaaggttatggtagaggaattctattggctgcaataggaatcgatgggaataactccatgtttcccattgcatattctgttgtagagaaggagaacactgaaatttggacttggttcttggaattgttgcacgatgaccttgagaatatgaatcctatcaagataacaatgatgagtgaccgtcaaaaaggtcttgaaaaagcagtggcagctatcttcataggatgtgaggtcagattttgtgttagacatcttcatgctaactttaaaaaggaatat

SEQ ID NO: 4104 - DNA, 916 bp, Cannabis sativa
agtcaaagactcactctatatccagcttgttgcttgacacgggacagaggatgtggaaattcactagttggcctgatgggaattagaacatgtacatcgcatattataatctctattcactatatagagtcaccagattgagctaaaaatggactattaaaaaaattttatctgcaaaagctagataatacaaacttaataagatcccattaatgaaataagacttacgtccagggcattgtgaaaaatatatgaatcggtatttttagtgcttcagccacatgtgtatgccctaaagaaacatttattaaacattagtatcttgagaaacataaacaaagaactctaaaaatggctctttatagaacaacttaatactatatagaaaataaataacagaataaacatataaatcagtaaataaaaagtttaatttgaccatttcacaagttgcagtcacaaagggaaaaaaaaaattaacaataccaaatggatacaaatatagtatccgaatatggtttcttttgttctaatcacttctgtagtatctcattaaacttgcagaatcgtgatttgaccaaaatatttgattaacctcctcccatctagcatattgaaattttttgaacagaattggcaataaagataaacacctaatagaacagtccgataaaattattttttttaaaaaaaaaaaaaagttattaattggagagagacttacaaaaaccatttcctgttagttcctgtttgaaaggttaaaacaacatagttttctctcttttttgttttcttaaacaaagtttttattatttgactgttgcggatctgttattttttcacaacaataggatgtaccacaatagcatagtaagcaatagaaagtccctcgctagctttaccaagtacaagtcct

SEQ ID NO: 4105 - DNA, 1316 bp, Cannabis sativa
actaatttataaaatcacacacgttacactgaatgatcgagatatctagttatcacggtcacttgattgtgtgggttggatgatgtatatgcttatctcgaatagtaaaatttgttaggtttgagtcgatcaatgttaatttgaatatctcagttttgggtcgtttcaatacgtaaattgtccgatgtatattcataacttggttgccaagtatggcacacttaagctgggttacgtctcttttctcaaatttgttgtggtttggcttatgttttggttcttttatgaatttatcttggatgctgccatccgtggtattaaacacttaagagcccaatgctttatttaatttcgtcagttattgcacaatagattttcatttttctttttaataaaatgggatttgtcctcattaagcccatgggacagtttctccctcaacattactctcctaattattctcttctgagtgataactcgaaacaaaaatttaatttactttacgagtcttcacagttgctaatgtacacgtgtgtttagtattcaatgggaatctatttttctttctagattcttgagttttgtcaatggttttgtcccttatcatcatttgaatttcaaaatccttctgtcatttgcatttttgggaacatgaaatgtgtaaggtttaacattgtgaccgctgaactttattatgagaattagcatataattatagcttattttcagaaagtaggcttttagttattattttacaattataaagatttatttaaattctaagtgtattaattatgatacatgtaaaattttatatttttcataatttatatcggtaatagtgtaacacaatgtttagcctatatagtcacttagatatggtttagtacgtacttttgagctactggggtaatataattagatatttagaatgtcaagaatttttggggttgtagtttaagaccattttacttagattgtttagattacttaatgtgtaggcaaaaagggtaaattgtctttttaccttagtggactttctatagtaaactaagttaattaagtttaatttttgtttagctaaatttaattaattaacctattttattttagtcaaaaggaaaaatcgagaaaaataattctctctcactctctctctttcttcttgctcggccacacccaagaactaaaaaacccaaatttctttaccattttcttagtaattcagaggggttttggttggagttcctagggttctagaagactatagctcaaggtaagcttgtttttcttttcctctttgattttttttttta

SEQ ID NO: 4106 - DNA, 1364 bp, Cannabis sativa
tggactcaaattcttcatttcaaactttttactcagcactgacttgactttgtctacttctgtcttctctgccactaacatgtcatccacataaagtaacaagtagacaattgactttacacatgcagccttgacatagaaacatcaatcatatgaacttcttttgaatccagatttgattacaaagaattaattaattagtaattgataattaattctcatgggaatgatattctacttcatcattatattacttgatttgattgtgtatacttacgtacttagtttattgaacaaggtctaaaaatgatgtttatttatagttttttctcgtatttctatgattcatgttagaatttaagattgcgtggtcgaagaaataagaatatatgagtgtatagtaaggtgcatgtatactatttacaagagatgtcatggattatgatgtaattgtatttattagtatcttaacacatctacaatttgaaaaccatgaaatatatggacgatcatgactaaatacaattgtactaatattcacataatgttatagttttgtttaaatgtatttctattaattgagaccattgtcttaaaaaataaaatacgattgttagaaaattaaatgtagttgcaagacaatgttaaagcattgtgcgatagcattccaccatgaaatactatagttgattaaacagctgatgttgcatggtttttagggttgttctttctcattctattcaattattgtgtcaaagtatattccattattttttgtgcattcccaccttttgggtgaggtgccatttattctagaatgtacctttgttgccctagtggctatataaagttaacaaagtattcatagctctttgagttgttattttcccaaaatctattccccttatttttttcaatttggtatcagagcaatctcggcagcatggccaccggaggagataaaacaccaggtcatgggtatagatcagcagctctatcaccaactggtagcaatgttgctaaccaaaatttcaaaaacgatgcttcatcctcgagtgttgttgttccacagtttgggagcacactgaatcaaccttttgcccttaaactggataagaacacttattccttgtggagacaaatggttatggccattgcaagagggcatagactcaatggctacttgatagggacaagagccaagccgcaagagtttatgctagtacctgatatagatggacaaccagggtttggttttgaaaccaatccagagtttgagtagtggattgtccatgaccgactcctcatgggttggttttatggatcgatgacagaaagcataactactgaggtcatgggatgtt

SEQ ID NO: 4107 - DNA, 1100 bp, Cannabis sativa
aatgcattgtagtggacagtaggtgagatagtattgaagaaaaatcacttttattagcaagattgtcattacacgaactgtctgaaatagcagtagcattacaaccagtttttgtattttgaacagatttatttataggacaaaaggaagaactagaggtaacaagattgcactcaagggagtgaggtgacaattgggagtgatcatctcctaactggtacaaatcattcttgagaatccctttgagtagaacaacacccatttgcttgtccttgacaaaacaacaagatttgtgaaattcaaggaaaacattgttatctctagttaatttaaaaacactaactaggttcttggtaatggaagggacatgtaaaatagatttaagtttgagaggagtggaatttaaagaagggagagtagtggaacctatatgagagatgagaaatttcttaccatcccctacagcaaccgattcttgaccattgtaaggagtgacagaatcaatgttatccataacaaatgcaacatgattagttgcacctgtgtccacataccagccaaggtcatcaccaaaatcaggaagagttcgagtgagatgcacttgagaatcaacaccactgccttgttcagtgagatgaatttgagaatgagtggctggtggctttggggttacccaatttctatcaaatcggtagtgacaaatggctgcagtgtgtccatatttaagacatagatggcacaaaggtctgtttgtagatgggggccgatgatgattgcgaggaggcaatcttgattgaatttcattagtattggttctgccagtaccaaaagggtgaagatatggaccagttcttgaaccaaaagttaagttggcagccatttttgtggagagatccatcatggaggtatgtcgttctagtcgagtttcatgtgacatgagtagtgcttggacttcttctagtgtcaaagtgtcacttcgagaggttatacccgataccacaggatcaaactccggtcccaatccattgagcaaatgtagaatgatatcaagatcagtgagtgaatggccagcaatagctaatgaatcacaaattgacttg

SEQ ID NO: 4108 - DNA, 505 bp, Cannabis sativa
aatgcctaaaaagaaagaaattgcaaggtcgtacacattgaatttatggcaattggtcttgtttttaatatggctttacctaacaaagggtcttttctttttcaattccctcccacatgacctgttcttcttttcaattcaattaataataatttccaatttcatcttctgtccacctatctctacttttgatacaattcctgtatatgtatatataaagaattggccaatatgagaccagctaagcaagttgaataaggtcacctttcacaattaaatggcttaaaacactcaacaggagtagtaaatcttttaatatatatgcctccaattgtatatacaggtacaagatttatcacatgttgatccataatatggttagtttggagcattgtatatttaatttctccactctttttggtggtggtgtttacttattttctttaaaatgatatagtgccttatttattaagtaataagttaatggataaataagtatttaaat

SEQ ID NO: 4109 - DNA, 1217 bp, Cannabis sativa
aataaaatccaatagaaacatgagatcctaacagttttatgagccaacatatttgcagaacatttaacaaaaataataacgctcacatctttctgcttagctaaaagctgtttacaagcatgaacaatgagaccaaagccaaatatcatcttcattggattgcgaatagcttgaatagccactggttttgtttaatctagttggagcttcgttatagcaaaatgcttcaactacttctcgtgctaaaagctaagagttgtttacaagcatgaaacaaaactagatttcatctccattgaattgtgaataacttgaatagccacttgttttatttaattcagttaagagcttccttaaatgccaaaagtttcagcaactttcgtgacaaagtccccacaacatatgtggaccgtatctccatgatggacccttgccacataacccatcacatgctttcctattcctttaaacaaagtgtcatcgatattaatctcattaacctttgtgtaaatatatagatttaattattttaattgtattttaaattataacatatttaatcacatttttgttcggcactttcacttgggtaggcacctcaaccagtctacactacactgacgagatgatagtctgacacaaaggcagaaacatttacctaaatcaatgaatgaatagagtgaacaaaaaaaaaatccataaaaccaaaaaatgtagcatctttaacagcaatcatagtaatttatacccaacttaaataagcagtaggatcagagaaagagagtgagacagttatcttcatcaagaataacaatgaatatgaaatagcatcttcttacaattaaactaccaaataaggggactggaaaaggaagaacaaataatatgaacagtctatgcataattatgttaatatttttgtctgctgccggttttctcaagcatgagaccgatcacataaggtcatgcctagaatacagcgagtaatattctgatcactagtacctctagcttggaaaaagggtcttggcttctaaaatttgagccataaaatgaactcaaaacttggaactatattcctgcttagctagacatcattacatgttcaattgcttgaagagcttgattggcaaagaaacgaacatcgacatcagggtcctcactcagctcaaccagacatggacgaattgtcttctctacaacctgatatacagaaa

SEQ ID NO: 4110 - DNA, 717 bp, Cannabis sativa
acccattgtcccttttgtttgttttggaaatctaattatttcctccctttacttgttgttcaaaggaatattcatttattgaattttcgtggttaacacttgctcccagtctaaaaatgcacttttaagcggtctttttgactacagttgtcctctgggccctttgcggtgcacctcgtctggtagatcatctaacatgacgtgttgaaatatttaagagaacattcaatgaagtaggtgagtcacatattgcttctcatctgtccatgtgactaatcaccatccattgatcttacattgatccaatagttagtattttcttcttaaccctttaaataggcttccactcctccactttcatctatccctttctcattcttacttcccatcatttgccatccatctttgctttatatttcttccaatctcctcctacattccaagccatttaaagtttgtcttctcctcgagttctgacgtagcgagtcccttcttacacatgccaactttgtatagtaccttctccatttgtattatttttcttttatatttatacacccaccattcatgtcaatacacatcgtatttataataaccctcgttataggttttagtttgagtccccctactaatcatgtccattcatgcgctcctctcttttttttgtcaggtgactaggagtgggtcaaaggcgacccccttgtaatagagtcatag

SEQ ID NO: 4111 - DNA, 866 bp, Cannabis sativa
acgaagaccaaggtagacaacatatagtatactatgtaagcaaacgcttactcgatgacgagttccaacaagtttaaaatccatgcagctctaaggtttgaattgagtgcctccaataatgaagctgaatacgaagccctaatcgccagattaaaactcactctagagatgaaagttgagtacctcaaatcttttagcgattctccaatcgtaatttatcaagtcaatggaaaatatttggcttggggaggatgattggccaaatatctctcttaaacctctcagttgctgtctaaattttaaaaaattattattagtagaatacctcgtgcttataactctcatgcaaatgccttggcctgactggcctcaaccagagaagcagaattactcgatgtaattcctataaatgtattagtccatccaacaattgatcgcgaagaagttatggaaattgatgttattgaacaaaccacttggatggcccccatcattacttacttgaaaattggtaaactccagggcgataagctcaaagctaaaagattacgttatcgagctgcttgatacgtgatctatgatgataagttgtatcgcgggagtttcggtcagcctctcctcaagtgtatggatggggatgaatgcaaatatatcctcctagaagtacatggaggcatgtatggtaaccataccagcaaaaattcgtcggccctaaatattattcgacaaggttatttattggccaactttacgagcagatgcaatcaatttgtaacaaatgctagcgaattgctacatatatgaataggccaccaagctatttaaattctataaccagtccgtggccattcgtgatatggggtgta

SEQ ID NO: 4112 - DNA, 700 bp, Cannabis sativa
tgtttactttggatggttttccttttaataatattaatatttggtcatcactaataagtagctaggcgacgaatactgacactgtgactgagtcaacaatacgcagtagtacgtacattatacgtacatattattgaagcttattagctaactaatcatatatgtttcaattatatgcaaatttcaactttgaatggttgttaataacttataaattaatattctttaacaagcaggattatattgatttaattatatctatgtaagtgatgatatattattacaattaattttcattgattaataatttgaataattaattataatgtaaaaatatttgtatttgatttaaggttgggaggcgaacatggacagacaacgacgtggagtaagtatgggagctccaatgactccgccagccatgacaagataaattaaaactgtccctttcactcgaattatttatataaggtctttgatcagttttctgaagttgatatattatcgattcccaaagttttaattagacaactataagtatcaagccataattatatatatgatagatttttgattattgaaatctataagaaaacgtagttcaaattcacagttgaactggattagctagtggtgttcacagcttaggaataagccccggccgtcttggttatttgcttatctttttgttgttgttgtt

SEQ ID NO: 4113 - DNA, 859 bp, Cannabis sativa
ggccaaatatatgaggggtaaaaaaattttccagtgttctttcaggagctcagattcttggttttgggagaatgtggtgcagactaaagatattttgagaaaaggagcttgcaggcttatttcgaatggaaaagatacaagtatctgggatgacccttgaataatccatagccgggattttgtccctaagactattactcagcctctggggggcttgaggcttgttacggacttactcttaccaaatggggattgggatctttccaagctctcaaacctctttgaccaggaaataattagaaacattatcaaaggtggtaagccgagtggccaggagtgtgataaatggatttggaccaaagaatcaaatgggttattttctaccaagtctgcttatcttatccaagctctcgaccgtgctcccttgtgctctgttgccccgacactttagaataaactttggagctctaaaatcttggagcgacataaagctctttggtggagtattctttctaatgctctacatatccgtgcttcacttgcgatgagaatggctattgaggaagtctcgtgccccatgtgtggggagggtgaggagacgatggagcatcttttcctctattgtaactttgcttttcatctctggcgttcgtctccttgggagattatgccgatcttgaattttggtgcccgtgtttgggactcggttcagttcctttagaatcttcgatttaaaggggtggacactgacaagcttttcctttatgcttcaattgttgttgatacaatctggagagctcgcaatgataaggttcacaacaatggtctgggtagcattgattctatctcttcttgttac

SEQ ID NO: 4114 - DNA, 1900 bp, Cannabis sativa
cttgttgttgctttatcaacaactgaatcagaatatgttgtagttattgaggccataaaaaaataaatttggatcaagggtatgatggcataactgaagctatcaaatcgagctccaagagtctactcagatagccaaaattgcatacacttatgtaaaaatcatgtgtttcatgataggaccaagcatgttgaaataaagtatcatttcatttgggacaaaatgatacaaaagagattcacatcaagaaggtgccaatagaggagaaccctgttgatatgaggacaaagattttgaacctaaataagtttaatcattgcttgaaactattaggactaagcaatggaggatagaccattgctaaaagagttaggacccataggaataaacttgcagtgatgacttaaacttctaagagaatttaggtgaaaattattggattaaattcccttacaagctttatacacatgttgacttatgaagctagatacatcttatttagtgttagttatatttgtttgtaacaaaacaattataaccaacttaaccgacttcatcatttagagagaagagttctcaaagtgtgggagaaacaaaagagagtttgagagaatagaggaaagttgtaaagaaagattaagagaagaagattgacatcaagaagattactcattaatctgtgtgacatggaatcttcaacaccattgatgtaattcaagactgattatagtgcaagagcagatcaattcctatagtgaactcaatggggaaataactctaagttttagggtgaactttggggaaaatctttgtgtttgatctcttactttattatttttttttctttttttcctgcaattattgtgtttgttcatgtttgaattgttgatcctattccatttgtatgcaaaatgaattatcgaaagttgttcaattcagtttgtatttataggttagaattcgaatgtgtatgtgagcaattatatatgtcatgattgataattgtttgatgctaagatcatataatctaatctgtatattgagttgatatagggattgagtccacaaatccgaacaaaatgtaatattcttcaactaaattaaataatattaatattttattagtaacaaataattttgtagcataatattttattttatcaactaaacattatattatagattactataataaatatttcgttggtgtaccttcatttgtcacgttttccatattccatcaacaaagtccatggtttaacataattaagctattccattactacaaaaaaaaatatatatagtacaattgatcaactcatcaacttgatcaaaattagttgcactaatatattaattaatcttcatgttatattttaatgtcctaatatatatgtgatcattgatatatatatatatacaaataaaatagtcataattcccattttcaaacctattaattgaatgtatatattaattctacacagaccaagtaagctcatctgttcatgcaatagttaactatacaaattataagagtttactatatgtaatataagtacgtaataataaagccaatcgaatgttaaaataatgtaactgaaaaacagacgcctttccacccataattattaactaaaaaataaataaaataaaatagtcacaaccaattaataattattaatattaactacattaataaatattcctttcaaagagaataaaataaaataaatgctacaacatgtatagaattaattaaatattaaaccataaacctacccaataaacatatataacacctaactagaggcaaatatgctattatatatacaaatatttatattcactacttgccacttcctataacttgtaataatatctattaggttaaaacatt

SEQ ID NO: 4115 - DNA, 2567 bp, Cannabis sativa
tccaatgctcctacctcacttgtcctctgaagactgcactgttgatggatacgacgttccacgtgaaactattgtatttgttaatgtttgggctattcacagagaccctacactatggaaagaccccgaaagcttttacccagagaggtttgagagtagagaagatcaaattaataatgttaacttgcttatgccgtttggactcggaaggagatcttgccctggcaatggtatggccctacgagtaattggtttaactttgggaactttgattcagtgctttgagtgggaaaaggttagcgataaaaatattgacatgaccgagggaagaggtattactatgataaaacttgtgcctctacaagtgttgtgcaaagcacgtccaatcatgaactcagttctctcacaatgatgttagagaataatatgcatatatatatatatattaataagctttagtttttattgtgcaagtgtgtcccgctatatattagtaatcataaaagaataaaagaggattttggttgtcttccaaaatattacctctatcaaatcgaccttttttgagattttacattaataaaaagtttattcggaacaaattagaattattaagttatcagactcctattaattttttttttatatagtagctaacataagatgtggcaatgtcacatcaatagtgtatgtacatatattattttagaattccctaaaaacacaacctttcagagtaaaaagctctaaagaaaggagacaggaacaagaaatttattcatcctaaaaactttcgccaaaatcaaattttgaagagaatcaagatagctaggtcagaaatagaactaactaattgatgaagcaatgtcatatttagctaagttgtaagctacaacattaataaatctagagcaatcataaagactaacatgcttgagacttgaaagactaagaacaatatcttacagtataaccaggagaatattgaccatggaaatatgattattaatcttttgcattatgctcaaataatctaattcgaacttaagattatcaaacccaaagatacaacattgatttacagtgtttcttaaagccaaagcctcgataacctcagcctcaaaccagtcagcaaaacaccaagccacgaatgccataacgacgccatatgagaatcacgagcgaccatcccaaatatacacctatttttattgtccaggcctgcatcaatgttaagtttgatgaaaccggtaagtggcagaagtcatcgcaatgcaaatggcactaaaacattctagtgcaaatcagtcgtccacttgaaggcataccatgttgaaggtccccaaggaacatgcatgcttaattaaccactaatgtcacttgagtatccatattattatgcaccgttgtattctttttgtatcaaatatgccacaaaattacaagcacacaatctctatttagctgattgataagtgatcaatattaacatgaataatttgaaaagaaaaatatccatacagtcaaattcaggtcccaaagcttgaaatcacaaagtttacaacaatcatgaagagtaagacaaccccaaagtgcatggtgagttgattccacatgggtagtacacaccagacaaagaccattttataataaggccgtgtttgatcaagtttattctctttaataggaatccaactcaaagaagttttccaagctaatatgttcataactttgggagaaattttacgagtccataaatttttccaccaacccaaaaaaatgagaggtagaagcacgatcaaaacccaactagtgcaatcccaaattgtcaacgagttacacagaacaaccttaattagcttcatcgggaaaaaataaaccacaaatgagaagaccatcccactcttgagaatctgatttaagcatggagaccacactatcaccaccaaggtacataagagacaaagccaaaaaaattaatttgagaggaagtaaattgtaatattctttctgttccccacccttcatatggattcaaaatcaaaaagctttataacccacaaaatatgtttccacataatgaaacatttcttagaggaagatgttaacaaaactaattttatgataatcttatttactttcaataaagatcagaaatcatatcatgattcaatcataagctttgttcaactattttacacatgattatatgtttaatatataaattatattaaatcatgaacatatattattgtgatgtcatcataatagaaaatattatgattacactactacaattatgggctttagaggcagttctttcaacttattttattaaaaggaaaactaaatggtgtaaaaatatccacatggattgaaattgacatttagaggcagttttttggtaaaaccgtatgtatataatttaattatatctatgtcatcagttgggggttgggagaaaattaagggttttttttattaaccttatggcgtcggttatttggtattaaccgacgccataggtgcacccattattcgatacgtgtgcacctatggcgtcggtt

SEQ ID NO: 4116 - DNA, 1204 bp, Cannabis sativa
atgggtggtgacatgcctaatgctacttctggtggcgctgctggtgctgggccgaagattgaagaggttgattaaacatgttttgaagattattgaagttctatcttgactttctgctgtctgtttttaagatgaatttggtgttttgtgtcttttttgtttgaaaactatataatgtacaagtttttatctttgttttcttagatcaacgatgtaataattttttcgaaagtttgtttgtcttgattatcaattgaaggcaaatcattgttggcaattagttcatttcgaagaaacaaaattaaagcattatttttgagaattggaagcaaagtaagaaactcaattatcttatgacactatggaaaactcatatataaatcaacgattatttagcttatgaagattacaacagaaacagtacacacaaaattataaatggttgtgaaaattttgaatattgaaatccatgttctgaatttttttaggattttctttttctctttctttctagtcaatggtatatttctatatcgaaaaaaataaataaaaaatcagtgatataatactcattttatattttacattaaagattaattagtaatatcaatcatcttaaataagagacaattaataaccaaaaaatagtttggcatcttttccctttgagaatgagactggcccaaagtctttatgtatatatggttatggatatgggcaatactctatgctaattgattgatcttagggacataaaaagggactttcaatttaattagcaactaatctatgtacatttaccttaacgacaacactcattcgtattttatagcctttctcatcatctaaagcattcatgttactcttgtactatacagtaaaattggacatgaacaaatatgagaaatttacaaaaatactgtaatttgtattaacttttacaaaaatactgtcacacgcgaaatctttcaaaaatactgtatttttataaaacaccagtaaaatacaaaacagaacaactcaaaacaacagtagaataccagtgacaacttaacacagtatactgcagtatgaaacttattaaaaaatacagtaaaaaagtaaaaaatacagcctgacattatttttgtaaaaaaatgacaaaagatagtataccatgtaaatttcccaaaaaatatcatgaaaaagtagcggtttaatttaa

SEQ ID NO: 4117 - DNA, 1319 bp, Cannabis sativa
ttactctatttgttttgaaatttgaaagagtttttgtgcgaaagtagcttagctttgtattagccgagccgagccgaacaattagcagaagaagagaagagcatcccgtgactgactgctgcagagtacagagcgagaccccaagttgaataacaacaaagagtaagccactcggcttcagtgaattaatgtctccgatttttacagtagtttgatcctacggtcgggattcaatcaggaaagacaagcgaaacgataaaatgaaacgatttaatctaatctaactcaggagaagaacttaaaggaaaaaaggctgtcagccaaccaggtcatcccatctttagtcgtggtggaaatgattccatttcctcttcttccaaattcttaaaataaaataataataattattattattcaattcttaatcttttaattttatttatttattttgatatataaatttggtgtaaattttcgtccatttccatttccgccgaacgagactgcgagacccgacccgaccccatcgcgttctctcgagctcgttggctttgtcttcggtcgtctttcgcattctcttttctaaaggtttcaaatatctaactcgatcttcttcttttcaatttttccttttatttttggtttgaattgtttcgatttgttcgataggtgagttcagtagttcgcatcgtgttcatttctgtgctctgatctgtgttttgtatgaaattttttgagctaattctcacatgaacatcatgatctgtggcgtctttcagtgatggatttgttgatttttgttttagtttattatgttaaacttagatcgggtcgtttagctttctgatatggccctcatttttctggatctgttgtgtttttcatattccgattgtccaaatcgatgcgatttaaagttcgagagttttcttgttctagatctaactttattagatacctgtaaatcttaattccagcgaaagaatgccgtttcattgttttcataatttaactgggatttcattggaatttttttccctatttttctatgaagttttggatacagaagtttagagaatttaatatgcacggacattcctatattttaatcataagatagtgactggagttgagactctctggaacagaagtaaaaacatggatctttattatataattatcgttcttttgttgtctgttgatgagttagataatcactttttttttgctacacaactctaggaaagactcagatgagttggattgccgttgttttacaacagtttaactggtagtatttttttatgcagatttatata

SEQ ID NO: 4118 - DNA, 724 bp, Cannabis sativa
tattgcaacattataaacattgttatatgcttacgaaatcattaatatacatgaattaacatcttacaagttcatttacagcatatgtatgttacaaaatttaaacacggtgtaaccaaaggggtgaaaaaaaagagagagaatttaagttattagttgatttaatacattacgttacactaaaaaaaaatccaaaaaattgaacaaaaaataaacagcatggactaatggttgctttgttcattccaaacaagaaagaaagaaaaaaaaaaaacattatttttcatgaaaaatccttgagaattaattgaattgatctcatcctatctatattaattgttgagattttaagatatttattctttcttaataggtcacctaatcaggaaagtaagaaatgaatgaagggtttgtctttttctttttttcttctcttagttgtagtcatacataaagcagtcgtattagtatgaactacgaagcccccaccaataataatagcccaaataaggtattaagtcaaagtcaacaaactaaatagttcccattttattatttttatttttttaaaaatagaaatataagaggattagcagtaaaggtacccatctcaccaaccccaatccccaaaggtggtggtggtggaccccaccattgttcttggtggtggtgccacaatgatcggccaccaacctctactcctcaccaactctctctctctctc

SEQ ID NO: 4119 - DNA, 1986 bp, Cannabis sativa
ttatgtttgattttttgaacaagcaggaggcaatctattgcaatgtgagagagaggaagtattattgccatacaccaaaatagagcaatggagagagcttgggctttttcatacaggggagactgcgctaaatcttggggaggcaagggttgcaatgactcagttttgacagtctctcactatagcccctaagcccgatttttcctatgaacatcaaaagcagcatccatattaagtgtaaagtatccaagtggatgggggttgtcattatagcttgaaatctctatgcttgagtttgatggtcgagcagtatgggcgagctagaaaggttgttcactttggccttagcatagtcctacaaaagcttaacaacataattttttatatttatgttagcaccattttttttgttaaaaagttctcattcctatttttctagatcatccataaaatgccaaaaaagacccccacccgatcctggggcagtgaatcaaaccctcaaagaagaaaaatcttgatatcataatacttgttcgtagagtgcagttccttaaaagagatttttttccaaacaagtttagcattggaacattcaatgagggcatgaaagatggtctcttccttcctgaagcaaaggggacgggttgggtcctggagaattttcctagtgaaaagatttaggctacaagggaaggcgtgagtaaaagctttccaaatgaaatgttttatctttggaggtattgtggtcgtccaaactattttccaccatctttggaaagatgtagggttggatgttatgggttttttggaggtcgctttggacttggcaaggtggtaggctgaatttactgagaaaataccagaaggctgctgaccttaaatgaagcagtcttttactgaatggtcaatgggaactttaagtatttcaacaactagatcagaattgaagtattggttgagcttgttggtatcacaacatccgtcctcctcaatgaagtaagagaccttttctggcaaattagaggaaattacgatggaatagggtttgtgcgtagatgggatccaatttggacttgcagtctgaatagagttaccatcaccaatttccaagtgagacctttcagtagcagctctcttccaaaaaggagacttctctaagtgaaggagggattgtgaccttttggtgcttggagaaatttattgtgtttgaaatacttggctttgagcagttgagagaggagtggttgaggatcagtgaagattctccaggcctggtttgcaaggagtgcttgattatggtaattgacaaatctgaaacctatgccaccaatgaatttaaaatcacaaagcttggactaggatttccaatgaactttgctgtggttatttttggaaccccaccagaagttggcaataaggctttcaatttttttgcaagtggacatggggattttaaatcaggacatagcatgggatgggatagcctagaccacagctttaataagggtttctttgccatcccttgaaaaaaaattccattccagttattcattttggcagacacgtttcggaccaagtaatggaaattgttgaattttccactatactggggaacccccaagtacctgctagcaaagttcacattgccaagatctaagtgagagaaaaagagatctttctctctaagagtagtgttgggagagaaaaggatggctaattttgtgaaattcaccaattgaccagtggcccgatggtacatgttgaggatgtccataatgacaaaatagaccctgctattaatcttggtgaagaggagattgtcatcgacaaagagaatgtgggatatcgcatgagcatccctgtagataggtatttcagagtaatccttggaggtttctttaagacgaatagcagcagagaggccttcaactatcagtaggaaaaggtaaggggatagaggatccccttatctgatgcccctagtgg

SEQ ID NO: 4120 - DNA, 2003 bp, Cannabis sativa
atccctatctcatggtgcattactctgacatgttttcaagcctattttttttcctaacttggtttctttatggttcttaatggatttacatgaataggagttttgtgtaattaaaaatttgcattcaaaactttatttcctaaacaaattgttagccaaccctagaggctccatttgttactactagacaaatttctgctggtttgagcttgtaaaaataatagtgcttgtataatataacgtccgttgttaatagaaattataaaaatacaagacttctatctatcttttattaacgaattaactagatatatttgatacaactcatttacattgaattttagtatcacatttagtaatttaggtgcaagcacttgcactcaatgtatttcttcaatgatactttaataattttattgttattgcgaaagtaatagagaaatattttttattattaggaatgatttacaaacagtacaaaacaagccttacataggccaaagcagagtacaaccatctgaagtaaaagacccagaaacataacaaaaaacggctaactaacttaatcgatataactgtcttactgacatgtaacaatacataaaacgaacctgactaaaataaccactaaatttgttacccctcgtcccctctcaagatggaccatatatattgtgtatggctatcttggaaaggtgagaagtaagagtagtggaaggaagagacttggtaaaggcatcagctaattagagattgctgctaacaaggatgaggcgaatagtagaattggaaatttttttcttgatgaagtggcagtccaattcaatgtgtttggtcagttcgtgaaaagtaggattgttagcaatgtggatagcggattgattatcacaatagatgaatgctggtgttggttgtgttatatgaaggtccataaaaaggtattgtatccatgtgacttcactggttgtagctgctaaagcacgatattctgcttcatcagaacttttagatacagttggttgcttctttgtcttccaagaaatgaggcattcgctaaggaatatgcaaaaactagtggtagagtgacgagtgatgggacaagatgcccagtcggagttagagaaaccacgcaggtgaagtaaagaggaggtggagtagagaacaccttggcctggtgatccttttaaataacgaagaaggtagtgtagagttttcaagtgtggagtccgtggagaagacatgaattggctgagtgttttaacagcataggtgatgtctggccgtgagagagtcaagcataagagtcgaccaataagttggcgatagtgagatgggttatcaagtaagtcaccttctttgtcatcaagttgttgtctaagatccattggtgctttcgttggtttattgttggtataccctgtgtcagcaagaaattgcagtgtgtacttgcgttgtgtgaggaaaagacgagaggtggcacgagctatttcaaactctaaaaaatactttagtggtcctaatgttttgagcttgaatttggttttgaggttatcttaaagaagatgtagtatgttcatattggggcatgcaaggatgatgtcgtccacatagacaaggagtgcctcgaatgtgtcttgggaacctctggtgaagagtgtataattagcttttgattgggcgaatccttcttcaagaagagcttcaatgagtttcttataccactgtcgtgaagactgtttaaggccgtagatggacttgtggagtttgtagacaaggtttgtgccttgaatgttggatggaagcttaagtccttggggtaattgcaagtaaacttcctcatccaaatctccaagaaggcgttgttgatgtcgatttgcaatgtgtgccactgtttgatagccacaatggcaaggaggagtttgaatgttaccattttcgcaaccggtgagaaagtgtcaaaaaagtctaagccttcctgctgtgtataaccttgtgcaaccaaa

SEQ ID NO: 4121 - DNA, 1680 bp, Cannabis sativa
tatcatttattagattggattgaaattggttgagttaattgattataataatttttaaattgacaagttatctactccaaaatagtggtacctattttcgaagagggtggtaatagtataagctttttacaagaggaaaaaaaattacatattaattaaaaaatgagtcattacaataacttaaagttgaagaatttagagttaggtttttccaagagcaaaaatctaggcttttttggttcaaacccaaaagaaagaaagatgtgagtgaaggggacatttagaatttttcatattgtgaatatttttagtaatgctttttctctaagcaaattatttggaatttgcctttttttttcttcctatgttgaaaatgaaatattgcaccttgagtctttacctatattagttcttaccataaatagctaatatacaaggcttttttgacaactttttttcttcttctatttgactatattttctctttactatttatatgtccctttctactaatcattattcatcaacaaaggcattaccaaattttaacaaggaaaaataatccaaataattttattttcggattgaattaaaaataaaatctattttttatttttctaaaaaattaaaacttgaggataatataattttataaagtttagaataatttcacatatatataaaaatatataatttaaaaaataatatcgtataaaaaaattttgaaaaatattttcctattaactatttcttattattaatacttccctcttaaatttttcttttggtaaaatccgaaacaaaaccccaaactatagatattttcattaatacttaacaataacaaaaagtttacaaaagtatgtatttacattttttttaatatttataaaaatttatctttttattttacaaaaatacagacaattatttttaagaaaattatcacatataccagtttttaattttttttttcaaatttacgatttgaattgctccgattgtttttatggaggttgttatgtgaattttgattgtgatttaagttattccgttagttgctataaggattgttatgtgaattttcgtaaaaatacaaaaaaaaaaaaaaaattgctttcaaatgtaaaaataaaaaacctcttatttttatatgaaaataacattattttatgaaaaaaaatacaaataaaaatcatgtaaaaaaacaaaatcctaaaaagaaaattcgtaaaaacgaaaagaaaaaaaaaaacaaattagatactttatgtaaaaatctcttatatatatacatatgttccctctttataatcatcttccactaaaatccagtgatagatgatctctaatactatcataagtagaattattattattggtatcttcattcccattgtcttgatcatgagcaagcaaatattcagtctcatattccaaattaccattaatcaattgaccaccctcattaacccaaggatgtttttccatttttcttagtccttccaatttaactgcaacttctttcattgaaggcctatcttcaccattaacactcaagcacctcttagcaatcatagccacttccaaaacttgctctttataatcaattccaatattaccctcaacctcaattatttcaaacaatctatcttttttcaaagaaagcaagaaatgcat

SEQ ID NO: 4122 - DNA, 654 bp, Cannabis sativa
aagctgtagcagcttcaatggcagtggagaatgtaccgagccaaagccggcttcctttcttattactagaaactccattatggggttctctgatttcagcaacccattttccccaagttctttgtctaactcccctgaagtaaaaatcagagttttcaggtcctccttttccacgcatacaaccctttttggagcctttggcaggtgttttaaggtacccttttccattttctatagaagaaagttgattattgtagttcttccattttgctagtgtatcagctattgattcacttccatttcttctcttcctaagctttttgttcctgaaatcaaacactaacattttcaacctcaacatgaactagagaaagaaacaaaaatagaaagaaaaacaaaaccattgtaaggaaaaagctataagatattaccatcaacttacttgtcagaaacctcactcgccatattcaatagtgtttatattctggggttttaggaaataaacccttgtttgtttttcttcttttgccttttttctcaaaagggtttaatacagatttatatatgaatgataaaagggtttaaagaataatttttttttatatgaagggtaaagaatagtttttttgattagtgttatttaccacaaataaa

SEQ ID NO: 4123 - DNA, 2733 bp, Cannabis sativa
gcacaagagtaccagtcaaaaaattgcaattgcgaatgaacactccaatgagacccctttacagtcagcgcggtaatagtctataagcataagtggcacataaaaatagagcaggcaaccactataaatgactttggcaatcagctcagttataaattttcttcctataatttccaaatctctcaaaacatttaaactataggaaattgataacttcaggcacacaaacaagaatatgcacacttgggttagatatgatgacattgcaattatcttctgtttacagaagataccgacctgatctgattggctcacatgcaccttttgcccattacaaaatgctccaccacctaacataaggattgactttacgagctgaagtatgacttatttgaaattcaaaacaggcaaaagagattaatagcatagaactttcttaccagcagtagcagaaaattggcgggtattccaacacataggacccccaacaaattccacctgaaaaacaatcacactagtaaacaaccttatttttgttgggacaaggagataattaaagaaaatgccaacattatcttgtgagagaataagaatcctacactaatgcagggaaaacagtagcataacctaccattgttttctttttttcttttttttttttatcagctcaaacagaatttatactatgtccacctagatgacacatcaccatttttgtagataggagctcatgttacaaagtgattctgataagaaattgttacaaagttataaagctagcgagcatgccctagttatttcagataagggaaagacaaataaatctcaaagaacaaaatttatctattaggatcattaatgtttattaattttaatatcagttcagtgctgaatatgggaagtgtcatgtaagtgaaaaaaaaagcagactacctgtcataacaaaatcaagttgttagatccacaagcaagctaacaactaagcaacgttgcaaatgacatcaacaaaataatcttaatccaattaatttgtaccacagaagcagcaacaggttttcctcgaaacaagacacccacggaaactgcaaagctaggataacagtgtgcgaaatttgttgtgccatctgtgaagatgtgagaggttagataacttcaaagccacgtgatttaggaagcttaatttactttaaaataatgtccacgttacatcatgtgtataatatcttccaatgactacatcttcataaatatgtattgaatagagcacaatgccgaacacgtagccaatataataagcgaagaaattactgttaaataattatttagggttattttattttatttttttctttttttaggttagttccctatataactactgttcgtactcttatagtagtggcatcagttcaccaatagactatatctcaaatggatgttaagaatgcctttctaaatggtgacttacatgaagaggtttacatggtccctcctcttggagttcctcataagcaaggtgaggttagcaagctgaaaaaagccttgtatggtcataaactggctccgcgagtatggtttcagaagttctctactactattattgtgtctcttagttatgtctcaagtaatcatgattcacatttatttgtcaagtgcacatatgcagtttctttgtatgtcgatgatatgattaatcatcaaaactaaataaatgaataaaaaaaataaataaatataattccgtttctcatctaaattctgtttctaggattccacagaattctatattaaaaggttatgtggtttattttcactagtaataaacataaacttaaaggctttggacaacaacgcggcactactataaattagtgtgtgatcaaataccaattggggcatcagttaaatcgtcttgatgttttattcaaattgaaacaaaaaaaatgtgcatgttaatatagcaaaaaaaaaaaaaaacggatacaaaaagcttacatgtttccaaatatatttttcttcaatttccttgttttcaaactactaaatttattttggaatttaataaaatcgaacatcatagagtggagagaatcaaacctaaaggatcaatgcaccaaagataatcagaagctgtatctcctataattccaccctcctccccaagaataaggtgatctccaaagttttttttcacaacttctaaaattgcagcctcactgtttttgtctgtgctgcaacaagtttgcatagtatgtgaaaaatagccagaaaaatcgctacaaatacataagatgattaagaaaacaaaaccagaaaattaactaactcaataaattatatcccagaatgcccatactaaaccaacatgttcccagttgctatcacccattgaattatatgttctttatagttttgaggacattttccgtgaattgaaaagatcattgtcaaatgattgaacaatattcaagaaaatccgttgaaaccataaacgaaatgacaggagatgcacaagggagaaaaagaaaacagtgatcatatgatgcacgacaaataaagcatctacacgatcattaattgtttcaagtataaaaaaaatgtacatcactgtgtaagtaatctgtgatgattctcactcagttactaagtcagttagtcctttataagtgatactccgaggcttgttaacagcttccatgacgacctgaaaagagaagtataaattaacagcat

SEQ ID NO: 4124 - DNA, 1520 bp, Cannabis sativa
aatttggacactaagctggaaacagagttctttaaggtttcatgtgaagttgcctgtaaaagggcaatcttatcaccttgcaatacctcaaattgcttcttcaaaaacctattaaggctgcactctgcaatattaacaagacttagagatgcatttgtgtgcatatattttgttacaataagtcctgccaaaagttgctgatctgccttaacgagctccgaaacaaaacatggcatgatgatcctcctaaaaagtagaaattcgatctcgctgtctcctctttgttctgaaccttcttcatcaacgagtctcgatagttgggaggcttggcacttttgagagaaacttccaaccaaatagcaggtgtaagagaatatagtaccgtaagacgaattggagatgatattagacataactccagatgaggatatgagaataagaaactcaatgctctcagcaaccgtgtctgtgaacgttccttgtttcaacttgttttctacagcagccaagcaatgtggccttagtgcctcgtatggaagcaataggactaactttaaagccataaaacaatctatttgaagtacggatttgcttaggctttgggcaccatcttcgtctagcaatatgtcgttagattgatcaatcactcttagcacatctttaaagcgagacactgctataagtttcttacatatctctaaccaacacgcgtgtaaagggtgaagagaagagctgatttcggatttttctttttcaggagtctcggcgtcctggagactttcccatccctcatcccagttgtcagagttccaagcgttttcaacatcggatgcttctgaagaggctttctcatcatgccttgtcgtaaaaagcccttcccactctcccaaaacagctaccagagaatcaatatgagcatcactatcggaaacctctgacagcttaaagaagcaagaaactgctgtctctacagtagacagatcgtcgggagtaatttccagagttggtgatatgcttgctacgagctgagttgatctgagggcaaccaatgtgctagtaaatctgctcgatgtgttattatgatcggtcaacccctgattcgtggaagtttgactttgctcgcttgtattgagtgactcatcccacccttcccatggtacaatattggattgtaactcggatgagaaccccttaatatttctaccggtgagaaattgcataatctctagcatgcaaactctaacagatcccggtatctgcagatcatcagagaactttacaagtctcttccaaattacatgtctaacttgcttcaaatcatccagatcaccttccaatttactcacagaagacaaaatatgatagaagtgctggcgttcctgagattcgccgacagccaattcttgcagaataggctccaaaacatttaagtagaaatggggaagatcctgaagttcagcatcaccatttggagcatttattgcatcagaataaacttctgcaacagctctgaatccaca

SEQ ID NO: 4125 - DNA, 1826 bp, Cannabis sativa
tcaagagtaatacatttacacaaattcatattagctcatatcctatagactatctttgctagagctgcatacaacacctctcatttatccaccttctctaattagggctgaacatttgagctcgaaaactcggtccagccagtgcacggtgcacctgcccagcccagaccctgtaaacttggtacccaaaaaaaataatttaaaaaaaggggtttgagtgccacccaaatgatatttcaacatggtattggattggaattttttaaatattaaatttaaaatgaaactcgaatccagttatgtaatagaattttttatttaacattatttcttttttttggttttcttagttaaccttaacagaatatactattatttaacaaaatattcttaattgatttaataatattatatatatttaaaaataaaaattatgtagatatttttatataagaatcttttaatctattttttaaggatatttaatctaaatttaaatatataaaataccatatatatttctaatcacacaatgcaagaatttattcgtggactattcaataatactctaaatttattgcggttagtttttatagaatgattcaatagtgacactgtattagtttctatatagaatgaatcaataatgaagtccatatttctaagtgaagtttattttattaactgaatgtgtaggaatttaagttcacattacataaaagtcaaaacctcttacgtctttagaacaatgtttgaaactaatcgacaaagagtgataacagagttattgaatatggagttgatctaattttagtcaacaaacaagtggaataaaaaagttttgttgctattatatgttaatctttatataaactttatatcaaacatttaattttctaacataataatactatttatttaaataaattgcatctttatttaatataacagttaaaaattaaaattcattacctaattaaaagaaaaaaaataactaatacatgcaagttatgcattacacgtaacatcaacctaatatatatatatatatgttaaactaaacctagcactcatcttaccagctgccacatccccttcccccttcctctcctcaagcaacttcttatttttctcttctcttctgcgtcttctttttcttcttctttgttctcgtgtcttcttctcttctacgtcttcttcttcttcttctcttttacttcttcttcttatagtgtatatatacgagggaaagaagagagagaagagagcttatttttcttcttctttgatctcgcgtcttcttctcttctatgtcttcttcttcttctcttttacttcttcttatagtgtatatatatacgagggaaagaagagagaggagagcttaaatctaatttttttttttttttttggtctgatgatgagaatggagaggctgaggagattagatttaggtttataattattttttaaaaaaaatgtatattttttaattttggatatgccgggtggaacccatcaaacctgacattaaaaatgggtgggttcggtagacattttctcacactcaaaactcgaaaaccccaaactcggcatacctgcccaatgtgcaaccttagctccaatttgcaaactttgacagccaaaatgtgttacccagtcatctgcgtacttgctgcagtacttttgatgagaatacataatcaaagaacaagtgagtacgactctcatttgcaaatgcacacactggaaaatctagggtctcaacaaagacattattctaaacaagaaggtttatagtaagcaaatcgaagtatgatcttgtc

SEQ ID NO: 4126 - DNA, 957 bp, Cannabis sativa
tctgggacagctctaatagcccattcacatccactgttggatcttgcattgttagcagacgtacgagcagccagtccagctgatagccaatttgagtatctgttataaagccatagtcaaatattctggtgtgggtggggatgttggtcaagcataagcatgagttaaataagtataacacacgccaaagttactaatgaaattgaccttgagagaagctgcaaggataaccgaagaaacttgtcggcacaagaaaggacaagaacatcttctctccagcaggattccatgcaattcaacaaagcaacactttgtttcaaggtcaaatcttgagaatttctgtgactagactgtgaatcctgaacaggaacaagactggcagccacaagttcagaatcgagagcacccgcaatttcctgaaatctgagaaaagttgagttattaacagcagttcgtggtattcttacagttctgtaaatcaccattcataggagttacctcaaagagaaatagacaatgtactgtcataggaattacctcaaagaaaaataaaccccaatattccactgcttcaaaaattcattatagacagattgcgctcgaaatttagcaacagcagaactggatggacaataaccttgcataacaatcagatgtttatagcttactctcagacacatgtaactattaggccccaaaaaaaacatgtaaatagtgcggcagtgcattaacaaataggtctatggcatacttttaagtacaatgaaataaaggatttgaatacctaccttcaagatgagacaagaactttaggcttgctttgtaatttttcaagaattctgtgggtcttccaggggaaaaggcaccaggttttcccttttggattgcagtgagaacttctttaaggatagaattggccaggaaatcaaatacatgcaaacctgaattttctgggga

SEQ ID NO: 4127 - DNA, 2045 bp, Cannabis sativa
attattattattattattacagatttcgatcttattttacttgttttggtattcatcatatttaaaagaataattcaataaaaaaatttccgaactttgacaacccaaactattccgttgtaataaaatttcttttgaagtataaaaataattacaaatttacctttcggttgcattttgtttattttttgcaaacgatttactaatgtaagactcctcaataatttatctattttaattcgagagtacacaccaaattaattgcatagttgaaaaataatttgctagctttaggttaaaactttttttttattttttagttagtaagaaaattttcattgatatcaaaactatacaaagcaaaggaaatacatcccacaaacttattctttttgttcacccaaattttaacgatgatgacgtgtcaaaagtagaaacacgtggcacaaaaatattgagactaaattaatgaagaatatatatgtaaattaagtcatgactgttgggatgactgtcgaccatgaaaggtgtcatgaccgttagagtggaagtcagacggtcacccttacccctaggttgagtaaggagtgcttctctaagaaggaaaaatgatggactaataccttcgtaagcggaatgaatgatcaccacacacctacgggagtcaagccagtctagggagtatatactactacccctacctcaactgcaatgatctatatgggatttagtctaggggtacaccccttaacccctaaaggattagtctaggggtataaccctaccccctacacacgcatggtacaagtcatgcattttaccatagacataatgatattctcaaaggtatacggggacatcacaccataactactaacaacggacaaggggtcttgggggatcaccccaagatgacgattaatgtcacccccctcaagttgggtatcgggggtcacccaacgatgacgacgatcacccccctcaagttgggtctcggagggtcacccaacgatgacgacggtcaccccctcgagttgggtctcgggaggtcaccccctcaagttgggtctcggggggtgacccaacgatgacgacggtcaccccctcaaattaggtctcaaggggtcacctaacgatgaagattgtcaccccccctcaagttaggtctcgggagtgttgcccccaagtatgggcttcatccctaaaggtggttgacgaccatgtcacacccataagagaccctcgtcgtcagtaactctttcaaatgttcaaatcccatgaaaggctcaaagacagttgtcaacccacaaaaatagtgggatattatcataaaaatcagacttcaactgcctccgaaaatcaaggggatcacaattgaggtggcttcgcgtttgtcgcgtctcttgaagcgagaagcaccgaccccctcccctatataaggggtcatccataacttgggaggaggatccacaattttaaacacttagaaaaataaacacctatcattctttgcaatcaagagccagttcttgacttttgcaactcagattaataaaatacaaggagaataggctattaccgaaattcgggtcgaacctctttaaattttggtgtcttttatttacatttattgcaagttacggcgtcattaactgtatttattactgtggttttagtttaagcctcatttattatgactccgcgtcggttggctaaaaatccagtcaatattttggtactttcattgagagctttaaccaaaatcttgaagtttttcaccagaaaaaatggtgttaacctgaagatctcaagaacgacctgatgaggagatggataatgcccattaagttctgtcaacaagcaatgccggaaataatggagaccgacccccgcgtcttgataatggtagggcaaccaccattcatgctaatgcccagactattgttggccatggaacaattggccaaattgttgccactaggcataccactaacgccaccgccgccgaaggcgacgctactaacggtgccactggaaggggtagt

SEQ ID NO: 4128 - DNA, 523 bp, Cannabis sativa
agcaactgaatcttgctgcaacatgccataattaaattagaaattaagctttttggaaccggaacaaagacagaaatataagtggtgtttgataacacttttggtttttaatttttataatcacaaaaataaaagtaaaatttttgcttttaaattttatttttaaaaataaaaatatattctgtaactacttttatttttgcttttatttaagtcaggtctagtctaggatccaaaatattgatgaaagaaaataaaaatagattataattaaaaaaaaaaaaccatttaaaaattgttgaaagtaatttttttaattaaaaatttgattctcaactttaaaattaaaaagcaaaaactgttttatagaacatgttttctgaaaatattatcacttttctaatattaaaaataaaaactgattaaaaaagtgttacaaaacacactcacattaaacaaatttgttgaagagtaatcctacaaaattaaaccaacacttatgtaataatttaagattaaattt

SEQ ID NO: 4129 - DNA, 878 bp, Cannabis sativa
agcacaagcctttcctagctatgcgatgtccgtctttctcttgcctttagaaacttgtcacgaccttgaaagtcttatgagtaagttttggtggcaatcgtcttaaggataaacaaggagtgagatgggttagttggaagaaaatgtgtaaacataagagtcttggaggactaggattcagagacttcagaaactacaaccttgctttattggggaaacaagcgtggaggcttttaacagctcaatcctcgttggttacaaagatctacaaggctcgttatttccccaacgataattttctcaatgcaaatgttgggaacaacccaagttttatctggaagagcattattgaaactaaggacatcatcaaggcaggtgctaggattcgaattggcactggttcaattactaatatattgacagacccttggttacctgatttacagcagccatatgtcacttcttttcatccaggtctggaagggaaagtcgtggcaagtctgatgcaaattaaccatagaagttgggatgtggacgtcctatccgatttgtttaatgagagagataaagctctgattttaggcatacctctttctcaacatgaagcacccgattgctggttttggaacagagaagctgctgggttttaatctgttaaaagttcttacagacttcttcaagatgaggaaagtggtgctcaaaccagtgacaatttctggaaaaggttttggcaaataaaagtacctcccaaggtccttcattttggttggagagccatttctggctgccttccaactacaactcagttgcagaccaaacatgttaacgtgccccttttgtgcaaattctgcaactcggagagggagaccattgcccat

SEQ ID NO: 4130 - DNA, 1063 bp, Cannabis sativa
ttgctgtagtttaatcgttaacgcgtttgaagattgaaaatactaatcgacttgtctataatatcgttctcgatcgttgcccctaatttgggccttgaaacttgtttggttctgacttctgagaaatgaaacgtttttttaagctctttttgaaatttgggtcatgagtttctgattgtgggaaatgaactttgattgcttagatgcaattacaaaacttgaggaggcattggtgattaattctaagaaacatgatgccctttggtgcttgggaaatgctcatacttccaatgcatttttgacccctgatctcgatgaggcaaaggaatattttgataaggctgcagtgtactttcagcaagcatccgatgaggtttttctcctgccaaaggctatcatgtgtttctataatgatttgttgctcttatatatggtttgtaatataggcttgtttttcgataataggaaccagagaatgaactttatcgcaagtctttggaagtggctgctaaggtacgctctactgttatgtactatgggaaactccttgtgccttttgctgttgacataggcgtttaaaatttttattcttttacaacttatatgaaagtggaagggttatattttattctggataggcattaattcttgtggatttaacagtggtactagaatgtagctgaagagaggtgatggtcatgtcttatcattttagaacatttggcattttgaattagatattgaggtcatagagtgtagggaaaattgaagatgtcttaatgtttacaagtgtggttgtactttttcttttccaaaggttcattttgaaggtttttgatctagtttttcatgtagatgtaggttgaattgttggacaggtttgctgaatgttactggacagtaatttttcctgtccattagggcatgaaatgtcatagtttggaggcactatgtagggatttatgtttgtagtccattttgattccctagtcaacctttccttcggttataacacggattaaaattctatcttttaaccctttcaaatatgtaggccttccat

SEQ ID NO: 4131 - DNA, 4910 bp, Cannabis sativa
caatcttggcaaccctggtgaattcaccatgcttgagctcgctcaggtaacttcccatacataaaataagattaatttggactgtaaataattaattaattggttaataattaatatataaattataatttgtaggttgtgcaagaagttatagacccaaatgcaaagatagagtttaaggcaaacacagaggatgacccacataagaggaggccagacatttcaaaagccaaggagttacttgggtgggagcctgttgtgtccctccgcaaaggacttcctctaatggtttctgatttcagacaacgtatttttggtgaccaaagggactctcaacctacttcttcagcatagtttataatatacatatatcgtatactattattactatgttatgttaagaaaatggtatgataataagaaaatgaaaaaatatatatgcgcccatttttgataaactagctatttttttgctattcttcttatgtttcaccttctatgggaataaagttgattttacacatgccttgtttttttggtattacatttgacttcttatttttttactttgccacagctctaacatacaaacttacacattacatatttcttttccgtttgactaattgtaataacattctaattgggtttggttggaggtaatgaaatataataaatttattatccattctattcctttgtttggttgcatttaaaatcattggccagtatactatttcgatattccactattttgaaatggaaggaaaaaccatttcaatacaaaatttgaaaaaattcaataatttttttatacattttaaatttgattcctattctaattttcattcttatttttattcatatattttcattctttccaactaaacgctatcttaaagaattcatgatacattttttttttttattttttgaatggtaaatgaaagattaataactaaagaatatgctaatccaaattaaggagcgcaaaagaatttgcgagccaatctttgacaaaaataatccctcatctatgtgtaccatgaacggtcaatcacattgacataaaactattttggattagagacaagaacaaaggagctagagctagagctagagaaggttcatacagaagaaaatcttgctaatgcaggcaccaaagtacttactcaaaataagtttaggcattgtttgaaacttatgagtattgaagctggatagttacttggtgagatttttcttgatgtgcttagagtcagtacttatttgagaattagcatagaatttgtggtacttgtaattcccacaaaactgagaaaaacaatgctgaaaaaaaaataaaaaaactgtgaaacattttaggtacatgtttgaaaataacataatttgagataatgaagtgacttaaaagttacatgaagcataaaaacaaaaagagaaaatacaatatttttgaggataatcacataatacatattttttgtaaattttttataatttttaggtccaattttttttttttttttttttaaatatttttacgattttttataaaaacaacaagaaaattacataaaattaatcggaaaataacaacaaaataacaacaaaataataacaaaaaatcaacaacaaattaacaagagtacaacataaaaatatatcaaaagaccatattttctgtaaataaaatcataaaaattgtaaaaatatttaaaattccatacaattgtatttttgtaattttgttataattttttgtgtatttatgaaatcatccaatgtttttgtttgcacatagaaatgtaaatttgggccgctaaggcccaatgattaattaggaaacggggccaacgaaacccaaacccactaaatatattggtagaggccatttgtggaatctttctcttctcgaccctaattccgaaaacaacagagaaacccctctctgcatatcatctttcttcttcttcctctgctgctcctgctccagacgcctcgcccaagaacttcatccaggtatgtcaatttagttactctacctactcattcatggatgtcctttcactttactgtctctctatctctcttgccctgcttttggggatgaattctttcggtggctgagaagtttactggaattaattcctaagcgtttaggatttggagtacgcgtattttacttcagggtttattagattttcgtatatatattctgccattgttggatctctgtcctggaaatgatgaggagtgtatgatgtttttgtgcacttggtgttttagggttctcattcatttgtgttttatttggttgaattaattgttattcaggtgtttctgttgctttatttatacatttggagaaggttttgtgtcgagaattaactaaagaacttgaggaaaaattaatcttttatgagttcttaagggaagaattctgttctgagaatggactaaagggttctactgtttgagttagagttcataattgattttgagttttgcttattagcatccatttattctgatattgtcatttctcctgttattctgaaaatgttgaagtttttgtcccctctcaatttggtttcgtttccttattcgtcagggattaagtactgcgaataatcgtttttcaaatttcgtgagtggtcatataagccaccaacaacttcttgaagcagaagagaatcactttagaacaggcacaatgtcacgaaaaggtttgatggagcaagacctgggtaaattggatgtaactaagttgcatccactttcacctgaagtaatatctcgtcaggcaaccatcaatattggtaattttatcttatatgcttgaattttcttgactatacattgattgtgcatgtaatgattaaactgcctcagtttgcaattgtagcaaatacgttttttcttaattaatgatttggatgttgatgtttgttctcaggcaccataggccatgtggcccatggcaagtcaacagttgtaaaagccatatctggtgttcaggtaatacttgttttattttgcttttaaatgtgctttctctcttggttgtctgtgtgagaatactacggtatacatgtttttcctagtacttcaaggttgatacgtttcattgtggtgaagtttcttttaactaatgtttctagctatcttgttcaaaacaaaataattctgaaattagttttaggatataattttacttcacattttaatcagtgatattttataatacgaacataatttgcttaaatttgaaaggcatactcattttaacacctatctgttgcagactgttcgtttcaagaatgaattggagcggaacattaccattaagcttggatatgcaaatgcaaagatatacaaatgtgaagatgagcggtgccctcgacctatgtgttacaagtgggtacacatgaaaacattacaactaaataggtgattaaattttctctcattttattgacacgtttaaactgtgtacatagggcgtatggaagtggaaaggaagacagtcctctttgtgatgttccaggatttgagaatgctaggatgaaattgctgagacacgtttcatttgtcgactgcccggtaaggttttgaagtgtattatataaatttttatttgtgttccttgtatagatagtctgtttgttctgttaatatacattaatttacttaagctcatgtgaacaatgtcagttctaaatgcttaattctactgtatagtcccaagcggttggaagtcattcgtcttaggcatatgaatattcatttggttaaaatatttattatacaagatttgttattggtggtttgtgtttatgcccggcagtttttacaattgctgattatatggtggcactggctgcataatggaattagtgtagtgtttttgaagttgcttattgtattccccgctttttagggtcacgatattcttatggctaccatgcttaatggtgctgcaatcatggatggagcgttgcttctcatagctgccaatgagagctgtccccaaccacagacatctgagcacttggctgctgttgaaattatgcgccttcaacacattattattcttcaaaataaggttgatctcattcaagaaaatgtagccatcaaccagaatgaagcaattaagaaattcattgaggtaattttattggagttcaaaatattggtactgaattaaagtgacagtttgattgttgttgaatatattttctaaaatgcttatttatcagggaactgttgctgatggggcaccagtagtaccaatttctgctcagttgaagtataatattgatgtcgtatgtgagtacatcgtcaaaaagatccctattccagaaaggaattttatctcgcctcctaatatgattgtaattcggtcatttgatgtcaacaagcctggatttgaggtcgatgatataaaaggtggtgttgctggtggaagtatccttagggtatgccgtttctttctaaatctacacacaattgaacaaccttatatactacacatgcatgtttctgcaattggcacattttgtatactcatagtttactgaactagttttagccatgggtatgctttcatctatatcttaaatcattggcacgcatgttttgttcgattcctcttggtcaggctgaaggggtgtgtttgcccctgctgctgcttgatttgaccttcatgaatcacctatatataatcatatgagctggttcccaaagattatgggttttttgactcatgtttgctagggtgtttgggagacgtctgagttatcctcatgttagtatatatatgtgtgtatatatatatgtaaagaaatagtttatgtttgctcaagtatattctctgctaacactttttttaatatattatgttttgt

SEQ ID NO: 4132 - DNA, 1652 bp, Cannabis sativa
aagaaaatattcgaatatcattatagttacgtacatagtacaaagataaggaccacaaccacaatatatttatgaggaaaaggacatgtacaataaagtgattgaaatatcatggagtcaccacaataaggataatggaggcggttgtgccttgttatctatcttcaatggtcacctcttcatttttaatgacaaatttatcatcttcaatataaatcatcttcttttaatataccactaattaaaaatagagtatatttttaatattttttttcttaaaagtattcttacattttaaaaagtttatctctctctctaactatctgactcaacctctctcactctcactctaactaagtcccattatcttcacccgaacccctaaatctatgagcccaaccatcctaaaaccccctaaatcccctcccattgcttgttttttgtatttttttttttattttcacagtctcgctaaacatcgctacattgctaaatgtcactaaatatcgctaaataacaacatcactaaacacatcgctaaatattgctaaatcacactcatgttttcacgatgattagcgatgtttagcgatatgctttgcattttatagtctcatatcgcaaatacatcactaaaataatcgcaaaatacactaaatattgttaaacttcatctctaatcttaaatttgatcaaatacatcactaaatatcacaaaatatattgcaaaaaactagaaaaatagaaaagaaaacgtaaaaatgagcgatggtggagattttaggggtttcatggatttcgtggctttgggtggagagacgacgagactttaagaaagagattgtgagggaagacgacgacgagggcttgtgacgtactgggattctgagtctgggttcgacggtgaggggttttgagtcgcggttcaacgtcgtagagtgagagagttagagagagaattttttgaaatataagagcatttttagaatggaaaaaaattaaaagtatagataccatatttctaattgggtggtatattaaaagaccatattttatatttaagcatgttagctaaatttttcttttctattatggttatgtttctaattttttttttttggtttgttttagttgcttttggtttctaattgtagattgtggcttgtttttagccaatctcaggtcacaactgttggtgctaatggcagattcaatgcttcaaatctatataattgcactatgtcgcagtagcaggtgttttattctaggatattttggagtaagctaagtctacataagcataaattaatgttgtggcaagctgtcaattctcaacttctcataagagatcagttgacaaggttctgtatccatatggattcaatgctctatcctatttgtggtctctttaattagagccatggccgtctgttttttgagtgctacctatctcaatgggtggttgtgttagggtttattatgccctgaaaggcttgtaaagatatttctctttataaataaaagttgaacattttcatatatatatatatatatttgaatgtcaaattattgattttcaatattggagatcgacataacttttctaaagactttgaacaaccttaagtcactcttggactactacaaaaatg

SEQ ID NO: 4133 - DNA, 519 bp, Cannabis sativa
cctagctataataagattttaataaataaatagttcttgtaattaaatctagataggtaattcattcatcaatatcaatagatacatgtattcctaaaaagaaatattttgtataatatataaaagtatttgtttctttatttttgtattttgttaaattttattacatgttatatatataatatatttgatgagaaaaatgaaaaaatttataaggctcaaggtcaaaaatatagtggtgcacaacacaaacaatagaaggctttaagaccaaagacaaacaggtagtctcaacataatattattgatgattaatacactatagcacattacatgataaataaatctctaaatctaattataattcccaattcttaatatagcatataatatttatggagaggatcagtgtgaaacatcttcaccatatataaaagtgatattataatacaattatgattctagagactaagactactactttttgaggttaaatacgttttaagaatatgtactact

SEQ ID NO: 4134 - DNA, 3356 bp, Cannabis sativa
ccaacgaaacgaaaaatataaataaaattataactatttttatcttcaagcttaatacgaaacacaaacccatataaataaaagactgacagaaattaaagctcttttttttcaaatccaatctgaaaacgagaacagatgggagcttcgttgtggaggttcgcccagatcaaagttccttggatctgttaacccagatttgcaaagaagaagaaaagaaatgaggttgaagaagaacaagaagacgacgacgacggcgagaagattcgcagagaagaagaaactttagtgggctgtttgttttttagctagggattcattttactatgggctcaacattgaggtaattgataacacaagagtttcatttcatttctcaggaaagcttacccacccaagatagacaggaagaacaatcgtgaagcctagccgcctctgctcttcatctccttcttccttccatcaaccaattcttgctaaatcaggtatctctctctctctctctcattttctggttgtgtgagttaattgggaagtgaaagattctagatgagatgcttttgttgattgtttcattaaattctgatggtatgtttgtttattgaattgaatctgagatttgtttttgttgaatatatttgtgtttgtatgaatttcatgaaaagtttgttgctcatggtcaattgggctaggaagtgtggtgcttcctgtgctggtttgcttggggacgtaggtagaccctcttaaattgtagtttttaaaaaattttgtcgaagctctgttagtttttaaaaactgttttcaaatttttaagttaggaagccaaacaactcctaaaaaaaatgtttttttaataattttattttatttttaaatgtttatttacatttgcgaataatattatagctcatgtgtgtattatcattttgacagttttatcttttggggatttttttttgcaaagtagatctttttttcacacaagaaacaccgatttaaggatttttgaggatttttctttttccgaaagaattttcaaggagtcctattctttgaaaatttatacttgaagctttttctcttctcggcattttgttttgagcatgagcatgtgtctttggttgaacatttgattgtaagacctttttggttgcatattcttgtaaaaaaaattattttgaaaacacatattttctaaggctctcatcaccatttggaatattctccaaaacttgtgttctgcggcgtcctgttgtttgctgaaaggaatctgaatgtttcttctcctaacaattctgggatggacaccaagaatgcttgtttgaagtttggatcgtcgacactaccgattagataaaactgcttagtcattctttgaaagtgtaatttcaaatcttcttttttcattgaacaacacttcatcttgaaaaatttggccttgaaacattcgactacttaagagtcttgaccacaaaatttgacgtacaagtgatttagtgttgcttcaatggattctgcttgaagctacctgtattctccaaggctttgccaccaatcttataggattctagtgaatcttgatactagttaaagtaagatgtctcgtatttctaccctcaatttttgtgcttctaagggtccatgctctgaattcttggaggcaagatctccattgatttgggggaagatcatcaagcatgaatgtattgggttcgccactaaattgatgtttagtagatgtaaaccgctcttctgaagacacttcttcttctatgatcggccaataaccatcttcttttcagagagcatgataacatatttttcagtgatatctctgcaaattggaccaggaggattgtatgtgccttgttattgggtgagaacaatagtatatcgtcgatgtagattagggctcggtttaggattggactatagattctactcattgccttctggaatagggatggggcagttttgagtccaaagggcaatactgtccattgaaaatgatgatttgggatacaaaatgttgtcttgggtctgtcttctttcttgatgcccaattgccaaaaatccacttttagatcaaactttgaaaatatctttgcttgaaagatgttagagaaaagagagtttttgtttagtagaggaaatttatcatcatccaaaaatggtttagtggttgataattgattaccaacctttgtcttcctctagtttgctccaccctattgttgacataaaaggcgtgacacgcccatggcgattcagtgtcttcaattagccattttgattgaagttgttgacattcttcactcgccattagttgatgttccgaattcatttcggagtggcttgctttggttggattgacatcctcattttgtttgaatggtagagagatgtagacttcttcatttttccataatgggtgattgcacttcgttgagaattttgagtgagaagttgcacatgacctccgaattagcttttctttgattggtggacgtcttgcactaagtgaaagtaattcgggatttgctcccatttggtgaagaaattcttgtaggccgaccctcatggaagtattctaagccctttttgttttgtgtaaaggtcaaatcccactatgaggtcctttcctgaaagttttgatccaatgactctatggacaacgaaacatccagggaaaaattgtagctttattggcttgttaattaatttagtgcggagtacttggttatttgcaacttagaaatattgtttctttttcttccacggttctgagagtaagatgtcggggttcataattgtgtatgatgctcccgtatcaaaaaatgcagctacttttattagctttgagtattttattgggatgacatgtatttttactatcaggatcagttgaccagtggtgattgtatctatgttgaaaagtccagcatagctttcatcgtcaaaatccaaacctgattgtaatgcgcacataatatgtggggatattttgtcttcgattgaaaagactgactgaacattgttattaaagagcgatattgttcggtgtagaacgaatcgtttagagaggttgttttatcctgaaaacgttatggttgatagattgtcatacacacttcgggcagaatcataaaatgtcttaaagagagcaacatagtcggcgactcagctagaatcatcatttagtaatttgttccaattatttttagttcggtataacaaaagatgttaaagttatcaaatttcaatattcttctcatcatcaacatcataagtaattgatgtttttatctaaacaacttaattaattattttactaaattaattaattaatttttaag

SEQ ID NO: 4135 - DNA, 2828 bp, Cannabis sativa
ttagagcatagacccacttctaatatgtacacttttatttacataaatgaatcacaaagcaggcaaatgacacacaccaattaataaaattattcttcaatcactaacaaaacccttttttttagtgtttttcctgcaaattttaagctgttttccttcttttatccttctcttggaaatttctccttattttaaaggatattcatatcagcagcccacttgtcctaaattcccaaatcatgtctacagcaggagcaattgaaactggttgtatagtaccaaaatcttgtatggtctgctgctgctcctcaaaaatattagcttcaatcaacattaacaaatattttcttccagcattaatatcatactgggaatgtctcaacttttttgttttcttttacccctttgttatgctttcttttgctatacttgatcactttgagtccttacatttcagaacatcagcaattttggagagaagaaagccactgttcaatgtttttcttgctctctgaaagtgaagcaaattacaacacaattagcatttaatgacaaatttctagattgaagaagcgtttgataactatggtcaagcataccaattcttaactgcaaaatatgaagaaaagtttaaaagaaaacaacagacaatcacagctaatctacttggcacattgtatccaccaacaactatctacttacacatcgtatccgacctttcaatatatcaatcaaagggaatgaaacaacaacgattaaaacctaaggcgcaactatgaatatctcagttctaagtctacaagttataatcctccatcaaaaagttccataactaacttatagccaatagtgtttattgctgaacatagccaaaaaagaggtttcttttttgccatttttgtttttactaattattagaaactttactaaacaacacaagaaagaatcataaataacaacaaccagataacactttgcaatctcaaatcggcagcaattgatgcgcccttttaagaggcatccaacaaaatgctaagtttaaagtctaaataattacaaattaaagtgcaaaatttcagaatctaccaacccaaatttggtttcaagattgaagatttattataaacagaaataaagtacaatctagaaaaacttgaaaggaaagaacaagttattttaacttaccaattgaatatctatctggaataatcccaacaatgctcaaaatattgttcttggtatctgtcaccatttcctgaagaccacgaccataacatgggacaagcacagcaaaactgttgtctatttcatcatcactctgaaactcagggccatgaggctccaaccatccaatcgaccaatctgagttgtcagattcagaaccagaaacacatccaccatcagacggcacaatgacaacatcatattcccgatctattttcctctcttcccgactatgccattttcgcttcacctttctcgatgacgaggacacattggacctcttaaccaaaggaaacttcagagcatcagattcccaagtacctgcctcaggtgaagaactcaaggaagacccattgcagagtcttgactcttgatgctttccactccatgaccaccacgaaagattggttaaggctaaagccatactgtcactcaacaacgaaaccaattttaatgcaaaaaattcttgaacagtgaagaatccaggttaaaagtggagtttatacctgttacatacatcaatttaaataagaacaaatccaacgatggataaggcattcaggaaataatatacaaaggcatacaaaattgtcaaatatgcaattcaatggaaggaatggatgaataatgttcataaccacaaaagaaaaaagatcacgatttgtagcaaaagttttacccttcaattaaaaaaaataagttaatactccatagttgttagaataccagaaatgatatgagaagaaagctcagagtgtcttcaaatttatctttggtttgaaactgaaatgccatgcattgaaattttcttgcataagcattaatagtttcaaattttaccatgtttgtacaatcaattttatgataaacaggggaaacttaaaaattaaattaaatgaatcaagacatcttctccaactacaagagaaatacagcataaaattcaaactctccccccaaaccaaaacctaacattgtctccattgttactactaagaacaagagaacattaaattagagaataaaacacatggatttaccaactatagacgtgaatatacaatgaagggaaagacttatgaagatgtactaaaatattaaatcattttaaacataaaaagataatattaaatgatttaacccatcaaaataaacgcatcttacaaagaacgaaaaccaaattagaagaaaatagacaacgcccaagttttctctaatttcaatttcatatataatcgatcgaatatcagaattatgcgaatttctaaatacaaaataaaacacaaaaagaagagaatctttcaatcgtttttctccaaataacaattttatatcgttcatttttcatataatggtttaggaaacttagtctagtcattgaaatacaaatacccagaaggagaaatctcctaaaattccttcattgccaatgaaacttgaaacatcaaatggaaattctacataactcattcaaatatgtagatataatacatatataatcagcgtatgaccgaaaataccttgagctcgaaaactttaacgatcggttggagaaatttctatccaaattgggaaactatatatacatatgagtgtgaaagaaa

SEQ ID NO: 4136 - DNA, 2059 bp, Cannabis sativa
tctatattttcttgtcttgtcaagactctctcctaaaaaaatagtgttctatattttgttaaattaatttaaatttgatagagactatactaataaatttttatttatgtattattgtaattatttgtgaattttacttgataattatataaaaaaaaaaaaaatcaaatggaaaagtgagcatagtgagcgtttgagatagtagtgggagagatttgagtgttgttagatgagtcaaattaagcaatgattagtggagagagattaatttcccactctcatcttcacaaccagacaacctccaacttcatttaactctcatattttcttatgccccttttttttcacggcaagcatcaattaagtaatactatgcatgtattgcaaattttgtattttaatttctacacctaatcaccatttagtgttatgaaataggagtgttcacctggttcaataaacactatttcgctgtatctgatttgcagttagtgtggattttatattttggatccaatttgatccgcataataactcaattcaatctaatctgcaaaaatgttgattgtatcaattattttgaattgattattttttaatattaaattatttaatatttatcaaaaatattttttttcacgtaattaacaataaaataaaataaattagtgttgttttatgtctccaacaacaaaataaaataaaaaataacaaattcaaaacaaaaaaaaattataagtataaggaaatgtttatttatgttttagattatatttttttatataaataaaaatagaatttgtatttaattcaggattgagtgagtgattcaggggtacgtctcaagccccaaatactcagggctctaaaattgtaaaacgagaaattattagtatataaataaaatattaaattaaaaaattaacaaatattatttgatgtaatggtaataaatttttgaaaagtttatcattacactaaaacactacaactatcatgttgataataattgaattatataaaagccctaaattttaattttgttttaagtctcatataccttaaaatcgaccttaatttaatttattatgttttaaaatatatttatatgtattaaatttaaattttattttaatcggttacttttaccaatcaattaacatttaatctgcacaagtacaaatattctcatcaacaatatagagatttaagtcaaaataatgagttactcgaagaggaaaagtctacaaaaataaagtaatgaaaatgatttattcttgttgttgttgtaacactttattttggcacatttacaatccactcaaaccaaaaataatatctacaataaaattatttcattaatatttatttattttctttctattttgggacttaaacatcatagcaaaatggttaggagtgaaaacataaagtatgttttgagccttcacaaaatcaaatcacaaaaataattggcatacaaaagctattatatctttaaatgtaagaagataacatgatgatgatgatgatgaaactaaaagtacataatattacacaacattggagtcaagatcatcttccatctcatgaacagcctgaagtggaccacttccaaacacaaatgcactctctgaaaacttattcagaggactatttccgaacaagcatacctgaggttcgatctgattcaaccgattccactcctcgtccgataccgaccaactgaagatatctacattctttcttatcctttcactcatcagactacaaggtaacacactggttcctctttgaagcccccaccgtaaaataatctataaaaacaataatcacatcaaacatacccactcatgttatactatcacttaaaaaaatggtgcaagacaaataatttggtgatgggtaagttgaaaactcctaagctgttactcacatttaacattcactatagatcccacatcattggacccacaagcgacgatgcaagagttaactcaatgatgaaagtaatgacacaatcaaattactattgaagattgaatatataatccaaaat

SEQ ID NO: 4137 - DNA, 1213 bp, Cannabis sativa
taataatttgtcctatttatatattatatgaaattagtgattattaaaacgacactttgtgtttgacattgaaattgaaatatttgtaaaataaaattaatagtacttgaggtataaatcttagattcatgatatattagttaatcattaattatgtttaattattattttcttaaatatatacgttttattaatgtggattagaagattaataaaaaagagtaattttgagaaatttgatgggacactgcctaaaaatagatgtacgatgcaacctttcatgtttttaatctctaaataagtttaatgttaattttttcatataacagtataaattgttattacctgatgttttaaagctaattgtagataacttaatagtactttaaacgaaataaataattgaatgaaactaaataaatatatagacaacatttaatgataaaaataacattaattaaatatcaaaatatttttattaatttatttatttggttctcaatatcatactggccattagatgatttttattgagataacaaacttaaagagtttgtagtaaaatgaagttatgaaatctttaggttacttattgagtatggtccattagtattatgaatacatgtgacataaatttgagtcgctagtgtctgagtgtctgagtgctgctttggtttatctgaatatcatcatcgtaagggaggtttctcttgtggttatcaagtgtggaatcttggtgtgcttagtactgtgtatagtgtagtgaagatggaaggccaaacggaagaggttcaagtggaactgtgtgggctagaggatttcaagatttctttggaagagaatcatgaactcggggcagaggcagtcgagaagtcggtggtggctaaactgtattccaacaagacggtctttaatggcctccttcgatcgattcttggaaggaaatggaagttggcaaaagggtggagattacaagaagtggggaagaatacgttcatccttaggctgactaaaaagcaggaggccctgcaaatcacgaggaacagtccatggccgttttgggatggtttcttggtggttcaaccgatgccagaggacggtcagtggacttctgcagatctaaactcctctcctatctgggttagggtgtatgagatgccgcctagatattggactttaaagaacgctaacgcccttgctccaaaagtgggga

SEQ ID NO: 4138 - DNA, 567 bp, Cannabis sativa
aataattttttttttgtagttttagctagctattcgtttaccctattttatcgaaaggaaggaccaatcacaggaaccaaataattctctatataaattcaaaggtacttattgataatagaaaaattgaaataaaaatatatgtaacatttatttattttgtgtgtggcaaattatgtcgctgtcttgtgtctgtattaggagaagttgttagatagttagttaggatggtagttaattaaattaactacctaaccacctattgttttacgtggttaattgatttattcattactcgtgtgtgtatataaacttgtaaatgcttaaattaatcaataagagattcatttctctctctctctttctttctcattacctttcttattctttcttcatcttcttcctttgttttgttttaaagcaactatgtcaaaaaggttgaatacctctcacatggtatcagagccattaattttgccattaacggcgaacatggtttctgttgatcctaacaactcaaatcatcaatctgcatcacaaggaactcaattttctacctcaagaaat

SEQ ID NO: 4139 - DNA, 699 bp, Cannabis sativa
ctaaaaaatccttaaatcaactaatgtaatttacacaactactcacatctatttttctccggttgttataacttatagcaataatcttctgatagtgatagacattgctcactcgatttgtttgatatcatcaaacccaagatttctcaacccacctctttttactctttctatttctttaacatttttttcttttttaattaatgaaaaattaatatgaaagaggaatctttttattgttaattttcatttaaaagctgaatttgttgttgtgggtgatatctatttatatatatatatatatatcaacagaaattggtgagcgttcattcaatttaaaatctgagccttctctcaaatctgaatctctatactctcccaatcaatggctgacacgtcaaacgtcaacgacgaggagaaacgaacctttattttctcctacggcacactcaagcggggttttcagaactacaatctaactcaaaacctaatctcccaaaacgacgccgtttacatcggcgatttcttcacttaccaacccattcccctcgtaatcggcatctacggcatcccttacctaatcaaccttcccgggtcgggtcaacgaatcaagggcgagctctattccgtcacggcctcgggtctcgccctcctagacgatctcgaaggcgtcgctatcggccactacgaacggctccc

SEQ ID NO: 4140 - DNA, 1008 bp, Cannabis sativa
ataaccccatttgagagtaatctatttttatgaataaaataatatataaaatttaagataattagtattttttttatttgaactttttatttaatttttttttaactattaaaattgtttaatttaaaaaattttgtctaattttattcaaaaaaaaaaaacttgaagtcaataaaaatttaagggtcacaatttaatacattggagaacacagataaatatcaaagttcaagatagaatttaataaataaataattttctaaaattgaacaaattaaacataaatctttaaatttaacaatctaattaattgagagaatttttaacagccttaattagcttataatttaacataccaagtttcacatattttaattcataattcaagattcaaaagtacataaaacatcacaaaattcaaactttttctctaattgtaatttttcttatatttctagaaactgtaattttacgacccataatatggccaaatgggcttttgccaataatgtttctggtatggtagaaactactattccgaatattatattttgtaatgaccgtgaggtctgactgtattgttcttctaatatattaacgctttatttcaaaaaaaaaaaaaacaattcaaacttatataatatgatagccttcaaaatagtttagctttggtataaagagtgtgattagccaaatattgactgagtaagtctacccctatttataaggtcaggacatgcaaccaaggtacaaaacaaaatgagtagtaactctttgcatgtagtcattgactcattgttaggtaaaaactaaaaaccaatggaatttcacttgtcgttttggataactacaatacaaatacaatgcatgtttagggacagatgttaaatacagaagaagaaaaacatcataagctgatgaaactcttagtgaatatgatttatttggtaaggtggcacttggctttctactaattttagatgccaaaggcaaacaacagctttgatc

SEQ ID NO: 4141 - DNA, 600 bp, Cannabis sativa
atcaccaagtccaagtgcaggactctctggttctgtttgcggcatgtctattcgaagtcgtttggcattgcagaaacgaagtcagaattggaagtagtaggcctgaccctgattcggctttcaaaagaatcatcctgaggtggcaggagtttagtcgattggtgagtttggaaagtgtctctgaacctgaacgtcaaagtgcagatccaagtccttctgctatcttattcatggtcgatgcctcggttgttggaattgatgcggggcttggaattgttcaaacaaatgttccaagggaggttgcaatatcggcccaggctttccggactgtgctgagtgttttagaagcagaatttgaagccattctactatgtttggagttgtgtgctgatttgggtttggaagaggtttgcatccactcggattcttcgactgcagtcaaagccttacaagttcagtcactaccctatgcttggggttcttatccaagttttgctaagtgtttgtctctgttaaactcttacaatcagtggtcagttgttttcatttcccggtctgaaaactcggtcgcagatcagcttgctcatctcgctcgagtga

SEQ ID NO: 4142 - DNA, 1100 bp, Cannabis sativa
attcttttcatagagcaacataactgacattttactaactacccaacaaaagcaatacaaaatcctcatttgttacaaagcctacagagctgaaaaatagtaatgacaagggaattggcaagtgttatcaattatgcctaccaaatttctctttaaagaaaaagtaataatagttcatgctcacctagtactataattaatatacacacaatcaaaccgaaaagcaaaaactgagaaagttttccaaacatataacataaaattttgaaaataaaaaacaggacgaactcctcctccaatacaaactgcccctaggaaaagccagacactttacaactgattcaaaacggactcacctgatcatatagaagctcagagtctgtgaaagcatacactcggcgaatattattctgaagagcttccgttagaccgtccagcagagctaaatagtcggcaacagaatcctccacatgaaactcaagctttttttggatcttaatcacagggaaagtggatgatctttccataaacaccccaatgcctgacatcccagaatttgagtctgcaaagccatctatggactttcctttgaagaacatcttcacagcaaattcatcaagctcattgcttgtctcttcttcttctttatccggttcttcagtttccttccatacctcttcgtcttcacagcaactcctaaactcttcttcatcttcttctctgaacaaattcacagaagcttcacggcaaaaaactgtcacttcttccattaattctcttttacaaaacttttcaattcagccaacaagtgtgcaactttcaacacttctatcttggacttcaggctctaaggtccaactacaacaacccccaccaagtcaaacggaagactctgttaaagcatcttctttctcaaacaatcttaaaacaattctacaaaaaacccattaaaaaatcgatcctaaacttcatcttgtagcatcaaccctcctataagacaaaaagaaaatacgtcatttttaacaggaagaaaagccctcataaaaatctttgaaaaccaataaaagaatcacgctttattattcaaaaaatcaagaata

SEQ ID NO: 4143 - DNA, 1713 bp, Cannabis sativa
ttttttttttttttttatgttgaaagggatactttctctcatctctaaaacaaaaatacacaaaccataaatctattttttttcatcattttttggttattaggatttttgccccaaattatgacctatgtattattatatagcctcaacttttcagtccgttaataatagtccctgaactatttacaatgctgtaaattagtccttctgtcatattttcttacatgtggcaaacaaaatgatgacatgatttcttagcgagttactacatcaataccttgtcaacgccacatgtgtaattaatttgaaaaaataatttaagttttttaatttagttttatgaagttttcctaatcattaattaattaatttaatgatattttaaaaatgtctatttttttttattttttttaaagttaaattatacacatggccctgtctatgttatcattttatttgtcacgtgtgtcaaaacttgtcagaatgaccaatttacaatattgtgaatagtttaggaatcatttgtaacagactgaaaaattcaaggggcacaataatacatatgttatagttcggggaataaaaatcctaaatattctttttttttttaaaagcattgctattagataccagtagtgtctatcactttctataggtggtgccttgcattttgttagcgatattttttaaaaattattttcttaaattatatgagattcgatacttaattataccaataataatatacattgagaaaaatactaaaaactaataataccttttaacatttctctttttttaatatacttctaatctaataatttttttaaaatattttaataattcaaaatctaacacaaaatttaatccacaaaaatattcactgaataccaattcataatatatattttttttgggagaagtcccaaaaaagttaactttgatgcagattagttcctaaaattaaaaaatagtgacaatagttctcaagctcacgttttttataagtcagtcgatacccaatttaacaatcccgttaagtactggcaagaatgtcacgtgttgaagtattattggtccaaattttaattttaattaaaataattaaaaataaataatgaaaactttaatattattttttattttcttatttttttctccactgtttgtgtttctccttcttcttcatggggcacaaatccaacccatccatggccatggaaaacacaacaactaagaggcccaagaacatactgctcattggccacccgatctcctcaactagctgcctattttcctttttattattttcaatcctatgctcatcatcttctctctttttcccccttccaccatcattgatccaaaattcaaaaatagaggttggctcgtcgagcttcaaaaatgcccacattagagccatggcaaggtgaggcttcgacggcggggctggctacagacaagggccaaagctcacggtgacagagaaaattagcatatcggagcttgggctttcatgaatcaaagatggcggtggcttgggatctcgcgagtttcccttaactagtttttcaatttgggtttcatgaatcgaagctggatatggagacctggacgatggagtttcaggtgacctaaggcggttgcgatttatagatagatgatgtggtttcaccattaaatctgacaggagaacggtgtgtgggggggggg

SEQ ID NO: 4144 - DNA, 1162 bp, Cannabis sativa
tgaatactaggctacagtctaggatgggatttaagaaagtgttggagaacgcgtagaatactgtggttataagtgaaggagacgcatcaaatcaaattgttgatccaaccgcctctttagcaatagaaatgcgagaaataaactaatggatgactgcacaaaataagcacaatgaggaaccgtaacccctcaccgaggagaaatttcaacaagaacaacgtatcgctaaggagaggcgtcaacatgatcaggatgaaaactcaccacatcattaggacgttacacagtatttacagaaattcatgtaagaaatggcagatatgcacgctcaaataaacaaaatgcaagcaccgcatgacactagacaaacaagtaatataaatcaagtaaggaatgaagagatactttaggagcatttgcaacaagtatgaatctctctaaacattgcaaaataattaagaaatgaatcataggtaatagcaattaataaaaagcttcctaaagagataggatcaattgttgcaaagaaaaaaggatctgattccttatcaatttttgaaaacgttgttggaataaagcaaacacctcaaaagtactttgatcaataagcaatgacaaataaaagaaaggagaacattgcattgccaaagaaatatagaagataccaccaattatgattcaatctcagcttttgaatccagtgtagtctaaagatgacttgttacaatggaaagaacatgttatgagggaggtcatggctaaaattggagaagggaaagtcgtggagctagatgatttaaaaagaggaagcatgaggaatttagctagatctccattcaccaaatggatcattgaagagtcgaagccttaggacttcacgatgctaaccttcacattgttcgatggagaagagaattcattaaagtgtgtgcttcaattcaagcacagtatagtattggaaaaaaaatttaaccccatgattagatgaaaagcctttctcaaccaccctatcaggatcgagtctatatggttcaaatagttgaaggaagggtcaattaactcatttgatgagctcatacaagatttcaccatgcaatacgggggaaatgcaaaaagtagtcaagaacgtaaagaccattatcagagagagagagagagagag

SEQ ID NO: 4145 - DNA, 2025 bp, Cannabis sativa
aacgttataatactataataaattaaataaaatatatgcatgcatggccagtactacatatacattaattaaatcatctatcatagtataaatatacatatatatttatttatttatttatttataattatatatatgtatatgaaactttgatcgtttgcatgagttggaagaaattaatgctcatatatatatatatatataaataaaaatatatttattatatttcttccaaatatatatcataaatggtctgtctgaaacgtctgtaggatatgaagcttcgtatatataaatatatatattttttttgaaacatatatatatatatatatttactcgacgaaatttcgtctttctaaattacacaatattatcctgcaaacaaaagaaaaagaaatatttgtttgaaaattaaacgtgtattttgtttttatttttatggttcatactattttaaaacatgtattttataaaagtaatgattaattaaattttctgttttgttatttttacaattaataacactaatcgtaactatattattattaatggtaaaactaacaataacataacacataaatatataatatttaagtgaagaaaagttgttggattagaagcctaattacaagtacaattccacctataattatgattaattgaagtaaactaaataaatattgcctttggttagttggaaccccactcggtcaaatttgcaatttccccatgcatcgagtcatgagctaaaaaaaatatgaatatatataataaaataatgagaaatactaaaaagaatagtaaaattattagataccagtgtttagtattttttaattaatgttttatttaacaattaattagtaatatttcgtaaaaattattacattaaaatattatatggaatctaatatttaattatataaatatcgttattgatcatatattctctaaaaaaaattaataatgtttcaagtatcatataattattgataaatttaaaaattaaatctcataaaatttaatttaataattattatgtaatagaatatatattacaaactataataaaaactaatcaaaaaaataatcttttaaaaaatatgttttatactataataaatttttttactttaagtaacaataaaagttataactaaaagtaaaaaaattggattaaccataaattaattattatttttatattataatctaaagttataattattacatgtaattatagtcacaatacttattgtgattaaaattaaattaataactttgtatctaaatactatatttagtcataagtaactaaaaatcacatttaatcataattttttttattataattaaaaattatcattaaaaatagttttttttatggtgtgttgcatcggtgtcaaatttagacattaatccaactataaaaacacaaaattactttttcaagacactattatgaatttgcccttacaaatatttttttttagaaaaaaaaaaaaaacagataaacatgattatttcttaaaatccatatttagacaaaaccattcaattaatttttaatattaaaagataataaagaaaaagggttaatacttaataatctcattttcggcgggaaatccgttgattgcgctacaataaagccctatcacatttcagactgacctttttgaccacatttttcctttctcactataatttttctttttttttagtaaaaaacaaaaacataattgaacataaattacgtaaatttgcatgttactatgttttttttttcttccttatttttgtcaaaaatatcaaaaaaaaaaaaaaaaattgatttttatttcactgcctaattgtcggtgactcagtggagcttcgaaaatcaattccagataggaaaataaataaaatgggcagaagctaattttgtcggcctgtctaatttttaatctcaaatttttatgttttactcttttgatcattatatagactcttgatctctttctctttcaatacaattct

SEQ ID NO: 4146 - DNA, 1031 bp, Cannabis sativa
gtgttacaataactgtaatttgtttcaagtctagcttagctgatattcattgatgtaacaggtgtgttgtctttattttgattcagatatggaactatattccgaacaagcatagcaggtcgaccagttataatatcagctgatcctgaattcaataatttccttttccagcaagaagggaggctagttgagatttggtatttggacaccttttcaaagatatttgctcaagaaggcgaatctcgaaccagcgcagttggtgctgtacacaagtacgtgcgaagcttatttctcaatcactttggtgttcatagcctaaaggaaaaacttatacctcagcttgaacaagtggtcaacaagtctctcacttcatggtcaactcaacattctgttgacattaaacgagttgcttcagctgtaagttaatttcaagcttactattttatctaacttagcttcataatcatattcatagtgttaatctgtaatttatcacagatgtttttagactttagtgccaagcaaattttaagttatgatgctgaaacttcaccattaagattgagcgaggcatatagtagaatcttaaatggtttcatgtcttttcctgtgaacatacctggcacagcataccatcaatgtctaaaggtaagaatatatcaaactttctcttctgttttgtgttgtaccattcatgtctatagcagcatctgtatttattatcaggaccaaaaaaaggtagtatccatgttgagggatatgctaaaggagagacagaactcgcccgagttggatcggggtgatttgttggatcagatttataaggacatggaaaaagagaagttcttatctgaagatttcattgttttgctgatttttgggggcctttttgctacatttgagtcagttactgctgtgatgacattagctttgtcaatactttcggagcattcttcagtattagaggagatgatagtaagtagacatgttctgagtttgagtttaattttctttttgtacagatcactgtt

SEQ ID NO: 4147 - DNA, 670 bp, Cannabis sativa
atattacgaaagtgaaagagaaacattttattgatctgaattgttaaatgatacagagatgggatccagctatatatagttgagatcctttacaagagataccagaagttagttaaataactaactatactcaaccgacttaaatgaaactaaaaccagaaaaggaaagttacagtggtaactgtaataacagaagctaacagcaactagggaccaaaataactgtctatattcaaatcctaatacgtaaaaatgtaaaaaaaaatattttttgaacctaaaaatgtaaatattttacaaaaaatggtgccttatgtaattattgattgtaacaataatattgatatatatatacaagactcttcgcatatgaatccaaactttgttcttaaaaaattttcaattcttccagcatagttttaaaccaattcattaaaccttttcacacaaaaacaaatataaatacatatttattttattaataaatttggaaaaaccgaaaaaaatttcacacaaaaataaatacattcaatatttagaaaatatcataataaatattttgtcaattttatcaaatatttcaaattagcattttacaaaacctttttcacataaagagtagatttcaagaagttaataaaactttgttaattaatgaaattcttatcaa

SEQ ID NO: 4148 - DNA, 2663 bp, Cannabis sativa
aacctataaataatacaaacaaactttccataataatatatgaaaaaaaataattcaccgatcagactgcagtaaactttatcacagaacctacttcactaacatgcatagacatactaacttattacaaaaactattaaatttacaataataatatgaagaaaaaaaaactaacctcaagcagtgcaaaagaaacaacaaaaagtagttagcgatgcttcgggccggtaaaatagggacttaatttcataaaagtaaaaccaaattaaaatatgaacatatatatacacaaataaatatataaacacaatttagcgatacacatatatatacatacacttatacttaaacatacatatatacacatacacatacacatacatacacacacatatacacatacgtatatacacatatacatataccctcacatacacatatatatatatacatatacacacatacactcacatacacatatacatatatatacatacacccacatacactcacatacacatatacatttatatgcatacacccacatatacactcacatacacccacatatacactcacatacacatacaaatacatgcatatatatatacatacgcccacatacacatacatacatacacatatatacatacaaacattatatacatacacccacatacacatacatatacatacatacatacatttatacacatatatacatttatacccacataaatatgcatacacatacatacacaaatacatacatatacacatatatacactaataaatacataaatatacatacacatacatacacaaatcaatacatatatataaatatttcgaaaaattaaaaaaattaaaaataccttaaacaaattagaggaggtgggggttggtggttcgtagtggtggtcggcgtaggtggtccgtcgtcctccgcagtggtcgtggtgggcgacggtggtggtgatggccaacgggggtggttttttttaaaagaaattgagagaaaattgagagggattgagatagattcagatagagattgagagagattgagagaatgagatgaaagagagagagggacggagaaaaaaacaaatctgaaaaaaaaaatggggaaaaatgggggctcatcgcctctattatataaatacttttaccggcgcattgaaatacaccggtaaaatttgtccataaaccctaatttgaaatgtaccgttttgattaatacttttgctagcatattattacgccggcaaaagtatctccacctaccaataatttccacgcgggaagttttctccccaaaatttcttgtaggcagtcaagattcccaccaaatttttttacacttttaccgacgcagttatgcaccagcaaaagccttaaagacgtggaaacgtcctcacgccttttggcagttcatttttgatctttcaccggcgcacatttaataatacgttggtattaacatcttttgccatcgcataattgcgccggcaaaaggtattgctaaattaaagtgaaaattcagcattttatttatcctgacaacttttatcagcgcaattggttaattgtgccggtaaaagtaagttttcttgtagtgaatggtgaaatgggggtgtttttctatggtggttggcggagagggtttgagggtttctgggttggctgatcgaatgaggaagacaaatggatgctagggttataaacccttttggcattggttatttccaaataaccgacgccataagaggtgcaaattcctttctatagatttccaaccccctatggcgttggttatttattactaagctgaaaaaaagcgtctaaaggcttattttatagtagtgaatacttttattcgcggaacttttagtgacaatatatgaatattaatttataattagtcacaattttttcacttttaatcataaattttgttgtgactaaaagtaagatttttttgttacttactcattttcttaacatctatatagctagaataataatgatgagcatatatatatatatagatggtttggtatatgaaaattaaaaggagttaactaattaagaagaattttgaatccttaaccactacacgcgaagtggttaattaattaattgtgtcagtaactctatatgttctagaataacatactaaaaaaatttaattaattatcatcgtacatatatttattttgagttaattgtaccaaaattttaatatttttactttgcttgtctttaacttttcaaattcaaatttttgcaacgaaactctctaaaaccatgataatgttagcagtttactgtttctattcaattttgattgttaactgacatgctggattatccacatgtatacaatatacacatggcacaatcctatttgtctatgtaattacattaattaaaaaataataataatattttaaagtgaaaaaaattaaaaataaattatattaaaataaaaaattaaaaaaaattacataattctttttttttcttctctatctccgtaattccctctcttcccaaaaccactcccaccataatcaccatttctctccccccaaaaccacttctctctctcagtaactcccactctctccaaaactactaccaccatacccaccactac

SEQ ID NO: 4149 - DNA, 4271 bp, Cannabis sativa
ctgaaagtttaagcctaaatttgattatgtttggttcctattttggaaaaagtgaaaacatataagttttagatatctttttcctctttctaaagctttttgaattatctcgtttggagtatgtatgtgaaagttatgtatattttactgagagatattgaagcgagaaattaagctagtcgcgactaggtctttcatggtcgcgatgaattatgtggtcgcgactatggagtttaggcagaaagcttattttttgagattaacctatggccgcgactaggctttaggtagtcgcgtctatgggctaaagatgatatttttgggtagtttgtaatttcgccattcaaagatatctgcattattttttatataagggttttgtgttttagaagcaaaatactcagaaattgaaccctagaactaacaaaggcaacaaaggaagcaattgtggtgacctggagtgagatcaccaactagttctttcttttccctttttatttctttatgttaatttctgtttcaagaattattatggatgtgaacttgagtgttatgaactaaattctcaatttagggatatgatgaatgttagatgatgtttcttcaatttagttaatgcaattattagttttaaaatctttcctatattgtgtaacttgttcttatttgtttttaattacatattttagactgaccatcttaaatgtgatttatgatcctaatatgaaatttgagaagtgaatattaagaatgctctaataggataaacataagttttgatgtaaaatgagactatttacatagcttatgtgatttttaaattctgaatttaatgcaagttatatgttaatttacttcagagatgtaagtaggtatgatatgatttaagaccttaatgatctgagaagagttagggttattttgataagctatcgtcaccaaaagggagagaattaataattaacattaacaattaggaaactgaactaataggattcatattcctaaacatttatccataattaattatagttttattattatttttctgtttttcaattttcagttattaaattattcaacatttttatcaattttaccaaatagaaacataaatctaatttagtggtactcaataacattccatgtggatcgacctcacctatgtgagtttaaaattttaatggattatgtatacttgcgtagttgtttacaatttacgtaacaagttcttagcaccgttatcggagaatcgagtaaatattaatattacaataattagattaaattctactttggttaattatttttgcttattgttaacctatttcttttcaatttttcttactctatttcaggtattgggagtgtatgcgacgtcaagtaaaaagtgtaatagtgcttgttgatcctgaaattgagaagatctatagaagaaataaaagaaacaagaggcaagaaagaagtgcagtgaggactgaactagaagcattcatggctgacaatagtaatggcagcaacaacagtaacaatggaggtgacgtagaagaccaggcaaacgatcgtaatccacctgaccgtagtttgagggactatgttcttccaacattgacgggggttcagtcttatataagaccacccgtcgtagaagccaataattttgagataaagccagccatactccaaatggtacaattttcagtccagtttggtggactaccctcagaagatccaaacctgcatctatctaacttcgtggagttatgtcaaacatttaaggtgaacgaagttagtgatgacgccatccgcttgagactgttcccattctcgttgagggagcgagctaaaatttggttggtgtctttgccacctaactccattgatacatggactgacttggcaatgaagttcttatccaagttctttcctctagttaaagttgtcaggctgggaagagagattaataatttttgtcagcttgacaatgaatctctttatgaggcttgggagagattcatggatctcattagaaagtgtccacatcatgggatcgagaagtggatgctggtccacaatttctacaatgggttggttggcaatacccgaataatcatagatgcagcagctggtggggcttttatgagaaaaagtacgaatgagtcgtatgacttgcttgaagagatggccatgaataaccaacaatggccaactgagagaagccaattaaagaaagttgcgggtacgcacaaagttgatgccatcactaagttgacagcccaagtggaagccttgactaagttgatgattgcttaggtaaaataggctcaagttacttgtgagctttgtggggggcctcacacatatgaacctgcccaatggatgtgaacagtttgccaatggatcaagctaaagccattgaaaactattctgagaacaataactatgggtgcaactaagaagggagtcatcgtaagaactatcaaggacaaacttcaaatcaacagcaacaaggcttctaccaacaaagaatttagccccagcaaagccaataaccaagttctagtggaggctcaaatatccaagctgattcattgctccaattcatgatggagactaaagcctcgattaaaaatttagaaactcaaatgggatagttggctactcaagtggcaaaacaagcttaaaaaattcacctagtagtagtgaggtaagggataaggagcagtgtcaagcaattactttgagaagtaggaagaagtatgaggggcctagtgagaaacaacaagtggaagaagtagttcaggatcaacaggcaccgataccagaagaaaagaagactactgagggtcttacatcaaaagaagtgtcaccacctatcaacatcgagcattatgtcaaaattccttatccgcagaggctctgcaagaataacatggacaagcaattttttaaatttttggaagtattcaagaagctgcacatcaacgtcccgtttgcggaagctttggagcagatgccgacttaccttaaatttatgaaggagattttagtaaagaaaaagaagttggaggaatatgagacagtggcacttactgaagagtgcagtgcaatattgaagaagaaactaccgtccaagctaaagattcgggtagtttcaatattccttgctcgatagggggttcagttgagacaagggctcaatgtgacttgggggaaagtataaatctaatgcctctatcaatttttcaaaggctaaaactgagagaagatcatcctacaacaatatcttacaaatggcagaccgatccattactcattcttggggtataattgaagacctcttggtaaagattggtaaattcattcttcctgctgatttcttaattcttaacatggaagaagatgaaaatattcccatcattttgggaagaccattcttggccatggggagagctttaactgatgttcaaaagggggagttaaggttgcgagttcaaaatgaggaaatgactattaatatctttgccgcaactaaaattcccacttgttgtagagtggaagttataaaggagggtcaagaagaagtagttgttaaaaagaagaaagggaagcgcaaagaacaatttcgcactattggacgacatataaaaagattaatgtgtgaaaattgtgaaggtgagtctcatcttttggatagcttcgacataagcaacacgggaggatagttttcttcattcggtacaagggctctgatggatgcaagaggtggactttatcccagataaagttttaaagaggaaatgaacatccagctatatgatattaacgacaatattcttgggaggcaccccaagttttacagttatttttagtcaatttgagacatttgtggttttatttttatttcgtctttaatttgttttagtatcttttcttctgcaatacacaaacagcggaaagcatgcaaaaaacatgaagaaaaatcagtcgatcactacagtggtcgtgaccagcaaacagtctagtcgcgaccaatttcatggttgcaacaccagaagttacagagaagtccaggaaatttttcctgttccagtagtcgcaaccaagaaagttcacagtcgcgaaaaatttttatggtcgcaactagggaacctagcagagaggctcaaattttagcattacagtggtcgcaaccacaatttagctggtcgcgacgagggcccccaatcaactttaaaagccccacgtcagaaacaaaaaaaaaaaaaaaa

SEQ ID NO: 4150 - DNA, 2052 bp, Cannabis sativa
ttcatttattaatgtctttgagtttataaatttgtcctagcagatactattctagagaggatacagaggattctgtcaaatatataagtgggacaattcttgatgatcgtcctattcgtgtggattttgattggggattccaagaaggcaggcaatggggccgaggtcgaagtggtggacaggtgaattgttattcctttttcctgcattgaccagttactaatttatacgtctttttatttagttgttcttctttgtacttatgcaggtccgtgacgaatatcgtacagactatgatccagatatccttgtaaatttgtctgttacagtgtctgcattgtcattttctattatttccctgagtccaaagaatgcatcttgatctttcatgcaatctacactgattaattattaaaattatgtgtttgtcataacattcagtttttgtagagtgctcctattgtctggttttagttttcacatgattacgtaagaagtaggtacagttaaccatagaattgctaccaaaaaaaaaacattatgtagtgttgaagtaagcttcatagctcacagtttgttatggagatatgcttgattttgatgacagatgggtggattggtttgttttggaccctatggaatagatgagatataataagttttattaattaactgggctaattaataagcctaaatttaagtaaaaggaacatgataaggatatagattaggtacacagttgaaaggcattatgtataatccatctttcatcctgccaatagtactttggtgggattttaaagcagaaccaatttcgatcttttgtgcctgattagttagaactaaagttttgatatggataatcaactaaccaatatgagctaaatgctctatggatatttatatcttaattaaattataaaaattgttaggttcttgtgtgtttggcaatatttaaaaatgtggccttgttctaatttattattacttttatttgcttgatgttctaatgtttgtgtttgaaaaaattgcatatctaaattttgagttgaaactttctactgtttagtttccttaatatgtaatacgtagagggggctatggaaaactagttcagaaagaattggaagctcagaggcagcttgtggattatggtgctgggtcgttgggcactttcccacctgtcatggcacctccatgtaagttgtggagagctcttttatagtataattgcatgtacctataattcaaagcttcaaacttttatttcttgctcaaatacttatcttcacttaccttatagaactagagcttttgaagaagcagatgctgcttcaagttatcatatgaatttttcttttccacactattttagttttagtcatgccaatatgctggtgtatgatcagatttcccaaacttgttcatttaatttatttgatatagacaattattagtttcagttacattaagatgctactgtgtaggattagacgacccaatttttacacatcaccatccttaagtttatttgaatatcatggaatgatgtgctgtatttcttttccttttcataaaagatattaaattgtatttatgttttgctttaataaggtcttgtttaagttaaagttccatttgtaacaaagaccagttgtgaaggtcggaatgtcttagtttatagttgtttttaaatgtatgattgttgtcaatattccataacttgggttatgacaaggatagtaataaaattatatttgtacagtgaacttggttgaagacataccctgtttggcttgatcaaattgtcgttagtttctttatatacatgagagttgtgagctaatttttcatttttgtttgttttttaaaaactcttgaatgtgtagaggtgaaattgtaaatattatgtactatatttgtaatatgctctcgccttttattcctccagttggtagacaaggtggaaatcatggtcatgggggttcttatcggaacagaggtagttattctgaccacctatttctgtaatctgaatatctgacaaacctg

SEQ ID NO: 4151 - DNA, 504 bp, Cannabis sativa
ttatttattttaatttattgttagttatgtgaaggaagtatattttaataaaagttaaataatttaatattaaaagtaattaattaatttaattcacatttttgcatattaaattagattagatagaattattgtaggaattagattggatccaaattataaaatttacactaaatacattatgaacaaaataatgtaaattggattggataaacacggtaacaatatatggtgtaatttattattattattattattattcttgtcgatagtataataaaaacaagctaaattactaaattataaacatcaaatatttttttgaattctgcttgtaatcttttttaaaatcataaattaaacttgtatattataaaattgtatataatgataattttatcttaatttttgtattttttatttaataaactaacattaacctaatttttagaatgaacagataaaaaatatatgtactatatataaccactctagcaataacat

SEQ ID NO: 4152 - DNA, 674 bp, Cannabis sativa
acaacattaataaaagaaaactaattaaaatacctaaaagtaactgaacactaatcaaaatctaagaaagtaacaaaagaaatttaaaaacccaaatcattcagtcttaggctttgcgatattcaacttttcatttcattttcatatcagcttaattcaacaaaattggtatgtatgtatcactcattgggaccaatttctttcacttacccgtaaccgtaaggaatatcattatcatattcttgtatcggggatttatagaaactaaaaacccaaagctccatgatacaaaaatcaggactaacacataaaattgattgaaatttgttaatgcttaagattttttattttaatattttgaatcatgtctaaaaagacaaacctaaaaagacaacttgttcttcctgttgattcaatcgggagtgtgattctgctcctctgtttgtttacgatggtggcggtcgtcgtcattgctacctctaaacttgccatcgtaggcagtctcgaagccttgctcgtgatccttttgggggagtcgattgagcccagccttcgttcttatttgtttcgattctcatcaacctctattctgcttcgtaagtggggatgagaaatcgaagtatggactttgtgaatgagagaggagaaagaaagagttgcatctgatggtgtgt

SEQ ID NO: 4153 - DNA, 929 bp, Cannabis sativa
atagggagtatgctcaagtatgggacaattatattgcaccctgaaattacaaagtcaccctattttattatttttattctgtataaaatatatatttataatttatagtctcttttagctaattttttccctttcttctcacactataaaatggatatatattaaataattagacaaaaaaataaaacaagaaaatatatgaaatcttattagggtatacgtataaataaatatacataatttaaaaaaatatacgaaaacaagataaaaagaattattgaatattacacaacgtaatgtaaaagaaatatttaaaaaagaactaagagtaaattttaaaaattataagttgatttttatatatacttatattggactgcctatataaatgattgggggtgttattaataagacacagttggcccttagttccagctggggtttgaaccccatatcctttactcacataagtgagattgcctcaaggggagttgcttatgcatgtcaaagttatgatgaagttgattactattctctacttccttttatcctttatctatggaatatggtctgtataattgagaaggggagagaaagaatacaagactatagcagaaatagagagaataaggaagttttgcagtctgcttgttttctttcttttcgtaggagttataaggtaatggtattgtaatccatttgcgaccaggagaagtaatttgcaatatccttatgattaattagaattcagtcagtttggtggagtagattatgctggctatctagtacttcatttcttgtaattttgaattttttagttattgcgccattctattttggtagcatttatttgagacttggatatttagtttttcctttttaatgactgtagggataacttacaactgctgaggcaacgatattactat

SEQ ID NO: 4154 - DNA, 1626 bp, Cannabis sativa
atcctagtatattcaaaagatattaagtgtcaaaaaagtactaaaagagaagaaccatttaataaaaagtgacatttaacataagttatcttcctaaatgtcccataaattaaatatgactaaggaaaagaatactaaagtaacgtttggttagaatgaatgaaaatataaaaataagtataagaataataaaaaaaaagtatgaaatggaatcaaaattgaaacatataaaataaaattgataaaaaaattattaaatttttacttatttagtattaaaatgatcttttcttttatttcaaaatgaaatagttattccacacaaattatagaaaaatcatttaaatggaataacattccaatatttaaaatgtatcaaataaaggaatagaataaaaaattattttctttccattctattctatttcattacttctaaataaatcctacctaaatctttttatacatggaatttgtatttaaattttaactatagtttaatttaatatgatgtaaaaattagtataaaatgaagtctaaagacacatataaatatatatatatatatgtataatatcaaaaagagaccaaaaaaagaaaagaaaaaacaaaaaaaaaaaagatgactttcaatcaaattacaagtcacaatacattatgtattcttttggagggacctacttctattgtgaatctttctaaatttaatttttcatttttgctaagataatcacttaattatatatggcaagctcaaagattttggacaattatataagcaaaaataaagatcttaagtcaagtaaagcaagttttcaaagaaaagtattatttaaggataaaaagtttttttttttttaatttaatacaacaaaagctaaagagggttaaggatattatggtaatttcacatgagaaaaagggcaaagaattagatggggacaagtccagggcagagagctcagctgagggctcctcactcacattctctgtttgggttttggggagaaagggcttcgcccaccactacaggtacattctcagtcccacagtccaatcatatcacgccacgtcatattttacatccctgtaaagcacgggcataaaacttaatccccaaacccatcacagtcttagcatatctctttctctctctagaaactaaccctctcaagcaaaagaagaaaccctttctctctctatttctctctcttcgtcgttgtaagccatagccaccgcaccaccgccgccgagcttgaacaggatacccaattgggctggcggtcgaaagggacggacgcgcggcgcgtttcgtcgatgtattttcttttttgttaaagcttcattttttggggggagggggtggggttttggattgtttgaatctcgaggatccaattaaaaggttgggaatttgaagatattttagagtgtggattttcttttgtgggtttgtgagaaccaaaggtgtagaaatgtatgtggtgcctccgcctcagcgttcggatccgggctccggatccgcctttggttccggtgatttgagggtttatcaagcttggaaaggcagcaatgtgagtttgttattgcttttttccttttggttcaaatatttactgggttttt

SEQ ID NO: 4155 - DNA, 870 bp, Cannabis sativa
aattatttcctaatatgggttttcatcatattttaatttggtatttgcgttctaaaaccagacacgacagcaagtcaaactcagcatatacttcattggacctcactatattggatcatagtaattattaaattagtttttctttttcaaaaaaaaaaatattaaaatcatgacagtttatgtaactagtttatataaacttttggaagacaaaaggttgagtcataccgaaattttttttattaaaaagaactatttttagtattgaagctagaaaaaagtttaaatccatatccttaagaattaaatgaaaagaaaaaacaattcacattgttaactgttagtcgatctatataatatgtacaaattatatgaatatgataacgaaagtggtaatctcaatatttatttctattttctctataaactataattattggaagattggattttttttttataaatcaacaagtttattattaatccacaatactttgtacaatcatcctttcttttcttttttttttacaaagaatgaaaccaatctctatcttgttggccaattttttttggccaaaacaattatatcctatgtttaacactatttttgattctttgtacaattgcctctttactttctaagtgactatttcaaatttggtcatttctagcatgccaaatggagtaaaccaaattcgcaacagctgctgctataatattccttctaaacttactgatttttgctttatgtatccacttgagtagttgagagaggttgctggttcatgctctccatgtcaaccatccttttacctgctgtaaacaatattcagtaaagggatagctaaaaataagtgctcatgtgtctca

SEQ ID NO: 4156 - DNA, 989 bp, Cannabis sativa
atcatacttatttttaaccttcttgtttattcatatgcagctatgtctcagaaggtgtttcaggctatgaaaagaggtcaagtgacagctccagccagaaccttccacccaaacgatcaaagggtggtgagataccgcctaaggagaaaagctcgatcgagtctcctatcaacgtctctgaggaggcagtgtctgaggtggagccaccaaccaagaaggcctccaagtccaaaggtgccaagggaggtagcacacatgggtctggtttgcccaagccctctaacactcctatcatgctgaatcttgagaccaagaagggcaaggagatgcttccgtactaccaggatctgctactttctaaggtgaacgaccagctgttcgaaagagatgagatgtctgtggagcttctgatgggtgggctcctgaaggaggcaacccgagtaagtatttttcctttggtttttatcttgtccctatagatgtgtaggttttaaccttttcttgtacagcttaatttgaagatggcttacgcctacttctgagccaagtctactaccctaaaaaactatcaccaccaccaccaccaatctgcagaagaaggtggatgcggccaagaaggaagttgaggtcgtaagggcagagctaggcgagatgaacaaacaactttgggctgccaataattgagttgagcatttgtagaaggaaattcaagagaagccatctatcgcccagcttgaggcggatgtcaaggttctgtccaaagaggtcaatagtcagatggatgagagggaaagtctccatactcttcttgcaacctaaacaacggataagacgagcttggaggaggatgtcaaatttaggcagatgagggaggaagagcttctgaaggaggtcgagagtttagagtttgtcaccctggaagttttgtacgacttctggaaggccaacccagaaggaaactttatttacctcagtgataccaaagaggc

SEQ ID NO: 4157 - DNA, 1143 bp, Cannabis sativa
acgtaaagaatccaccaatcatgcataacatttgtctcgttatttgtgtacgacgtggggaacttaccctataaaattaagatatatatttgttagtaaagacctaatattataggctatttaataaagaataatttttgttataatacttattaattattttagcagttgtgtcaattcttgtaattgatcttctacggtcaagaaactttgaataaatttcatgacatagtatctacattatttattatctagttgttctggatataccagacttatccactcgataggtctatcaggataatttgttattatattgtaaatggtaaacatcctagacgaatgtttcaaagtcctcaagaagtacaacgtgaaacttaatcccctaaagtgctcctttggagtcagctcgggttcctaggctttattgttaattcccgaggaattgaagccaatcaagagaaaattcaggccctcctggataggatatcacctacaaaaactaaggaagttcaaagtttgactggtcgaattaccacacccagtagatttgtttcaaagtcaacagaaaagtgtgttccgttcttcatcatcctgtaaggaaataagcaatttgaatgaacagaggaatgcgaaaaaaccttgctatcacggaacatgcagtaagtgtcgtactgatcacagaatagaacaatatccagaatctggtctactacatcagcaaacgactcattaaggctaaaggcagatatccattgatagaatagctcacctattggctaatcttagcaacaaggaagctaacgccttattttcaggctcatcctattttcgggtatacactgaccaacgattacgtcaaatattaccaaagtcggacgccttaggacggtatctcaaatgggtagtttagttgggccaatacgaaatcatctttcagccccaaacaatgattaaaggtcaggccttagcagattttgtggttgaatgtacgggtaaagaagaaagcacttccaaaagtaacccagagccagtacaagtacctcagccgaaaaatattaaagacaagtcaacttggaagttacacgtagacgggtcggctatggatcagctatctgacacacgaatctcccttgtcacacc

SEQ ID NO: 4158 - DNA, 1690 bp, Cannabis sativa
aaaaaatataaataaataaaaacatatatagaaaatataaaaatgttagatttaactggtgtggcgaaaggcgggaagtgggatcatgtgggggcaaatgaccccactcaactttaaataaattattttttgcattttttttatatattttcatatttagtcccacaaaataaatttttaatttttgtcatcatatatttttaatttttttctttgtaaattataattttttatttttattcaacatttttattttattctataaaaaatttattttcattattattctctcatatttatttatgtccctgaaaaaaatttatatttttctttcttataaaaataagaatttcttttattaatagttgcagaaacaaattttttttgcccccactaacatagatcgctagctctgtcactagacgtgtcaccactaaatgtcacttttgccagtatatttttgtactagcaaaaatttagtattgtgctggtaaaatagaatttacttatgatgtgttggcaaattaatgttggtattagaacttttggcagcacaaaataaaaactgctcgtaaaaatgatttttaccagcgcgtaaatgcgctggtaaaatttagattttagtcaccgcaaatgtgcgttggtaaaactttgacctttttaccagctcaataacaaattgtgctagtaaaagtgacattttttatagtgcacgttaataaaaacagtaatattgttgtaaattagatacacaagatctatattattgtaaatttttttaaatattaaccatttatatttttaattgggatcataattttcagttatatgattaagatttttttttgacaaaagttatatgattaagattaattacacattatgtgtaagaaaatattggtaatttgagtgtgtctcaactatctcccttatttcttttgttttttcactttcagattttccacacacacgttatgttctcgcccttaaacagtttttgtggcattttctattatatatttttgaataatttgcaacttaaataattaagattcagttctaaataaatacttaaatttaatttaacagtaatgatacttaagttataattctagaattctcttaaatgtcaagtcattatcacatgtcatttttttattagtattatatttaatcttatttttaaaaaaaaaaattaaaatttaatgacttagaccaatcaaatattgccacgtggcaatttacttaacacttaataacgagatacctacaaaagttcagaaattataacttaagcattattactgttaaaaattaaacttaaatatttatgcgaaaaattacttgttcaatatatataacaggacaataaattcatccaactatttttttttttttttttttttttgaaaaagaagaaaaaacttttagataatcaaatcattcaacaaaacaaagatgggagcattactcgctcgcaaactacgatcagctataaaacaagtagatctcgttaaacagtgagctccattatttgcggaccgtttaataaactttaaagaaataaatctatctttcatatcaaccaacaactccttggacttagatataattctaccaaaataagatctcatgatagaagaactacgaatatggactgtatatatagccacaaggcagtgggactcca

SEQ ID NO: 4159 - DNA, 626 bp, Cannabis sativa
tgtaacccaatggttgatgcatataaactgtttcctgaagctcaccatgaaggaaagaattttttacatccaattgatgaattggccatgctttcgaaagagaaagactaagaacagtgcggatcgtagccggcttcaccaccggactaaaagtctcaccacaatcgatgccaacctgttgtgtttttccatcacctacaagacgtgctttatgcctttcaaaaacaccattagatttgattttatgagtaaaaatccacatagaccgaatcacattaacattcggaggacggggcaccaactcccacgtcttattttgaataagagcatcatattcatcatccatggccattttccaatttggatcacgaagagccgcgatcggagttcgaggcaacggagacctctcaaccgtgcatggaatattttttattgggtttatgtatcccatgctggctacgggtcatggctctaggctgtgggagatgaatagtaggaggagaggggccgagttgtgtttgggcaggaaggacttgtgaagaaactgggccaataggggaggacggcccaccagacgtagtgggctgctgattagaccggtccacgaagggagaaggctggtctct

SEQ ID NO: 4160 - DNA, 1986 bp, Cannabis sativa
aaacagatacatacactatacgatcttggtatcatatcccaaagatcttcaaatggtgcgaactctacccagatgcaacttacaactgacaagaaatacttaaagcacaacatgagatttctgtcatctgaatttcataactagagagcatattaactaatcatattctcgtcctaaatttaatcaaattcacagaaacatgtcaagttcccttatgggcaatagactcattacttgtaaacaaacatagcccaaaaccgtgattatccaagtaaccaatctattaccatataactaaagaaataagtgccgattttggcaaaacaaacacatcatataaagaagaaaaaaattgagaatggaacagataatggtacctcgaatcgaatgttcttatacacaagttcctcaacgttgctaccaaccgtagggtgggtagtaacaacttctccaaggtgtaatttgtaaagagtggtggtttttccagcgttatccaaaccaacaaccacgagcttatactctttcgcgggaaaaagcatgaaccaaaacttcgatacgaaagcacccatcttaatctcccacctaaaacaattcagaaatcaaaattgaaagtccctcttctgagaaattatattaaaggaagcattaaaagagttcaatttttcggtgaaattggagacatgcattcagatccaatcacctgaataacaaaaataagggaactgagaagaaaaaattggtccactaatttgggaaaacagaaggatttgaaaccctaattacaggtcttgatctcaaatatctatcggtataaatttatttatttttttcaaaaaaaaaaagaaagaattacttgctgtgagagattacctgctcagggaggatcggagaaggaataatatttatatattcaaaataaataagttgaattgttttgagaaaggaaggaaacgggaaatatgtttttgttgattgtcttggtctaagctgattaaagagttggactgggatgtgggtcccacattctattgcttacgtgttaaattgctgacaagatatccaccaaggctttcgacgtgggctcttccaccactctctaactattgtccttttttttttttaatagtaagcaaacccagagttataaaaggataggcctgtcctccactatagcagaggcagccattggaggaactcttccatccaagaaacaagaagttttacaacataaaatattcttagctattaaatgtatatttgtcgagtttggttgaaagaagacacctaaaataccattctcatccagtaacttgcgaatatcacagaccattaaatcccactccccacatagcttcggcggcctaccaagcattgccaccgccatgttacaatcagaaacaatactacactgctccaaagacagcaacctagccaattcaatcccatgtttgatagctaaaaattcagcagcaataggagaaaatggcttattcattaaaataccttgtgaggcaatgacatttctgatgtgattacgaacaacactacctgtactgcaacaatcagcccccacatcaattcccgcgtccatatttaccacaactgattccacctcccgagccctccatttgcacttttgcttagcctcacacacttgtccactaccctttttatcccaaaaatcatgcaaaaaaaatcagtagcccattccaacgccttctctccaataagaacaaaggttttatgcatcacacaattgcacatataccaagcttgccaagccaaacaataaaaaattcaaacatgtctttgggcagcagccccttcaaacgacacaagaaggagacaaggtcttcaccaccaactcgactaacaacttttccaaaaccacccagtttcctcaaccgcttactctggctacaacccaaatagcatggtaccaatcctccccataaaaaccgcaacgacaacacccactcacctcct

SEQ ID NO: 4161 - DNA, 760 bp, Cannabis sativa
aataacaataataatataccggtaaattgtaatctaagtcggtaggtgattgatattgtttgtcaataataatatatgaattaatgaaaaccttaattagttgttgtcttgataataaattataatcattatagatataaaaaaaaaattataataatcagttggtttccccaatttttattcattttattttgagagaagttgttgtctaaaattagtgctatgtgaattcggttttactttttatgtttctcaagtttatcggtttgatgaaatagagagtagaacttaaaaaataaactctaaccatataaaaaaataactctttattaaaataaataaaaaactctttaattaagaactccctaattttgttgctaaaattttaattaaaaatattattatctttttattattttataaaattatttgataaacgaaaattataaaatattactaaaataattaaatacaaattataataacttttttagctaattaaaaaacataataaaaaaaaatacccttagagatgttgttatgtaattgtttgaaatgaataatttttttatataaaaaaaacaaaaataataataatttatttattttacctacgtttgtcgtgatccctggaatctttgtagtactacgtgtgattcgtaaaaagaattattttttgtggtccttaaacatttattaaacagataaagaaatatgggaaattagtacataattgtcaccacttaattatcacatggta

SEQ ID NO: 4162 - DNA, 1444 bp, Cannabis sativa
taatggtctccacggtcacgccagcagacaagcatagctatacaacgcctgaggatatagaatttggctctctgcttcttcacaagatggctgcacttttgaccaaacgatttgcacggctcacattgataactattactgttgttgctgctgctgctgctcgtattactttcttttccaggtgccattatatatattattatatatatatatatatatatatatgtctgtgagctttgctatatatatcagagatcgatatatttatagatatatatgcatcagtttcaaatatttgccagtagtactgagattgctttagctttctctctctctatctatgctccaaggcagtaaatatgaagaggaaggtagttgttaggagacctgctgtatttatataaacattataatataattatgtaataaactcgttattctctaaaaaaataatataaaaaaaaaaagaaaattaccttttactcccttgatatatatcaatattacagcattttgttataaatcttggtagattttatgatatacatatttattttttcatttagccatagtttattttttgtggggtactatctatgcatatgaaggagaagaaaagtatcattggattttataagagcattgatattgagtttttgtagttttaatactttttataggggacccatgtaattagttaacgatcctctttaaaagttataatcttaaattataaaagatacttaattacactactaaatatatgacacagaaaaagatgataagtaccaatactatcttttaacatttctcattttataagtattaaataaaaatttagggactatatatagtgtcatacaaaaaaaatctgtggttttattatttttttttacgggtgttcattgttcaatataattataacatttcatttgtatttagcgtgtctaattttgttgtacatgttactatttggatgtgtttggtaatttttttttaatgagttttttatttttttaattagaataaaaatatttttaaaaataagttgaatataactgttttaactttttaatttttttaattgaaaattaaaattttaaaaattttaaaaaaaaaatcactttcaaaaattttttaaatagaatttttctttaattaataatatattggactccgattccaacctttaccttagaacgcgaaccctaaccccagccacggacccaatcccagaccccagactagaacccaaacccgaacactagactagaacccaaactttgagctcgaaccccagaccttaccctggacctcagactcggaccagccacggtcgcgtatccaaactcgaatcctggttggccctggtccaacctcaaaccaagaccacgaaccatggaccctagaatcagcctcagagcaagctcgaacataaatccaa

SEQ ID NO: 4163 - DNA, 1408 bp, Cannabis sativa
atctcatattagtttgtttttaccaactaagaattcgatttagctaagtgggtaaaaattaatcccactcataattcttttatttcttgccattatctatgttattggttttattaatttattggattttctttcatggccaaaaaaaagttagcaaaaaagatgaggaatggtttcatactttgtaaataaaatgtatagatatcaaaggccttgcctaacttggcttggtgcttattgcttgtaaaaatgattgtttgtgcaatgaaattctgagttatcaaaaaaaaaagtatttctttaccccaaaaagatttgaacatgaggcaaagatggtggttagaactatttaaggttatgactgtgagattttttatcaccccaggaaagccaatgtggtgttagatgcgttgagtaagaaaggacccgagcaggtttttagcaccaacatgatgtattctcatttagaaatagacatggttaattaaggtattgagtttgtggttggcaaacttagaaatttaacaatgtggtctggttagaatgaatcagaagtgctcaaatggaagatcctgagttggttaagtctcgggaagtagttttggctggttgggctaaagatcttacagtgtcagattgtggattgtttctttacaaggcccgagtttgtgttccgggcagtggtgagctcagaaaagaaatttcaaatgaatctaacactactccttattcattacatccagttaccaccaagatatactagaatttgaaaccctacttctggtggtgcaatttgaaaagggatgtagtggattatgtatccagatacttaagttgtcagcagattaagattgtacattagaaacctacagatttgttgcagccattgacactacccgagtggaagtgggaggatgtcactatggatgtggttggtttacttaggaccatgggtctttatgactcaattcgggtgataatggattgatttactaagttatcatatttcctaccagtaaatacaacatatacagtagaatagtatgtagaattatatgtgaatgagatagtacgtctccatggggctccaaagttcattgtttctaatagagatccaaagtttacttctaagttttgggagagtcttcagaaggccatgggtaaaagactaaatttcagtatagatttccaccctcagatagatagatggccaatctaagagaacgatttagatgctggaggatatgttactagcctatgtgatggatttttaatgttcatggaataagtattcgcctctgatagagttttcctataacaacagttaccatagtaccatagggatggctcactacaaaatgttatatggaaggaagtgtcgctctctgattcactgggatgaaaccag

SEQ ID NO: 4164 - DNA, 724 bp, Cannabis sativa
  modified_base (404)..(409): a, c, t, g, unknown or other
tatccttgtgaagactataatagtttttatcatagaaaccaaacttcttttctttttgtcaattaggttttgttttatcttatacagatttgaagtttctaagtttatatattgttgaagatctatcttcaaggaaataagtcaaatgttgtagtgtaattttacaaaatatatgtttggaaataagatctatctttattttttttaaaaaaaataaaagtgtttggaaaaatatatgtttttctagttgttattttgtagaataatatttaattttagaaaattctacaatacaccaaatacactaatgtacttttatctattttagcattcaaaataattttttagtcaaatttttttcatgatcatgtaagttatacttatttaagacatcctacaaaatnnnnnnaaatttgaaaaaatttaacacaccaaaaataagattcaaaaaatgtgttgcacgcgtgactattttaatgtatacgcgtgtgaaataaattttttgaacactactttctatattgtaaattattccaaactttataaaattttgtaggatatcttaaataactataacgtatatgaatataaaaaaaaattaaattaatttttttttttttggatatcaaaatatataagagtgcattaatacaccctttttaatgttgtggagtatattttattgttctttttttataagaaattaaaatattaaaaattaatt

SEQ ID NO: 4165 - DNA, 1389 bp, Cannabis sativa
ataataaaacgacaatgatgaggctaagagttgtgtagagtagtacggactcttctttcattgtttttcgacttcttgaatgcttgcgataatgttgcatgtaagtttattggaattatatctatatatctttttatatgtatctaataaatgagtgtagataagggtataacgtacttcaatgtgtagtacatcattgactacgtatgtttttcagattatagtgtttttttaagaaaaataaataaataataataagtagtatcaatttgagtaaatttaaaaggtggtgacattatttgtggctaaatcttcctttttagaaataaaggggctaaattttccattatattttgtgttaaaataaataaatcggtttgtttagtatttatttataattgtattatatttgtaatgaggttgtttttattattttatagtttatttatatttgatctatagttgtcgtaaagttaatttttattattttttagtttttttttttaatttttgttgaataaaatgtagttttataattttaaaagtttacaaacttatatatatatataaaaaattttaggttgtaaaattataaattaaataatatttttaaaattttccaaaatttttcttatttgtcctatgtattatatcatttattgtaagggtgtatatcggtcggtttagtcggattggtcgggttatattgtaatttttaccatcccaatttaaatatgttgtaaatatctaattgtaacccgtccaatgaaaaaataaaaaaagtgtaacccacccaatgattttcgtcgttttggtcgggttaacccgtttaaaccgatatgtatttttattttttttcattattgttagttttttgtgttcaaataattgatttgaaaaaaataaatgtatagtagtatatgctttctaaaattaaaatagttataatttaaattaatgttaagaaaataaatataaattgaataaacattaaaatattaaacaacattttttaaaaaaaaaataaaaaaaaaatatactcatatataaattctaaatttcaacttcaatattcaaatacaattaaaattatcaactataaattttaaattttaaattaaacactataaaatataaactttaaatgtaaaatagtttaactattaaacgtaatttatagattatgttataaataattttagtaaaaaatatgaaaatcggtttattcagtttattcggattatttgggcagattagaataatattcaacctacccaatagattcattgggcagtttgaatttttggtaaagttattcggattgtattttttatcagtttaggttaggcagtttattcagattcagcggtttgtaaattattttgaata

SEQ ID NO: 4166 - DNA, 1387 bp, Cannabis sativa
tttttttttttttttataaagtatgattttaggcttactttattaagcttaaaattctagatttttttatttgtgttaatcctctctctctgttatttttttttcaaattcaatcaggttacctattgtagggaacttttaaaaaataagtataattaaatattaattttttttataatgatcgataataaaagaaaaattaaagtttatcgtacttaattttactatttaattaacaaaatttctctttttacaatcaatcaaaaatatatttatatttaaaataacttttatcactctctctctcactcaaactaattttttattttattttttatctctctcttggcctcataaaataattttaaccatgcaaaaatgaagaatttcttttaattgaataataaaattaagtaaaaaaatttaaattttcttaatgatatccattaataagtaatacttattaagatgcacctgtatatataaatatataaatataaaattagtgtttgatatattgtggcactagaaacttacacggctaataaattgattaaatgcttaaagacctttatgagttaattagaggggttttttcatatatagttttatttgggtcaaactttatgtttttattaccatataacaaaataaataaaattaaaaaaactaaggttttttttaaaaaagaaaaacgacatagagacttcttccccaaaagaacttcttctttttgtagaacaaaacagtgagtttttgtccatcgccgacaacacttatagggtggagatgactaccacttgaaatagatatgtgtaaataaaggaggaagaagaaaaaataatatttttcgtataattataattagtaaactttataatagtattagagaaaattttaaaatataaaaatgtaaaaaaaaaaaaaaagagaagacaagtataaatattaaatattagtaaaaaaaaaattacatagtgtaaaaatctcttaattaaactaattttcatttggcttcctataacaattaattaaagagtaaatgatgacagcacttacatctttgatctaagtttcattttcaaatcccattaaaatagaagggaccaccacctttttcttaagtgtcttctggatgttctactatgataagattcataaaaggtctagaaactttcttttttctctatccaaaaaaggaatgaataagttctaatctttttctaataattttttttttctgttgtgtgcaataacagccacatcacatgggttctttattattattaattgctccctcttcatcaaaaaaaaaaaaaaaaattgctccctcagattcattacaacagatttggatttgtaagacaagggaaatttacatggtata

SEQ ID NO: 4167 - DNA, 629 bp, Cannabis sativa
tctcttgagaaatttcaccctttctttgagtccttaaccttctctatctctctggatctatattcaaattttatcttttgctgaaagatcccattggtgcttttcatccttcattgcgtatctttaccgctgttaagtggtgaaaaattagaagaaactgttggtttcctttattttgtagatctcaaaagatagagctagatatttttattaaaatttatcgagaagtaacaagataaaattggaaaggaattaggtattccaatacaacaaagaattatagatttagaggctgaaacataatatagaaattaattatagagccaactaagaatatcttcaagctcctttgaagtagaagcctaagccaatacaatatttagtatcacaagtagtttggacaagattaaggtgtgtaagttttttttattccttattatacattacatatactgttcaagaagattggtttaaaacttgtacttttgacaacaacatcttgcatttacatccttacacactgtttttgcttgttcttttgcaatgtgcacttggttaactctttttttgttggatttggaatcagttaatcaaatttattctccttgtttagttctttctatcaagaa

SEQ ID NO: 4168 - DNA, 1092 bp, Cannabis sativa
gaaactcgtagacatagattcaacaaccattaggctcattctgattctgaaaattttatcacagttgttttcctagaacatgagctgaaaactttggaaactgtggtaatcttttattggacctattttcagctattctttgatttaagtgcattagccaaaacatgaataagttgtagagagtgatgtgttttttaccgaaaaatccttattcttctcaaatgggtgaagaaggttcaagcgagacgtgtgttactagacatatgattcattgttactgtgccatcgatgttctataatgatattttgttgtagcacccatttggttttacttgcttctaaacattcttccacatggaaattatccagaatctagcgaacccaactgctttgctgttaagttctgtctctatgctccgtcatttggaactccatgataaagcagatcgaattcaagatgccattctcaacacaattgctgagggaaaattccgaactgccgatttaggtggaaagtcatcaactactgacttcacaagggcaatatgtgatcatctttgaaaggtattgcatatgtaatcagattgtattttgtgactcctttaggagtcaatttattttccgacatttttccagtttttcctgaagagaaataagaccacacgacagatggtctggacgacgagaaagagatttgtaacgctagtggaaagtttggagggcatggatggaattttggatgattgacttatttgcctttcctcttcatcgtctcaaaatgaactattggtgacctttgaaaattgctattctttgtccatatagatctacaaaataaatgcataatgatgttacactctcatttaacttatatataattttttttttccaaggatgaaagatcatattttatactcttcttcattgtttgtatttgctaagtaaactttaagatggattaatttgattttaacttctcgtcatatgttaattgtttctttggggcttcaaccataaagactactcactctcataagttgaaataactttccaaaccaatttttaatacatacctttatataacgacaattc

SEQ ID NO: 4169 - DNA, 1207 bp, Cannabis sativa
atatatatatatcaaggtggacgaggcatatatgtgtgagcatttttcaaatattattatagtttgctattttattatatttttatatatataataatataatataactataatttataaatttatatatatagcagattattatagaagttttaagatgtgatgatcacttgtatatatataagtgatatataatatatatctattattttgctcttctattttaatttatttttttttctaatttatagctattaataattaattaaaaaggaaaaatatataattgtgatatatttattaaaaatatcattacttaaataaatttaaaatataaaatcttaaaacactaataagtaataacatatatatcttaaatatataatttattattcttcaaaaaaaatataatttattttgtatattatttttcaccaacattcacttcactttcttttttatcctttaattttctcacttcactttttcaaattagtcatcttgttctttgtttttaaaatgaaaaaacatattgttatttgtttttaaaataaaaacaaaaaacacagttaatttgcccgcccccttttctgggtcttggacctctctgccatagccccaatcacaatgctcaaaggaactaaaccctaattagccagagagtacgaagactttttttttattaaatttaataaggaaaaaaaagttctgttaacaaaatctatatattcacattatttgataaagtaaataaaatattaatatatagtactcaaataaaattttgctaatcaatcaagctatattaaatatattatctctgccctttataattaaaaattatattttgtttggtccaatctcattagtggacttgtacaaaatattactctctatggaattgttgtttttggtaataaaaagcatgcaaaggacgttttaaataaaaaggttgtggccttcatcaaaaaaaaaaaaaagttgtttggcttctgtcccacctataattttgcgcccaccattgaataaataaaaaatataagcctagtaagtgatttgattgttcaactaccattctcataatatatataaattttattgtaaaagaaactaccccactattactattagtatatgagaaatgctaaaatgcattatatattatttttatatgagttaatattgctattagtttaattaaatatta

SEQ ID NO: 4170 - DNA, 688 bp, Cannabis sativa
aaaataaccccaacaaaatgtcaaacgttcaaattataaattagatttaattaaaagtgtgaaatgtaaatttgctaataaataattgataagggttcaattaggagagtttagaatcaataactaaattaattattaaaagcaattcaaaagtctcgttgacatcccattttgtcattacataattaatcagaacaagaaacgaatttcatcaaaagaattgattaaacttaatgtcaataaataaactatatataatataaatgttaattttttgctagtagacaacttgtattaacatttcgagagggaaaaatataaataaattgtattgataattatatatcattaattaataagttagttttagtattttaaattttcttaaataggtgggtggcataatactctaaccatacactaaattcccacttgcccttagatactattaaaacataagtttatatatatactcaaacaaccaatcacaggatttaaaaaaaaaaacacaaccaattagcaacaatctaaacatatcattggataagagaatattaaagaaaaaaaaattgctttaaacaaagccaatctataacaatataacccaagagtaaacaaacctattatgacaatgcttatcatgtttatacacccctaaagacaatttttcgattgatcaatcaatttc

SEQ ID NO: 4171 - DNA, 1057 bp, Cannabis sativa
tctctcttttgtatattaataggcactttactacaaaatctttatatatttctatacagattttgttggccatataactcttataaccgataaagaatattaggattatttgtttacacaaactaattatacgtatataaagatatgcttttattttggaaaattcatgtatacaattccaaatcagtcaaaatatatgcacgtattcattacggaaagaatgtgttgatatatatatatatatatattatcgaccttaccttataatacaaccaaaaaataataatagcaatgaaaaatagattaccaataataattaaacaataaaataaaaaaggaatgacgattttaagtctcataaagtaaaaccaccatgtgaacgaccttttaaaattccaacaattttagggtctttcccattgcattttattatttattagctatgctatctacaaattttcgtacaacatgaagaagcacatgttaatgtagaatattttaaaaacaaaatttttgtttatttgaatttaattattttattatattcatttcctttatagatattaaaatttgattaaactaaaactatatgcttaaatacatttagggtttctaggtcttattatattaactaacaagtaacattatatttggataaaatattatattgtgttaattattacaactataaattttaataaaaatataaattgtattatttaataatgatatatacatgacaaatgatttatattaacttttattataatattcataactagtttgagtcccaactccaaactcaaatttggaatcaaactttaaaccctaacctctatcctaaacttcaaaccttaaatttcaggcttggtcaatctaaattaataccaaatagaatattatattaaataatattaatataattcaatgcaatactatacaataagtgtactaaacaaataaacttattttcataacaaatgaaaaaaaaaaaaactaaatatttgaaagtttgggaatcgcctgcctatcattttttttttgacattatcaaata

SEQ ID NO: 4172 - DNA, 3032 bp, Cannabis sativa
tacaattctaattagttagatgattggttaataatgttcatctataattatgaccagtttgttactttcaaattagagaggacaagcttttgttgaaaactttagattatgactttatatataagaaattggcctttgaaaattttgacttgttatgttcatcacttaagctttaattgttttatgtatttatacaagatgtatttatgggctcaaaactagagccaacagtaaacatatagaatctgacccttaaatttatatcaaatacaaattatgttttatattctcattcctaagatttcaaatcacaattaacaaacacacccttattattatgttttaagtactataattaattaacataactataaagctttgttttatgtattgccaagggtttattagtccagaggccgctttacttaaaatagagaaaagtttaattagtttcgataatctcaaactcaagtatttaaagaattacatatattcctgacctaaaatttataccaaacacaaatattgtgtttcatattataatcacttccataatattatgtttagatttagtgtattttattttaagatttatattatatgtattcacaatgtgaaattttttgctatatgtttcttgatattatattttatatgtataaaacttgttaatattattacatatgtactcttaattatgcagtactatcgtcatgatgaatcaaacattactcttcgttctgttattgagcttctcaattttttgctctatgaggaaactcctggtaaaaacaaaacaccaaacaagaccactttggtaagtttaattttataaatatacatacataactaattaataatattttgttaatattataatcatattttcttaataatattcaggctaatattctggggtctaatgatgataatcagccaaaactgaaaaggtcatacacaaaaaggaagtctaaacatctgaatgttgaaaatgataatagtcaacaaaaaagaaaaagggtgtaccggaaaaggaattcgaaaggtttgaattcgcaaaatttgaacaaagaaccacaacaaattggaatattattatcacctaacaaaggtgatgatggtgccaatgaaaactttaagcctcctgaagatgataaccatcttcttcatcctcaatttaaggcggattttatcgaaaaacaagactgtggaatagttattggagagaacaaaaacacaggcaattttcctcgaggaactctgaaaatatttccaagcactgctaaaacggctgatgatttgtttagatcgtcgtacgaatcttttcatttctccaagaaaagtgtcaccaaaggtacgtcacttaataaatttcttgctagaataaggatatgatttgttcctctttttaatcttaaccatttattgttgatcaaagtaactatatgattgcctagaaatttgaagtaggtaatgtgattaattggtactaattaagaatacacacaaagaaaaagagtgttgaaagtgaaaaattatgtttaatgactaaaaaagtttgacatggaatccatgaccttaggaaatgaataattttgtcacttattttaaattaaggcctaatgtaaacaattagtttatgatgtgtttggctataatgacaattattagattaacttaactattgatcctaccattttgaatatgaatgaaacaaaatttgctctatatttataaaatatattgagacacacaagtgtttaagtaatttttgtttcattaattattgtgattttagaagacaatgaaggaaaggggaaagggaaggagaatgagaaggagaaggaagaatctaatgaaaaaccgaaagatgatgatgatcaggacacagatacagaagaaacttgttcagattctatggtagatccgaccactgattattattttggaggcaaaattaaactagatgaaaccctacttagtacttgtactagtgcttattctaaggttcctattgatattgagagtgttgataatcatggtcatgatgattctactaattttggatcaacaaaaaatgatggtgatgatcaagggagtttgaagcctgtgaaagtcaatgatgttgactctggaaaagagaaaggcaaagctgttttcaaagatgatgataatggtagtgccaagaagaacaacgatattgatgataaagatttgaggcttctaacaagtttttgtgaaagtgcgatttcaatggacaagaacaaagacaaagactcagcttcttaccctaaaaaaggttaattagtttcttataagactatttaataataaggatattttaataattatatgttttgtggtttaattagacttttcaaagactagtttctcttttaattcatgacttggatttatatcatttatatatatgatgatgatgtatgtcttgatatgatttggacaaacaatttcttttctttatttttagttttatattgcatcatgtatgtatgcttgaacttatatttatttttggatggttttgaataatttctaactttcttcttcatcttttttctggaagaaaaacaaataaataatatcatttttttaaatgaaaaaattctatatccctttttaaaaaaaattatgtcatgcccaaaatatagtacctagggtatgacaatatatatttgagttagatcacaatcacttttaacttagacaagatgtacaatacatatttctttctttctttattttcttttcatattttcattttgaaaaaagaaaaaaaaaaaagaaaagaaaaaatggaagaactatggagaataatcctctacattagatatgctttataataaaactataatttataaaagttttagtacacattctttctccacatatgcctttatttcatccttcttttttctctcaatttttttaataactaaacaaacaatattattaaattttttttgaggaaaaagttggtttctttagtatcaaaagacaattgaacaaaa

SEQ ID NO: 4173 - DNA, 1373 bp, Cannabis sativa
acaaggataagtgtgtgctaataagaatcacaatgattgattgttcttgttaatctcgacacagagtacaggaactctaggaatttcaatttgccaaatataccctataccaacaaacacttatcaattttaaccaaggtcaaatttgacctttacctcctttgacttttaaccagtcaacaaagtcaatacgacctcgttttgccttaaaacaaaaccctaaaaaacaataaccttctcgatcaatttgacttaggttctagcttcacaaagaaaccctagcagagagtttcttcttcgaagaaacttaatgctcgacccctagtcttgctagaaacacaaatcacacacatgcacaaaatcagatctagattgatctgatctctcccacaaaatatcaaaaagaaaaatagaatgagaaaggtaaagaaaagatttgagatttctcctgaggttcacccaaaaatgggctacgtccctgttaagctggtcctcagatttggtagctcgattccactgtcaatcaactaatcagagttacaaggatgagattccaagtcacagctatgattttgactggtaatctcttgatttattacaagtattgtgtttaatctctctctctctctctctgtttactaactcaatcttattttcttgtgcatatacgagtctctctcctccttctcctaagatctttgctcctggatcttgaagattctactcaatccaagctgaaggagactgaagtgcaagtatatatagtattaggttctttcttttcttagttagttacagaaattagttaggtgtaggatcgatgacctgtcacgatccattcttactaatttttgttagggattgagcttgtaataaggcctaaagccactatagtaattttgtataagtatttccttgtaatgacttaatgaaaaaatatcagtattaagtggaggtttatccaacaggaacaatagccgtaaaaataaaatgcataaattttttacccaattaataaataattttggtttaaatagcattagatatttaatttataaaataataattaatcatattaatattatttaaataaatatcataaaggattttgttatagatattttattcaaatttattatttaaataaatatcattaactaaatgagagaatctttcaactaccttgatgaaatatttcaattaacttgacagaatattttaaccataaaaatatcaataacaatattttaaatttaaatttaaaataaatatttaaattaattaaaattcaaaattcactagaccgtgccaacacagtgactgatgcatgcaatgtgcttgtactgccttgttagggcagtctaattttccaa

SEQ ID NO: 4174 - DNA, 1170 bp, Cannabis sativa
gtgacatattttaataaatcttacataaattaataatttcaccaaaaaataatgaaatcacaaagcaaataaaaagaagtaagtactaaagttggtgattccatttttaatatattgtaaaattattatattttactatatactatgatagtatatattgtagtacgacataccatgtaaacttcattaatgatcgattaaaaaattaccaaaaaatttaataaaactattatttcggtaagtaatttaaaattttattttttttagtgttcttcgtgttgtatgtgatttaagtttcttatatttatatttagagacatgttaaagagtatcaatagtttaatattctacttaattaatgtaatgcaacatactaaaataatttttattgatgatggttgaaaaagctttctaaagaatttgataatactattattatggtaagtaatttaaaattttgttttttagtatagaaatctgtaattagtttaagtttttatatttatattcagagaaacgttaaaggatattaatgatatttaatattgtcaaaaagtagtatataattattagtgtaatttaatattaaatcatacatattttaattgaataacgattatgaaaaattattgatcactcataaattgctacctcatattgatagtaggcatcattacttaataatagtgctcttatatgttacttattattttgcaattagttagaatttcttttaaagttgtggtggtttcactttttagtatacaaatttgtaattgtttatggttatataatcttcatttccaaatattttttagtatacaaatttgtaattgtaactttgttggtcttttttttaacaaatttgttaattttttcttaaaatatcacgtgttaatattaaattacagcacaagtctctaaaaaaatttattttgatgcaaataagtctctaatctctaaaaattgtgataacaacctcaaggtcaaaattctcgttagtccgtaagtacctaatttaactgctctatttgttgttccaaaaaaaaaataccacaaaaatgttaattttgttagtccaaattataattttaattgagattaatttaaaataaacaaataaataattaaattattttaaaactgattaattaaccttttttttttttt

SEQ ID NO: 4175 - DNA, 683 bp, Cannabis sativa
atatatatatatcttagttttgactataaaagaaatttaatgttgtgaaaaagttacacatactcaagaatccttataatactatttgaattttgtaaagtatttattgtatcatactcttaaaacatatgtgtaatattttggtgttactatcacaataaaaaaaatactttctatcttaattttggctaaacatactcataggttatacaatgagttatgctaagtctttgtgatttagatcatgttgtcaatttatatataaatatatatatatatatatatatattaaaactcattataaatagaattagtagtaacttttccaacaacaccaacaataataattcaacaacaattaattgagactttagtttgggatattatttttttttgttattttttgaaaggaaatactctagtagttagtagtgaatgtttaaattaatatcatacatgtttgaagttttaatttatttttggattataagattttttttgaatcacttttgttactttgtttggggatgaaaaatatggggacatgtagttgggataacacaacttagtggaccaagcccaacatagattcaatgcaggccttcttggggcctaactgaacaagaataataaaatagtgaaattacactatttttatacaatttatgcaaaaatttagtatt

SEQ ID NO: 4176 - DNA, 782 bp, Cannabis sativa
gttgacaatatgatacatggcattttaaaaaaatatttcttatgatttgacaaacaaatatatgtttagaatactttgtaagtaggttggatcttacctttgctagttttgtaggtgaagcttgttggtcgcgcattgctcataatgtggatgatgttgagagatttttcaaggaaaccattgaaaataggtaagcatcatgctgaatttgttatatttctatgcttgagtgtctaagcaatctattcacatttgtcatcataaagatttaagatcctaaagaccttaatatcataaatatcattgcgatcaacatgtacaactgtgcgtgaaaagattcttttttatctgttctatttcatataaatttcattttaacattgtagctggtatttcatgcggattaaagtttctgtagtgttatttttgtcattgacaaatgaatacatgctatttttagggactaaacaatatactaactcgtgtcaaaaaaaaaaaaaacttgctgctttatataattttgttttacaatgcttaccaaagctagccctatgctcaattttggcctttttttaatgaccattttaatacttgtaaatagttagcataaggtgcggtgcatgaatgagcgtttgagcaaaggttgactttgataggtttaaagtggtattttcttttcattgaaacttaaacaatctctttgtttattcaaaatagttgcagaggaggtagtggattcatgtcctcagaaaatcttttaaattggtccagacactccaaat

SEQ ID NO: 4177 - DNA, 1450 bp, Cannabis sativa
acctgactaacctgatttataatataattaatatatatttataaaaaaataaaaaattcaatctactaaatttttttcgtggtggttgatttgaattttcaatcttattatcagtaaaatataatatttaaatgtgaaaaaaaaaatattagtgtttggtttgaataagttaacttgactaaactgattaatttattaggtcaattaatatttattttttttttcaattaagctagttgcatttaaatttttataaattaatttttactttaaaatgaataaaacattacataaaccgatcaaatcgacccctgaatgatatgtttgttgaattttgacatgatcttataatccccatataacaataatacaatataaatacgtaatttaacagaatccatcttgtagttgtgtctaacttgggagacaaaaatactaaatttattttctcacacaaaatcagaagaaagagatcgttggagtttccgccatctctcacaattttcaaaccaaacaaaccaataataaattaaatccccaaaaaagctctcctcgttcttgtcgtccattacaccctttagctctccttctccatctccttcaccacatttgcctccatttcctctctattctcttacatttcgatcaacaatggtggccaccataactctctccaactctattctccttcgaactcccactacttctcccacatctcttgtctcacctcgcctaagcgctttctccttttcttctcgactctctctgctcaattctggatctcaatctgtgttcacccatttgaagaataagactaagaatgatagttctttaagtcatttcagtgtgtattgttcatcttctgaggctgcaaaacaatcgactgaagagactcctattgaattgagtactgaaattcgattctctttactgggttttgctctgtttttctttgatttgaattgggtactgacttgtttcttttgatttgtttgtttatgtatatttataggatatgaagcatttcccacagttatggacataaatcagattcgtgaaattttgcctcacaggtgagtttatctgctaaaaaatgatttttaaaccaaactcacaataacccatgttgggattttcagaatcttatttttattgtttcgttttctgataaattttaaattggtgttatgttagtagctatagtgataaaagtttaattataaacaaatgatatttggtttaagctcatatgagcttttgatttttgattttggttgtcgtttaggtttccatttctattagtcgatagagtgatcgaatacaatcctggagtttcagctgttgcaatcaagaatgtaacaataaacgacaacttttttcccgggcattttcctgagaggcctataatgcctggtgttctcatggttgaggtaatttgctttattccaag

SEQ ID NO: 4178 - DNA, 1730 bp, Cannabis sativa
acattcaaattgtaaagagattaattatcaccaatcaaaataattagttttaggtaattctatagtatatatatatatatatatataaatataaaaatgagtatttttattaagtatgagtgtagcactgctatataagtaagcactgttattataaataataatttttaagctttaatttattattaaaataaataaataacatcactattgtatagatatatgcaaatttctaaaataatatttatctttttttaatgatacagtacttcaatattttactatctaatatgtttatctgatcagcaagtatcttctaaattagagatgttgtagactaatatataattaattaatatatcaataacagtataatactaagagaatattagacatcaatagtatgttttagcaattctcataatatatatattttgaatttgataagttcaaaatatattttatattatgtctaaacatatatttttaaaaaataatgatagtgataaatacattaatattcttaataatttgcattaattagagagtgtgattataataaaatgtataaattattagaaatatacgtatatcattaatcatttttaaaataaaaaattatggtgaaattaaatatatatattttatatatgtgattatatataattgtaatttttatttttaaatatataattaaattaaatttatttttatataaatatttacatattttttatttttaaatatatatataattataaaattaataaaaaatattttgttaggtaattagaatattctcttaaaattaacttaaaaaattaaaaaattctattaaatcaaaaattcaattgcatagatattttattttctttctttttttaatgatagttgtttgatttctttaaatcatttttagtatggttcgttttgtaatatcatccggccggtgtataaaaatatcacgttatattatatatgaaattcgtaataaattaatcataatactacatgcatgggacgtgcattatatacatatacctattataagttaaatttatcagatagttctttaaataaagctagatattactattttagattcattaattaagaataaaaatatacataaaaatacataagagatatagagagacgacatatatatgaggaatttttaattatatacgcaatatttaaactaattataagaaagggttcaacaatttaaatggtaaacacacccacataggaaatgacgttatatactgaaaaaggaaaacaattatctttataatgtgatcagtttttttgggttgaaatctactacactttttcattcttttttttttttcttttcttctctcttctctattatttttaaaaatcttttttaagcattcggttgattatttcaatttataaataatactattgttatctatttgatcttttcaatatgcctgaaagatatatttatttattgttactataatagaaagtaacctcttattttttttcttaatttgttaataaaaaaaagtagacaaattttaaatttagacaaaattcaatatgtctactaattacatgttatcataagaatatctcttaattaataaaaaaatcaaattatattaactatatctcttaattttaatttaaagttaaagtatgtgtttttattaagatattttcattattttttgtttattttataggtgacaata

SEQ ID NO: 4179 - DNA, 1615 bp, Cannabis sativa
taatataatttattttggtgtacttcaagttttattcttagcccaccaaatgaaatataaatataaagcatgttcaatttttttttatttattttttttttgcttgaactaaaaaatagtactatatattagttgtttatttttatatgtttttaccttatggaataaaggcataatgtgggtcttggtctattccatatacttttacttcattgttaagaaacataatttgtttttattttatttctttaattaagtagttaaaaaaatatgaaaagtatccaacacatgcactcaccccattttcctaaacacaacacaaaagttttctctttctttttatcttctttttgtctcttgtccatctctctctacatatttattttgtgtaaataagcatgaatttataaccatatttaaaattaaaatattgattaagatatctcattatctaattctcattagtaatttacgagcattgctattaagtatcagtggtgtgcagtaccttctcgacatgtcgcgttgcgattggttagtactccctaaaagctattatattaaactatatgggacccgatacttagttgaatcaatagcgatactgacacataggaaggtattaggaactactggtgccctttagcatttctcctaatttacactatataaaaaaaaaatatttattttttatcaaattttatagtcaggtagttgacatttgtcaatgtataatttgtttaattaattaaaatttattaaaatctcattgaccaattgcacaaattaactaataagtgtttttgtgttttactaaaatgaaaatttataattgaatatttcaaattcaacaaaatgaaaaaaattactttagtgtttttagtttttgatattttgttttaaaaataacttcaaaaattataatatatttgtgtcaaatttaattgggaagacatgcatacatttttttttatttttatatttaaattgggtggtaaatcacttttaataagtagatccatctgaaaaaaaatgattagtttagatttttttttgttaaataagtgtgtgtcaacttaataatttaatttcacatattactactctatagcaaatgcattaaaggtatcatttatttattttagggtaaataataatataagtatttaaagttttaactttgtaagtggcataaatttaatattatttttaatggcataagtacttaatatttgtaaaactgtaatttttttaattttgtcagtacatactctattattatcttaaataagatacataaaagcccaatatttagattatcgggtctagatataaacatatattatcagtaactttcaaatatttttttaataaattcaaaatcgagtctgtactgatgaaactgaagaaaaattacagttttataaatattgaatactcatgacataaaaaaaaaatagtagacttatgtcacttataaacttaaaactttatatacttatactgttattttttaaaaaataagtactaatgtaacataaaagaaatatgttaatatggatataaaactaatgaggtcaaaaaagaaaagcaacaactaaacttgttcaaaaat

SEQ ID NO: 4180 - DNA, 764 bp, Cannabis sativa
tattttttatataatagtgtatatacaacaaatattttaattatttttaaaaataatttatagtatcgaaaaataaaatttaaaatattcatttacatttttaaaagaaactatgtacaaataattgtttaaatcttattaactacactaaataattcagaattatttctcaaaaattaataagatatctccttcaacaataatatatgttttttttttttttgaaagcaacaataatatattttgtcatgtaaagaaaattaagctataaattttttcatatatatgccagaaataaaaaaaacatatctccctacctacaataaaaataaaaatatataaagctcctcaataaagtaatttttgtactagttgttttatgattatcaattttttgtcacctttttctcacattcttttttatttttattttctattctatactatatacccttttgcataattaatttgtctcccataataatctagtggatattcatctacattacctatcttaaaccttttgactcttcttgttccaatattacccttgtactttgttttttttttcaaagttcatcttatatagtgatcattattactctgaaaatggaagaatttaagtaaatgggattgaaaataataactaaaatttaatgtacatatatattatctccatggagggtttttgcaagatatatcaaattaatgataatttttcaattactattatttataaaaatatgtagaattaatagtgtacc

SEQ ID NO: 4181 - DNA, 3036 bp, Cannabis sativa
tgactaggcgatctagttttttttaatgtgacagattaaaactgtcagctatagtgtttactattgccaatggtattaaacagccaatagagtttttaaccgactgttttaaaccgtcacttattctactaagttttgcagggttaaataggcgacgattatagagacggacaataatacattagccgactgcttaaaactatcggagaatccacttttctttagtagtaagagtgtgagaagcgcagagcaaggtgaaactccaactggtgagagtgtcgccagagaagaagaacacacggtgatgatgccggagaggagtcaagatcgagagaaagcttttcttcctgctcttatactatattgcgaaattgaacaaaacaaaaaatgacttttattgattgtgaatgaataaaatttcaatcgaatgttgacacttcgttcgtaatgcatatcaaatctgatatgaatctggtagagttcatgcatggttcaaagtttccaagcaataatggcaaactcaatcgaagattattagagtgaaggaaagtggagctcgcttgggtaacagagttagtgcattaatttggagatttgtccaatctcgaaaagataccgttactaaacatatcagtatccatatctattttctagcattatttataggtatcagtttaatataaaatatacaagtgtgacacttgtataattctactataattaattaatttttttttctcaataaaagattgcaatatattcaataattaatatcatcagcaatgtggacattattctttctttagtgagcattggatcattttccaaaaattatatatatatatcatcagcaattaccagagtggcaataaacaacgccaccatacataatgattgtgattcatattaagagctaattgaccttgagctactctgttagagccttacgacagtgcaacaaaactacttgtgaaagaagaattagcatatttaagatatctctacagactacaccagtagatgaagacaaagtcactatatttaattaaattttggtgataattaatatattaaatttaaagggtggcaggcttactgaccatttcttatgtagacaccaccatgaaaactttcgggaattttcccctcgatgtgagtgattacaacaggttctcctaactccttaacaggtgcaaagttctcctacaatatttatagtatgtaaacatttaaatatttaatatatatatatattaattcatatattcttcaatttgattgtataataagtagcagtagtatgtacctgagaagggagcaatggttgatcaacaaactcaaatgccaaatcaacaaaagcatccaacaagttggtacaaatactattctttattgtgttttttgggacatcacttcgcatatcaaggacttgttgcaatctcaaccatggctgctcatcataatatataaattgttatttataatgtactgatttattttccattaattgatataaaatattatgtattacacactttaatttaatgatctaaattaagaaaaccttgagggctgaagagaatgcgttcttgataatctggtcgtagctttttggagttgagggcctaccgtccattgatgaacaacttacttgaaaagccatacgtgagaatgatgatgccatttaaatctagctacataaatctctcactcttaattaattaccattatttatgtgataatagaaactctctattgatcgcgatttacaatttataaggagcttgaagaatatatatatatatatatatataaacatatatagatatggatgggttgtctcccatttgctgtttctccctgtatagtattgagcaatataataataataaaaaaaattacttactaaaaaatacacacaaaaaataaaaataaataaataaaacaaaagaacaacttgtcaaggttccatattcttattatagagtatagatatatagatatggatgggcttggcattacagttgacaaatatttggaagtagtatagcgtactgaatttgacttgacaataataacttgatttgtttttaatatttttatatatctcatcaagttcacagctaactatccatacacgtcaaattcaataatgaaatacagaaacacaccaaataataaataaatatatctttactgacacgacaggttctttgacattgtgaattgctcaatttgagtacgttaacttaaatttacataaaatattattttttatctaaaattttacatttatcctataaaagcttttttttagcttagtattttcagtttaatttactctcttccactccattggtactgcctactgatgctatttgtttttttttcttgaataacctcaatgcattaaactgaaaaatcttagtgagtacatgaggactcacttctcaaaatgaagcaaaccattacaaagattcacaagacagacctacacattaccacatttatgaacaaagaaatttgccaccgccctcactcggccactctagcacctatagcaaaatacacaaacacatgaataccaccagatcttgggagaccccatctaaccacttggataccgccactaaaataagtagagagtcttgagaattagcaagaatcctctagtgatccacaaagatacttttaggtggtgtttggttgaaggtaataaaatggaataaaaagaaaatgaaacaatcttcatttcattcttttatttggttacatatattaaagtgttggaatgtcctaatggaataatctttccacgattttgatggaatgactattctattttgaaatagaagaaaagaccattccaatgtatgatgagaaaaaatttaataattttttttatgtattttaaattttattccattccatttctattcccattctcattcctatgttttcattctttccaaccaaacgccacattttaaattttttcagttttaactaaaagaatgtaacaatattacaaaaata

SEQ ID NO: 4182 - DNA, 545 bp, Cannabis sativa
ggaagaaattagaagacggtatgcatttccatatatttatttggaagaacatgcagtcagtctattacttttgactgatagtttttagtgcttttattttctcctttcagtttataatttgtgtttgcatactaattgttttcttctctttcccaacgcataaaaatgattcagtgccggtgctgatgacaaaccattgcgcatggtgaaaactgttctacatgaacttgtgaagcttcgaggagctgctattaaaggccacctttctatggttcccattgacatgaagcctcaaccaattattcttgcttacattgatcttaatctagaggtagaagtcgagctaaacaattcactttatttttattgatcgttttttaccgtcctctaacataatattaatatctgctctgtaatttgtcagactttggctgcggcaaggatgttgacagcaactgggcctggcggtcaaacacattggggtgattcagcagctaacaatgcatcatctgccacacattctgctgatgcgcagttgaaggtat

SEQ ID NO: 4183 - DNA, 688 bp, Cannabis sativa
ctattgtaggatttatttggcccttacctactcattcacattaaagattaagcaagaaaatttaggcacaaaactttaaaataatattattgcaattactatgcatccacagtaaaaactaatagcacgtacaactcaaaaataatagtctcgaccaacccaaaatcgaaacctaaaacctaggtgtcgtctttgtcttcctcagaagcttgaatgttcaagaaacacacaaacactcaagctctgctagggttttgcacacacacattaaaacacaacaaaaccataaagaaaatcaaaagaaaatgcgaagaaaaggaaagacacaactagattacaaggtttacccaaaatctgggtaacatccttggtgagctcgcctcaaagatgctctgagtttgcactatcaacaatggtggagttacaagtgatctgatcttccaaatcacaagtcgaatggtaagatctacaactctctcatttcttttcttttttcttctctatttcccttgtgttcccctttttaatctttctcttttatcttctttgtatgtatttctctctctatcactctcctgaagtctatctcttacaaagaaggttcaactcaaaatagagctaagtacaggtatatatagttttgcatttcagttcttagaaatttagagcctatttggctatgttttca

SEQ ID NO: 4184 - DNA, 1124 bp, Cannabis sativa
catttgctcctgtgttgttgggcattaaagaaaagttactaatctcatgtgttctctctaataaaggttttctctgtgatgatgtcactgtgggcctggcccaattgaggacaaaattagcaggagggaaagagtaggacacttccatagggttccacgtggcataactttcttcactaatgatattattattgttgttgctactgctctttaatatgaggcccaactctttctcttcaagttgagccgatgacgtattatttgtacactcgacttcaatagctactctaggaactgaagcaaactcctgataaatattacaaagtgtgaaatatttaaagacaacgtacatatataaatggcttaaaagtgattattattattattatttcacagaacaaaccaaaataaaaataaaagtatgtcccctacataaagcatactctataaaaacaggttttgaacctacttttcccaacatttttaaagcatatgtctttttcctttatcattattctagatccttttttttcttttttttctgttagtctctatatggataaaattggtctctacactagaatgataaagataagataattttgagaaattaaatttaactagtctattaaaccatatacttttcaattttcaaattcatgtttttagaaaaagcaaagataagatagatataaggctatatatatatatatacctcagaaattctggtgatgtatgggatggattcctgttgttttgtctgctcaactccaagaccagtcactctcgatactgaagacaattctgtaaaatttaagcatacgtaaatcccaagtattattacaacacaatgtctcaataagaacagtcgacatttctacttttttttttttttttctaaatgaccacgctatatatttgacgtactaaactgaataagatggttaattatattacaactcaataataataacaataataaataattcaaactacacattatatatacaagttgtgtacgtacaggtttcttaaaccaactaactaataataatatacctacacattaatgtatcctatagacttgccactctataatatgattatacttaaagatattcaca

SEQ ID NO: 4185 - DNA, 641 bp, Cannabis sativa
attctccactacactacatacaagtgataaggaaacccgtcaacaaacactttcttataaatagcacttctaaaaaacaaaaaggattaataaactctaacgcaaaacatttaatattagcaatagttcaaggtcataaaatgaagtccacacaggtcaacatttatgaggagatgctataccgatatggtgttcacataaagcttgggacccatgaaactaaactgtagagatacattgctctgttgctttctctggggaccaaggggtagttcactgaacactggtgcccactgtcttggaagctgaaactccaaaaattgatggagctctccaatcggtggtttatctgaaacaacagacatcatgagttcaggatttcagttttttgaactgtatcacattaaatagattttgtcaaatataaacattaatttttaataactggatacgtgaatatagtctttaagtaattcaaactaaatcaataaatatgcaagcaaataaacacttgcttacaacgtaaataaagatttatggcgtggctcaggaatccactccctgggactccatttaacagagaggtaatggggataaatgacattgatatcacatcaggttccatctgaacagtttgtagc

SEQ ID NO: 4186 - DNA, 1328 bp, Cannabis sativa
accgactggccgaggcttttcttgcacgatcaccagaggtagaaaactacagaaacaacacacgtatgacgacgggagccccgtgaatcccaagcagccaatcaaggtatccctcccgtagaacaacctgaggtaataattaataatattgttaatgcccatacaccaattaacccagttatcccaccagtcaacccaattgtcgcacctgtgaactttgttgttgtttcataaaaatgtgaatattttgcctaaatctctcagcagcagctgatatcacacctgtaggggtagatcaagaaagtttgttgaaagctctgagagtggttgaacaataaaggacacacgtctataaactgcatggaacatcgccattcactgtttaagtgtgacaagctcaactcctaaagggttttcgcctctccgagtcgttcaaatataagactttgactaatcccatagaatatttagataaattcaatactatcatggaatctaatcagattccacagttgaccaagtgtcgcatccttaccaacacctaagaggataacacacacgagtggtttagttagttacccgaagcctcaatttctacctaggagacttttgtagattattcttgacacacttctaggtgaccatgacctacaaactactgtacacaatgttgtccaatattgaacaagaaaaaggtaagagtttacaattattttaatattttaatgcagaagtaactagggtcgagaaagccaccaagtcttctttggcatgcatgttaattacaagtgtattacctcaaattgatttctagaaatagctacaagcccaacgacctgagtcgttagtggagttcttcaccatggtcgagctctataaacagataaagaattccctcgcagagcttgagaaaacaaaagaaaataggtgatctccaagatcgagaacttattccataagtcctcgacgacgaagcccaagaggacgcaatcccaagagacgtagcccaacaagacatagtagtccaaaatttgcaaaatcatgtgctaaaaaagaaagttccctcaaatgcaagggatgtcctcgatttgtcaacagcactaaattagcggttccccgcaatcacatttatacaatcaaagagcacaaatgagttttcaaaaaaccaccacccatcaaaggcaaccgccataaaagagatgcgagaaaattttgtatgtatcacaaagatattggccacataactctagaatgttgggtcttccaagataaaattgaagagttagttcatcgaggacgatttaacaaatacaagaagaaagatgagg

SEQ ID NO: 4187 - DNA, 6754 bp, Cannabis sativa
  modified_base (3583)..(3585): a, c, t, g, unknown or other
  modified_base (5867)..(5881): a, c, t, g, unknown or other
aagatcctggtaaaataattcctatagataaggtacagctactttgtgagtgacactgtaacgacgaaaaagtgcttcaatgctcttgttgcagaagtgtgtacacctatctctaatgatagcttttggtgtaccaaagcaaacaaaaatgttgaagcgaatgaaatccaccaccatttttgaattgtcagttctggctgctatggcatctacccatttagacacataatccactgccaaaaggaagtactcaaagccaaatgaagatgggaatggtttcataaaaccaattccccagacatcaaagatctcaataacaaggataggagtttgtggcatttgatctctggctgtaatgtttcctactctttgacaccgatcacaagctttacagtaggcataggagtcattgaagatggtgggccaatagaatccactgtcaaaaatcttcttggttattcttgttggtccaaaatgaacctcacaagcatgtacatgacgaaaagcaatgatagaccagatgtcagaattaggaggacatcttcggataatttgatctgcacaatgcttctaaagataaggttcatcccatatgtaatgacgagccttcctctttagtttatttccttatgccggtgtgaagtcacttggaaacacttttgaagtaaggtagttgacattatcagcataccaaggaatcatctcttgagtggctaggagttgcttattgggaaatatttcttctatggctgagttatcttcatctcgaatgagacgacttagatgatccaccactagattctcggaaccctttttatcctttatctccaaatcaaactcttgaagtagcaggatccatcgaattaaccgaggcttggattctttctttgctagtagatctggagagctgcatggtctgtatacacaattactttagttccaaccaagtaggatcaaaacttcttaagagcaaaaaccactgccaaaagttctttcttggtggtagaatagttgtgttgtgcatcattcaaagtccgggaagcatagtaaatcacatgaggcagtttgttgacttgttgcccaagaacagctccgaagcatagtcgcttgcatcacacataagctcgcatggaaactcccagttaggtggttgaataataggagctgaagtgaaagattcttttaaaaagttgaaagccaccaagcacttctcattaaaatcaaacttgacatccttttgaagaagatggcacaatggtgtggatatttttaagaaatctttgatgaatctcctataaatgcctgcatgcccaagaaacgatttgatttcttttgttgttgttggtggaggtagggagcgaatcaaatcaatcttagccgtgtccacttctattcctttctctgaaatcacatgtcccaatactatgccatattcaccataaaatggtttttttaccaattaagcacaaggttacctttaatacaccgctgaagaattagagtgaggttatgtaggcccttatcgaatgaatcaccataaacactaaaatcatccatgaagactttgatgaagttctctatgtagtctgaaaagatgctcatcatatagtgttgaaaagtagcaggagcattacataacccgaatgacatgcgtcggaaagcaaatgtaccaaaagggcatgtaaaggttgtattctcttgatcttctagagcaatagtaatctgattataccctcaatatccatcgaaaaagaaatagtaaggatgacttgctagcctctcaagcatctgatcaatgaatgttaatggaaagtgatttttttttttgtcactgcattcagcttgtgataatctatgcagactcgccatccggtttgcattcttgttggcactagctcattgtcttcatttttaactactatgaccccagatttctttgaagccacctgaacagggctaacccatttgctgtctgagattgggtaaataatgcccacaccaagaagcttcaacatttctttcttcactacctccataggggggtttagccttcgctgtgcatcttggttggcttagctccttcttccagaagaactttgtggatacatgtagcaggactaattcccttgatgtcaatggtagttctgtaagctcggagcaccctcatcagcttttcttcttgcacttggtcgagatttgtagcaattatgactggtaaggtttcattctctcccaagtaaggatatttgagatcattaggtagtgtcttcatttcaagaataggagcttgtacaatagatgtttgtaatttatcagttatgactggaaattccacataggccaccttctcgtaaagcttgttgaagtcgttattaagtgcagttatgacatccagcatctcttcagaaaagttctcgtcagaatttaactccaagttctctcgtatagcaacttccagattatcttcactatacagatctagcaccctttgggagaggtcatccaacacatcaagagagtaaatagcatgtacttccttggatacctcatggcctcaaaaatgttgaattggattctctccatcgaatttcattgtcaaggttccctcgtggacatcaatcttgattcttgctgttttcataaatggtcttcccaacaaaattggagtagagcaggggatagaatcatcttccatattaaggacatagaaatctgctggaaataccaattcattgacttgaactagcacatcttcaatgacacctctggggtaggcattcgacctatcaacaagttgaatgattatttcagtttcttcaagtggacccagattcaaggagttatagatagagaatggcatgacattaatagaggcccccaaatccaacatacattactcaatcccagtgtttccaatagtgtaaggaatagtgaaagtttcaggttccttacactttggaggaagcttcttttggaggactgccgacacatttttccccacacttactttttcattatccctcaacttgcgcttattggtgcaaagctccttttgaaacttggcatattgtggtacttgtttaatggcatcaagaagaggaatattcacttccaccttgcggaatgtttcaagaatttccttgttagcttcttccttcttagtcttcttcaatctgcttaggaagggtggcggtatgacaatggtagactttggtggggcaggactgtttggcttgtgtgtctctttttcatcttctggattatcatctcgtggtttgggtggcactatttttttggctttgggacaatagatgggtcatattgtttcccacttctcaaggtcactgcactggcattctccttaagatttttctcaagttcggatggtagttgattgaacaattgagattgcatccaattacaaaattctaagagttgacccacttgattctctaaactttttattgcgggttcattttgttgttggaatttttaagaactagcaaccatggcattaatgagttcttcagtggtaggcttaggaggtgctaatggggcagcttgtggtgcttgattctgtctnnnaggtgtccactgttgataattaaaagctagttttacaggttacatgacattttgttgattgccatagcagagatttggattattccgccaattaggtctataagattatgagtgtggatcatagatctggcttaattgaccaggaaaattaccttttgctttcacatcttcaggctcatcttcaaataatgtaaggcaggtatcagtagtacgtcccacaatttgacaaattctacatggcctcacctgttggcctaaagcaagttgttggaccacggaggttaattgagctatttgctgagcgagtgccaaactgttgtgacttggcaaccatgtttgagattagatttctggcttctgttggggtcttgtctaccaatactcctccacttgatgcatctatcatactcctctcaaaaggtaagagaccttcataaaagtattgaattaggagttgttcactaatttggtaatgagggcagctagcacaaaaccttttaaatctttcccaatattcataaagtgactccagtaatttgccaaattccacaaatttcttttcaaatacttccaacttagaggctgggaagtatcgctccaagaaaacagtcttcatgtcattccatgtctcaatggtacccagtggtagatagtacaaccactccatagcagcatttcaaagagaaagggaaggcccacagcttgatttgttcttcagtaactgatgtaggtttcatactagagcagacaatatgaagctcctttagatgcttgttggggtcttctccaagtagtccatgaaaagctggtagtaagttgatgaagctggattttagttcaaaatttacatccaaacgtgcataatggatgcacaatggttgctggtccagatttggcgcggtcaactccttcaatgtcttattttgagccatggtcttgtgtgtcgtatgtcgtatcaaatttactattttttttctaatactttcaattatttcagtataaaagcaagtacgggtcgaacccacgtggactatgattactttactattcactattaaatagaaattaaaggggggttttgagctgtaaataaatagtagaaaaagaaataaaaacaaagcaaagttgagacaaggatatgagaaactagttataggttattctccatccttgacaatcattcctaattccaattaatgaatgtaatttcagtttccaatcaaactattaatttcgcgaataaagctgaagcagtcaatcatcccaatctccctgttgtatgtaatcaaggggaagcgctcaataattaactcttttacctaagcagtaaatccacaaagcatgcaatttatttaacttagataaaactttgagatttatggagatagactaatctaggcaacaaataattgaaacatataattcatttcacctaggttctgttcttcatcacaattaaaattgcaatttgtcacaaacacttagaatcctagactattagatgaatagtaatcctaagatgacggtcgattaaagtaaaacctaatttagtggccatctaaacaagattaaaataataatcataacattgacatagaagaatagaagcaatttgatatataatagaaactagaaattaacattcaataataaaattaaaaattcatgtctcgggttttaaaataacccttaactaaaagaaaactactcagaactagacattataatgaaaatcataatattaagtagaactagaatgaagaacacctcgaagtcaatctccgtatcttccttgctttctctatctctctgagcttttctatctaatttgtagctttgaaatgattaaatttgtagcctaagaggtcctatttatagtgcttgaaaagatagatgaatcccctccaaattaggattttttaaaaaatgataaatcggcactatagtccaggaattggggtgctatagcgcccagcacaatttctgttatgcacctaattagtattttggtcataacttcttcaatacaactcaaaatgaaatgattcaagatgttctgaaaagctaagaatgagatctaaaactttcatgatgagttcaaagtccagttctgcttctaaggttgccaaaatttgcaattaaattctgccttgtaaaaccgaggtccccgacttccactattttccaccaaaatatgctaacatcccttgacatgactacaaatgcatgattagtcttcagattagcctagtaaattataattacactaattaataatttannnnnnnnnnnnnnnaatattaatacataaattagctatatttataagtcaaaatatcgacttatcagtcaattgtttaaagcatagcttgtgtaggagacaaacatgtgaattcttgtgtaaatttcttctattttcatttcattatacctgaaagtttacattaagagagagtttttataaagaaatacacacaaccgtagaggaatgttagaccctgatacccccagcctattggtagtaatgacgcaaatggtctacattctaggcgcaagagatttctgatccatccattctcttgagttagaatgttccatttcccaccttatgttgtatctcataggatccttcccatttaggtcctttgaaccccactccctgttcttgcaaaggtgggaagactctcctcaagacgagatctccaacgtcaaatgtatgacttttgactttagaattaaagtgcctagaaatttttccttggtacatcttgagttggacttgtgactgtacccagtgcacttcaattaaacttaatgattatgggagcaaataatggttttgagttggtcataagtgtcttgtttgtgggaggggactgtggtatctactgggatgaccgcttcacactcataaatcatcaaatacagtgtgtgccccgttgaagttctatctgtcattttgcatgcctagaggactcgtggaagctcctccagccaatggcctatacaagcttggagtttctttttcaacgttgttctcaagatctttttcacagcttcgacttgtccattcgcttatggtctgaccacagccgagaagctcttcatgattctgtgttgaatacaaaagtcagtgaagtgattactatcaaactgcttcccattatct

SEQ ID NO: 4188 - DNA, 874 bp, Cannabis sativa
ttttattcgatttgactattaatgaatattttctattttgctttcaaaaaaacatagtaaaatttgagttaaacattctttaagggctcgtttggtacgctgtataaaagttgtattgtcattacccaatgtatgttgtattatttaatacataacaaatggtccgtattagattgtattataatatttacaaagaatttggatcaacttcaatcttcgacccggacccagaacccagtcccgaacccggactcgaacccagacccatgaccgagacccgagacccaagacccaagattggtcgggtcccagacccgggatcctagacccagacccggacttgggactcggacctagacccaaaaccggacccaaacctggactcaggatccggatccaaacctggaccaagatccggactcgaagttggacttgaacctcggacccagatcccgacctgggacccagatctggacccggagccaagacctggacccagacccgggatcgcaaccggaacctaggacctggacctggactcggactcgaacatgggatccaaactcagacccgagacccagaccaaggacccaacccgtagtcggtgttagagtcgagtgtattgaaaatatattaataactttacataatctattaataaagtcaataccaaacattgtattgtatgaaataatactaatacaatataatacaatacaatacaatataataagacgtaccaaataagccctaagagataaaattaaaaaagtctttgctaataaaaacaaaaacagtgtccatctaggaccatcctgtcaaaattttcctaatatatagttaagaatccgatcctttttctttatatctaaac

SEQ ID NO: 4189 - DNA, 2326 bp, Cannabis sativa
atgttgtgtatatattacaattggcttattgtattttgtatattggcatatgtctaaaacttactataaaattaaacgtttttatcatgaattacaaaaataataatgccatcaaaacgtcagtccaatgtcatgttactctaaattatgccacataataaaaacataatgaaatcaaaaacaaagttggtctttttagcacgatgtgcatatgcatctaattgtggtgtggctagccgacaaaataactaaaagtagccccttctctaactacttgccttttcttttatttttcaattttattcttgggtgataaaatatgatcattgctttctaaaattatgtaatatttcaccttatgtgccccactataaagcataaaactttcttcaccaaaaaagggttatggagaaccatctcactacaaaaagtccacctttggtatgttatgcccttgtagagctttgtttaattaaattagacaattactctcacaaacataatattttatttatattatactattcacagatttaattttcaccccaatttccaaagacaataaatcaagacaaataggttttcacaacccaacaaggaaaagtgcttttttattattattattatttgtttttgtttctttcttttatttttttaataaataatagaattttattaatcacaatcaacttaaataataattaattattcacttagaacattttcttgttagaaatacgatcatgattagaattagaaaaacgaataattaaacagccgcctaattctcggatcgtttgatataaaaaattaaaataaaatccgatgaaaaagatcgcagcatcacaatgaaccttaagaatacatatattttgtttcatccactgcttagaagacacaaaagtagaaactgttgtagcagtttcattcaatctcgtagcttaagcatttaactattgtgtaaggtgtactactaacaactttttcaatcgcaaaaaatttgttattcccaactactaacaatgatttcataacaagtcatcgaagaacaaagaataaccaataacgaaacaaaataaaacaagagtagaacacttaaagttatgtcacaaaaacaagataaaaatgctcaaaactatatcacagagacaagactaaaatactcaaaatcatgttccagagataagactaatcgcagtagcaaaaatcgaatgacaataacaaaatagaaccccaactaagccaacccaaggaaggtcagtggacttggccagagaaaaaagataacctctaatatagatttaggaacaaaaaatcctaacttcttccccctattgttttgtttctttcttaaaaatatatggtgatatagttttattgtgtcatatttataagcaagacacaaagaaaaatatattcttttttgaaatatgtaggaaaatttaaataatccacttaaaatgattttttttttatatatttttacaattatttatttatttttacattttttttacaaatattttaccgagttttctcttttttttttagaaaaaaaatatattattttattgtagcaataatgttgttttgaaaaaaaaaaataacactccatatttttattaaaaattttgtaaaaatataaaaaaataaaaaataaaaaattgtatagctataaaaatgtaattttattttttattttttggtattttatcaaataatcttaaatatttattctatataaaatgtggctatataacagaattcttgaggacgcaactcatgttctagaaattgagaccaacctctggagtcaatttcattgttagatcataatcaacagtcaaaaatagtataagtttatttttctatattttttttccatactttattgttattttaataggatctcatttcctataaaaggagagctcttctagctcttttttcacgtccaaaaagtacccataaaatcataacatctctctgtagttttcttctctagaaaatattagagctttcagacttagttgaatttcttttaatactcgtgaatagtaaaaactcaaaatagacatagctttattaccatcgtgacatggagagtgaactactataaattttgtgtctctctatttactgtactcaattcttatttcatctcatcaatgtagcgagcgactgttggtcatttttcaatatctaatttttaacgtacaaaaaaaacatataaatcaagtacaatataaaaacatatacacagattaaaaaatattccctttgtacataataaaagaaaacaaatatttcacaaaaaaaattttgt

SEQ ID NO: 4190 - DNA, 1027 bp, Cannabis sativa
aaatctgctgacaatgtcaggcaacagctagtccgcatcatggcacgatacaacctcaagctatgcagtactgatttcagcagccgtgactactacattaacataagaaaagccatgctagctggatatttcatgcaggtggctcatatggaacgcactggacactacttaacagtgaaagacaaccaagttgtgcatttgcatccttcgaattgccttgaccacaagccagactgggtcatctacaatgagtatgtgttaacaagtcggaattttatacgtacagtgacagatgttcgcggggagtggttagttgatatagcaccacactattttgatctggagaattttcctcagtgtgaggccaagagagttcttgagaggctttacaagaagcgtgaaagggagaaggaggagagcagaaacagaaagtgaagattttctgggatttgatttgatgatcccctctggttatctttcaaacatattctgtatctttgctgaggaatgccccacttatcacactcgtcaatgaaaatgatggaagatacagccatgtttgatgtatcatattctaaatagctgtagaagtagttgaccattatctttacattatagttattttgtaattgtttatttgagttggattgcgtggtttcatttaaaagaaatcacttgtttttaaagatttagaagatggcctatatttttggtgttaatcgagattgcataactcagggaaataagaaaaaatgttcatagaaaaatacatgcaaagagcagttaattttataatattagttttatttgcagtcataaagttaaaagtacactttaatattaaaaaggaaattcaatgcatatattatatgattagagaaaggaactactttaatgtgatggctgcaaaaagacattatatgatttactaaccgggggattgaacatgaagaaccacgctagagtttgacatgtcccataaaagaacagagttatcactgcatcctactacgagatgggaattggc

SEQ ID NO: 4191 - DNA, 2471 bp, Cannabis sativa
  modified_base (1363)..(1364): a, c, t, g, unknown or other
aaaaaaaaaaaaaaaacctgatttttctatttctcagtatttgttttagaaagttttcacaattattgtaaattcaaatgtcttgatctacatgtgcaggaggttaacatttctaactataccttcagggaaaaaggataaaaaacaatgaatatttaaaattaaatttaaaaagcaagataaatctttagatgtagaatttaaagtatcagacactcgtaacgcatcagtttcaatataggtgatatgtaattgttcttgcagtgcccaattgaggttatgaaaaatgactttagcttccatttcatccgaacgaaaaatatccttgtattgactttgaaagggcagcgataacatggccatagtgatcttgaacaatcgctcccacacccaaaaattttgatgcagagtcaaaggccgcaacaatgttcaacttcaaccctgcatcatttggtggctgctatggaacaccttcagttgggttgcattgataactattttatttttttatatttgaatgagtcgcattgatttttttcatcatatttttatttaaaataataaattttttaagtatataatgattctttttctaaaaagaaaattataataattaattttattctcataagtaatggtcttgcgattaattggaggcgtttaataaatgattatgttataccattttctgtatgtacatgagcaacataatgttttacttttatccctattgacatacaataatcattaaacgcttgtgatgtaaattcaccagcattatcaaggcagactgtcttgattgcataatttgggaattgtgcttgtaatggaattatttgagcaagcaatcttataaatgctacattgcgagtagattataagcaaatatgtgaccatctagttgatgcatctaacaatactataaaatatctgaatgatcaacatggtgggcaaataggtccacatatgtcgccctgaattcgttcaagaaattcagggattcaattccaacttttaccagtgatggcttaatgattaactttctttaagaacaagcagcacatgagaacttattggatagtagaattatttggttcttcaatggatgatcatgagttctatattattctacgcatcatgattgaaccgggatagcctaactagtcatgccaaataataaataattttttttggtttatgaatttctcgttcacaataacataaatttatattgaatttatacgtgtaacgtacaaacttgaagacaaaccagacaatttttttaatatgcattttttcttaaaataatagatgtaatgcaaagatacccaatattattttcatctattgtctcaatatgatnnccattacgacgtatatctttaaaacttaacaaatttctttttgatttggtagataataaggcatcttctataataatttttgttatggcttttctagagtcttcaattaaacttaaagtgcctaatatcttctaagtattgtatgagtatttgtgctatctgctaaacatatatcctaaccattatttgtagaattatatgtatatataagatgacaaatgttcattagttggttagagactcgtgctataatgtatatatgagaatttttttaatatgttattcgagtgatctcttatttatacacatggagtgaaagatgaggaaactaaaaaaaatatattaattaattaatagtaataaataaaaaaattagacaacaatatatttattaatatttataatattacacaatattttaagtaaataaaacagaagataattccttataataagaaaagagaagataattaacatacataacacttttttttttagctaattaacatacatacataacacttttattggaaagcatataagatattaaaatatagtcttttatcccattttttggtcatattaggagaaaagccaatgaaaatgtcaatgcttgacaaagtgtgctctataattaaataaagaatatattatatatatttatatggttgttggaaattcctttccctagctatttgaataaaactttttatattataataacagtattttaatttcccctaaaacgaaaacaaagtgaaatattcatgactactcataatttatgtatttcattctgacaaaaatacaatgaaaataaaacttgaatttgaaataaaaaataaaattgtaaaaatgaacaagtattatatataggagaagaggacagtgcatgaccagagaaaccaatgtatatatatatacgtacatattgttaagatgatgaatcatgctttcatgagagatcatatcatgctgattcttacatatagttatatatttcacttaattagacaagcatgacaatggagttgtgcagcaaacaccaaaagggcatgataatatattcttgtgtttcaatgacccatgttattatttaaaataatt

SEQ ID NO: 4192 - DNA, 1003 bp, Cannabis sativa
atatatatgtattcttattagacaccagttctaacaccaacaccaccaccaaataatagagttaataattttttataataattattaaattaaaatttatatacttaattaaatcaataagcatgtgacatattatatagtattaaacacagaaacacaaaaatgcctccagcaacctattaggcccagaaataaactctaaaatgaagtaattttaatattttttaaaataatatgatttgtaaaaaaattgttggcatcagtttagttgggatttgaacaataatctcctttttacttatatatacattataattaaaaaatattttttttttaataattttttagatgggtggacactcactcttggctctttatgagtacgcctcacccatttaggtccccaatttcaaaatttttgtatttaaatagtcaatttcttaaaaacttagaattacttttactttttcatgcatttttttttattaaaaaaaatagagatggcaaaatctctaatctatacttttagttaggtcccaaattcaaactacttttattagtttaatttttcaaactaattattatttttttgtaagatttttctaactaattgttaattaatatgcatgtcaattaaattaatattcagcattgaaaattaactttgattgtcctcaaaataaataactttgattatttgggacagaagatagggtatatatagtagttgtcaattattgctatacttactcaattattataattttctcaattatcataattaaatacaaataatacatttttatataagaagacagaagtgggctataatattagttgaaaatatagtattatatgagaaatggaatatcctttacatggatatggtagtgtgagtgtcgtgtagcatatgaaatagtatattcctgtcggctacaaacgcggtacgtaactcccaccaaaacaaacatgtgcattattcatttgaattttgagcaccaaa

SEQ ID NO: 4193 - DNA, 1041 bp, Cannabis sativa
ccccccccggacatatccatcagccggcctggccgtccatagaggtcttgtcagcctggccaatgaagagggctagccagccaaggagtactgtctgaataggaagcatctagagtagacacatctatgcaagcacaattggattaactcaaagacatgatcaaaggcttgtcaggcccaaagttgtcaggcctcaaaaaggaccggtcaaggggatcacctatcttagcgtatatcaatgcgtttctgctaccaaaattaaaagttctaggttggaatatatacactgggaaagaagatcccctggcacacataaaatactttgagaactaaacagatctccaaaaagtaactggtgatgtgtgatgacagatctttttgtcaaccctatttgaaatagcacaacagttgtatttcaagctgaccccaggaaggttcaacttttgggaggaattatctcaagaattctatactcaattctgttcctcgagacaaataccttcacagttggaagaccttgttaaaaaaaagacaaggcaaacccttgaaagactacatgcaaaggttcatgaccaaaagactaatagaagaaggacattatatggaaatacttagaggtatcttaccattaagtgaattctggaaaaactttagaaggatcttaatgaacaacatgaaagagttccttgaacgagctgatggtttccttaagtttgaagaagttgtctgagaagcccagacaagaaggtagaatagtatttgacataatcaaagaggcgtacaaccctagttctacccaacatgccaaccaacacaggcaatatcgtccagccctccaacaacaagaataatggaagcaaacgcaaaagtaatggccttggccgaaataatggcaaaaagtggaaattcaacgattcccctacaccataagatcaaagggagaaggaggagaagtacactagctcaacatcctatcctattaaaatctctagacaatgaggaatttggtatatacttggctgttagagaatatgatgtaac

SEQ ID NO: 4194 - DNA, 940 bp, Cannabis sativa
tataatgaaatattgtttccaagatattggccttagaatttctgcaagctaacattttgtgaacagtcagcgttgttcttttaccaaattgatgatgctagaatgatctttttctactctcttttatgtcagtgtctagaacattagtcatctaagaatggcagtatgcaaagttaatgctatattagtaagaatttgttatttatatgttcttaccctttgagtgagcttgttcggaatcatctttcttgttttgtttttcccattcaaaattcttatgtttgggacagggctgttggagatatagaggcatactttataaaggcttaggcattcattaattgatgttttcttttgatctatatttgttggatctgttagattgagtgagcttgttcagaatcctctttattgttttgttttttccattcaaagttcatgatcgggacaggactgttggatctgttaatgtcagtttctcttttctgggtattctcaaggcatacattattttacatccattgctctttcaggacttttttgaggacgtgggaccgttactaagtatgcaattgggaggtcaaacattggaaggtttgtttcaagtgttcaacacatacatgagtatgctcataaaagccttacctggttcgatggaggaagaagcagactacgagggttctggaaacaaaattgttagaatggctgagtcggaggctcaacaaattgcattgcttgcaaatgcttcgttattagcagatgaattacttccacgtgcagccatgaagttgtctcctttgaatcagggtaataattatgatgatccacgtagaagatcttcagataggcataatcgtcatcccgaacagagagaatggaagaaacggcttgctggctcagttgatagactaaaagatactttttgtcgacagcacgctct

SEQ ID NO: 4195 - DNA, 1856 bp, Cannabis sativa
taattttcactaaaaatttaattagttagtaattaattacgattgactttattattatgaatctattacttgaaaataatacgtagatttacgtgttaaaaaattcataataatcatacataataagtttatcctcgttaaaacataaataaccttttctttgggaggaaaattaatattttctgtttccattttttaaaattatttctctaaaaacaacaagatttattaatatcaacaacacaaaattttcattggtagtcaatcgcataaatataacgtcttaaaattgttaaaaacagttgttgcagaaaaaaaaaacgagtttactgaattaaaatttgagttgagtttaccgaattaaaatggttcttttaagagaaatgctaaagcacaccagtggtgcctaacatcctcctatgtgttaatatcgctattggtccaattaattatcgggtcccatattatttaatataatagcttttatggagtatcgctaaccaatcacaacgcgatatgtctagaaggtgctaagcaccactggtgcctaaatacttttcttttaattgtatggttatcatttcgacacaaaatttaaaaaatgagtattgattatgctataattaaatggacataaatttgagtgtacctatatggtttatgtagccattatgacttttatacttaatatctcataagtgtttaaatttatcacaagagtagaaaatttgtatttaggttgagatttatatgttctagcccgaatataattttttttagtaaatttgctatcacatgaaattaaaatttaagaattaaattatattaaactatataaagtagatttattttttagagaaaaaactatataaagtacattcaatcgaaaataatagccctaagctttaaatcattattaagtttgcattaattatttgttttcttctttatcttttttttcattagaattttaattatctttctgtaatttgtcaccaaatagaacttagaaatttagtaagctagtaattcactatcattttttaaggatcgacctcactcttataagtctattacttgaaaataatatgtatacttgcgtgttgaaaaatccataacaatcataaacaacaagtttataagcaaccttcttcttaatgaggaaaaataatattttgtgtctctatcttttaaaatggctttccttaaaatgaaaaaaatttattaatatcaacaagacaaaattctcatcggtagtcatgaaatacaacgtcttaaaattattgaaaatagttatgacacaaaataaaaggaacgagtataccgaattaaagtatgggttgagtcacgaactaggtcactagatctttttaagacgttcgtggcactgaccaattgtgcaagcaacctatcagtctcgtcgtccccagaataaaacaacccaaatgtaatactttataggagctccattgtacgatagagaatcgtcaaaataccacatccaacactactgcttcgaatatatttgtaatataatcgtataaaactatatatgattttttcttagagaaaagggatgtctttcttccgttggttctgatacattatataggaacacacagaatgaagtaacgagaagaaagaaaaaataataatttaataaataaattttctctaaaaaatataaagtgacaccatacctaccagctcaattcgacacaatcggacaatgacgacgtgcatatatggtggtctggtgtgtgagtcctcactcatgcgcatattcacttctcatacaaagatcttgtaaaatttcactaaagttcaaacaattttctttattgtggcggatttaa

SEQ ID NO: 4196 - DNA, 884 bp, Cannabis sativa
atagtgaaaatggtgtgctgttttatatttcttcttattttgtcactacagaagctgaatctgtataaatttgtacagtagaagtaaaaatttcatacaccctttgtataatatagatatttcggttagttgttataaaaataagattttgtgcaattgtgattttctgaaatcaaatgtagattaatgagaattttagtgagagtgcgttcatcttagtgatacaaaaagtcacaatttattgaaatactgtaattgcatgcactttatattgactaattgaccatatactcgccaaagaattgaaacatagtagtgctccaatggaaatgtactggtcacatggtgaacacaggatgtaatttgttgagcccttgaattttatgggtaatgttctttatgaatcatgattttggtctttcacatgtgttggaacaagtttattaacaaatattggaaacatattttcatttatgtaaatgtgtgattggggactggccagtgggaaagaataagggaacctaaaaaatttgggaagggtttcatcgtatcctacttggacctatatggcttttgagctttacattaataattttatttctctttatactataaaatagttggagggagagttgtctctttttgatactctacatttttttctttccaaattataaaaggtctttcattttcttttttcctgttatgttatctatgtcagaaggcaatcactgcttgccgaaaaggttttcttttctctcccataaaaatcccagaagactattttttaaatgaatatgaaattgacttgttacaagattccccacaactgtatttgaaaacaagtagactaagtcaacatttcatctcttctaacgaagaaa

SEQ ID NO: 4197 - DNA, 1020 bp, Cannabis sativa
ctcatcatcgctccttaagttcccgtgaactcttagatctcgtcactaccttcaaaatcccaatcagtaacgaagaaaagaagaagaggcataaaaataaaatcatttgttcaatgccttaaccatcaacaattttcagttgcttcaactaaacaacttataatttatttgtttagttaaagcatttttaatagagtgttaagaaagtggtatattgctatattttagcacatttaaaaaaaatactattccaatagtgttctaaaaagtttgccaaatttaacacatgtttaaaattgtgtcaaatttaacacaaaatatagtattgcgccaaatttgacctacaataaattttatttttttatttactatagtgtcactaattattatgattcattgacttttatataactttatcttatttatttactatattatcattattatatatatactataatataattttttattttataattaatttgtttgtattttcgaaaacaaaaaacaatctcaaacatactctaaaacaccacaatatataaaacaacttctaataaattattgttgatcatcattaatgttgtattgaaaatatacaaatgtcattggagatttatgtcatatgaatatagttgttaatagtattaaaatttattaaattgttgatattaatattattatatatataattatttttttcaggttaaacaaacctgatttaccattagcttcaggagaaatgtcaattgaaatggcatgggttttgactatattttgtgcaataagtgggctcatattaacaattacaatgaactcaggcccattctttccttttctatactgtggttctatttttgtggggggttttctctattctgctcctccattcagattcaagaacaatcattttacagcacttttgtgtaattatgcggtatatatagttattaatattactacaattaataactactattttaaaatatatgttacacttaaaaaatgttaattatt

SEQ ID NO: 4198 - DNA, 1002 bp, Cannabis sativa
cttgagaattgactcagttcatttcaaattttatttgcaggataagtccaatgatgccgaagacaacatggatcttgttgagattgtcacctcaggtttgtccaaattgaatcacatataattgtgcattttattggctcttacatccaatctataacaatgaaggtagctcctcatcccatgatatttttgcgttgtcaatgtgtttcaggatattctcaatgggcttctcggttccctcgtgttagaaatgcagtcgagagataactctagtactctcatcccatgcaacctgacttcgacaatggtttcctcgtgcaggcagctaagccatggattctgttgtaagtggatcaaattctgacaagggaatctgaatggtatatttctgggattattcagatggacaatgagattgggaagagaaccattcttgtgtttcaactacattacatgcaaatgcaatggttcataaggatcaggggttatttaactaagctcatcgtttcggttttcacatggctgcagtgcagctactatgctctcttgatatttggattgtactatggtttggttgtatttatatatttttatagttttttttttataaaatatatttttataattaatttgtaatacaaaatctactctaatacagctgaccttttcttttttaataataatttttcatcttttccgatccacctatctctctaaattcatcataccacccaatcacatcatccaccaaggcagacgaccacccatatatttaggcaactctaacctagttttattgtaagttggtagaaaaatgattgtagtttatttttggaaacttaaatagttgaaaaatatgaagaaatgacatttttcaactaatacatatatctatgtaacagagaataacagaaaatgttattctcttttttaaagattgtgatttaaatttaaatgcatatctattttttttaaaattaatttattatattatattaaatg

SEQ ID NO: 4199 - DNA, 1679 bp, Cannabis sativa
tgttcaaaataaattcaaaaaattcgtatagggacattgtagttataaaagaccttctcctccaaaatatttttgcgaagattaacaaaacaaaaagatgaacaagattttatgtacattgattgaatggcataaagtcaatgtttatatacaagagcataaccaaaaaaccaactaaagaagaaaaaccaaaaacagttagagagtagttacataaatgaacaaaatctaactcacaaaacacaaagttaattagataaagtaaccaattatgcttctcttaacagtccccctcaaacaaagtgtcatctatagaagagatactaagtttgcttctgagataagaataaagattgttggctttgttaggcaatcagctaattggtgttttgttgggacatgttgtacttgaatttctctgttgattactttgactcgaataaagtaaagatcaacttcaatgtgcttcatgcgagcatggaggattggattggcttcgaacatgactgaacttatgttgtcacaccagactagagatggagatgaagcggggacatgtaactcagttagagcaattgcatctaagttaatactgaaaccacaactgcaaggcttcgaaattctgcctctgttgaagatcttaagattgttggatcctttttggattgccatgacattagattttggccaaagaaaacacagaaatcaggtgtggatctactatcatatggatctgcatcccgatcagcatcacggtatgtttcaatttgaaaattagagactttgttcaaatacagactgtagtcaagagtttcagctaaataactcaatattcttttgacaataacccaataagattaaagaggattgtgcataaactgacatactttgttcacattgaaagcaatgtcaggtcttgtaatagtggtatattatagtgccccaacaattggcctatagagaattggataagtcgctgggtcactgccataggttgacagtttcaagccattattcataggagtgttgtgagtcttttccccttgcatttcatctttacatagaagatcttggatgtactttttctgagtaagtagcagaccagttgcagtaagcatcgctttaatgccaagaaaacaattttgggtgccaagatccttaagtgcaaatgagctatttagcttggtgaccagtgaacagacataagtatcattggaacctgtgatctagatgttatcaacatagaccaacacatatgaacagtcaatagaatcatgtttgacaaacaatgagtgatttgtttttgcttagataaagccaagtgagagtaaaatagatgagagcttgtcaaaccatgtccgtaggtcttgcttgagatcataaatggccttttgaagcttgcgaactttgtgaagaacagatagatcaacaaagccaggtggttgaaccatgtagatttcttcttgaagatccccatttaagaaggcattattgacatttagctgtctcactgtccagccttttgtgatagcaattgtcaaaacaattctgattgtgacaaatttaatgacaaagctccgctcaagatgtggtcgggtacatccaggaccgagataccaacaccttccattgtacccaattttccttcactgtgattgtttgggtcaacgacaatagct

SEQ ID NO: 4200 - DNA, 5379 bp, Cannabis sativa
agttgagttggaactttattgacctgatgcttgctggttttggagcgccccaaaaatttagaggtcggatctcccaatgtatcactaccaactcgctcaacattttcattaatggagggcagtttggtaaaattataccctcatgtggccttcgccaaggtgaccctttatccccttacctctttatttgtgcagcaaaaattctgtccagacttttgattgatgccttagataatggctctattaagggcattaagctcagtagagggggcctggttatttctcatattttctttgcagatgatttaatcttaatgggaagagcgaacatggaggaagtaaaaggttactggcattgtcttgagaggttttgcgcttggtctggtcagcaagtcaataagctcaaaacctctatatgctttagcaaaaatacctctaatggcatgaaaagaggtattaaggaggctctgggattaagctctctggaaggtaacatcaaatatctggggctacctctatttagatccaggcaaaacgatgcagatttcaactttatcttggataatctcacttctaaacttcagggctggaaagctaagattctgtctaaagcatgtcgtgcgacccttataaagtctgtgggcttgtcgttgcctatgtatgctatgcaaacaactaagctttcgaaccgtcttgtagctcagattgatgggctggttagggacttctggtgggggtttgaaaaggggaatcatgggctccaccttaaagcttgggagaagctttgcctccctaagtctcttaggggtttgggttttaggaaagccaaagaaatgaccaagcgttcctagccaaatagggatggaacctcccgtctggcaatcaatcccttcgttgcaaaatcctggaagctaaataccttagaggaaagccctttctcaagtgtacttccaaagattgtgattcttggttttggaaaagtgtggtaagagccatccccattttaaaaaaaaggagtgtgcaaggtggtggtgaatggttagatactaaggtctgggaggacccttggatagctcataagaaagatttctgccctcgtgctaatggttcctccacttgtgaagtggataaggtggctgagctgttgatagataatggcggctggaacatccaaaagttaaatagtctcttcgacaaggagactatttctgcaatcctgaagaggttaatccgtctggccagggtgatgatagatggatttggactttggaaaataatggtaaattcacgagcaagtctgcctacctggcctaagttgttgatagggctcccacttgtgacgttgctccttcactttggaataagctatggaattgtaagatcattgaaagaatgaagaccctctggtggtgtctcctgtccaaggcaatccctgtgcgagctgagatctgtaaaaggtttcctattgaggatgttacttgtcccctttgtgggacagagaatgaatctattgaacatctttttctctcctgtaatgtggctttccacttgtggaggtctttcccttggggtatttacccagtttgtggtactggaattcgattatgggactgggtcaaattcatttgggaccttaaaaacaagagcattaatgccgatgaggtgttcctttatgcctcgctaaccgtggacactatatggcggacctaaaatgaaaaggtacataataatggtcaggttgatgtttataaatgtattgacaatattcgttcctcttttacagttcaccatgcttctttgatcccttgtgcacctctgcatcgactggatgactggtgccctccccctcaagactggttgaagctaaattgtgatgttaaagtggggttggacagcatgtgttctgtggtcgtggcaagggatcatctgagtggggtgatctgggtgcatacttctaagttggattcgctgatgctttatgtggggaagcagcggcttgctgtcttgctctggatgtcgcgaagcttaatggagttaagtttattattgttgagagtgactcgagggtagtgatcagtgctctcaatagggaggttacccgttgggagattgagaactacgtctcattttgtattagatcatctcattattttgttagttgtatttttactaatattagtaggaactgtaatttttctccccataatgtggcaaagtgggcgtttacccactagaggttcagttgtattctgatttcctctatcccagaacacctattttgtaatgaccgcgaggtctaacatcttttgactttaatataagtacgattttattcaaaaaaaaaaagagccaataccactactattcatgaaaaggttaatcaagataatttgtttatttattatttttttttcaataaacatgcatataataacatacctctagttcactacaaaagatattgttcggaatgaaacaaaaacacaattataccggttgtgtgtaaaggtctattttaccacattataagctacaaaattgtatattcttttaacaaaagaaaattacaattagtaaaataacaagaatgtctattacaaaaagcagagtagttcttaattttccaatgagaatccaatccattgagcgtattgataatgttgaagttcctagctatgaaagaaaaactaacaaagtagaacagaggaaaaaaaaaaggaagaaaagaggaagacaacgattgaaaaaagagtcttattcattaatggtatgtgttatagcttatatagtagcttagtacaagtgattcaataatagaatccataacacacaataagagctaatagacacgtgctaactaactctatcaacctctaactatattaattgtcttcaacacctcccctcaaactcataattgaacgatcttcaattttgagtttgtgtctgaactcggaaaacttttgactcgatacagctttagttaatccatctaccaactattcatagacatagaggtgtttaatctgaacatttttattaagcaccttttctctgatgaagtacaaatcaagctcaatatgttttgttctttggtgaagcataggattctgtgtgagcatttggtacttagattatcacaccatacagtaggaggttgagagagttgtattcaaagttcagagaatagatactatagccaagtcaattcagctgtgacactggcaacacttctatattcagcttcagtgcttgatcgagagatggtctgctgctttttacttttccaagcaatcaaattcgagccaagaaagatagcaaagcctgtagttaacctttgatcatctggatttgaggcccaatctacatcacagtaggatacaagatcaagagtgcttggtttttgtagatgcagtccatactctgatgtaccactactgtagcaaagtaatcgtttaatagttgaccaatgtgtagacaaaggtttttgcataaattagcagaccttatttacactaaagaaaagtttaggcagtgtgatggtcagatattgcaaggctccaacaactgacttatacagttgaacatcttccaatggttccccctagtaagctgataaacgaataccacttgtcattggagtaggtgcaggcttggcattactcatttaagccttaacaagaagatctttagcttatttggcttgtgacaggtgaatgcctgcatcagtttgtgtcacttcaataccaagaaagtatgtgagagggcctagatcttttagtgcaaattgtctattgagagttgtgataatagcttccattgtagtttgatcacttcctgtgatcaatgtatcatcaacatagactaatataagtgtaacaaaattagaagtatgttgaataaatagtgagtgatctgatttagatgaagtgaaaccaagagacagtagaaaattttgacgcttctcaaacctagctctaggggcttgtttaaggtcataaagagctttgtttaatttgcatactagatctcttttgccagggacctcaaatcctgaaggttgcatcatgtacacttcttcttgtaagtctctattaaggaaggcattattgacatcaagttgtctaataagccatccttttgtcaaagccattgtcaaaaccacccttattgtgataggtttaactactggactaaaggtctagtaaagtcaaaactatgttcttgatgaaaccccttagcaacaagccttgccttgtgtttaagtaaatatctatctggatttttcttgattttatatgcccatttacaatcaatagctttccttcctggtggtaatttgacaagtgtatatgttttgtttttgaccaaagctaagacttcatcacacatagctttattccaaacaatttgactgagggcctcttgaagtagggctgagcatgggttgagtttgccgggttgagagtattttaatgacccaacccaatgacatcgacctggagatttttaacccattcacattatgaatttttttataacccaacccattttttcttttatgggttgggttgggttggtttgggttagcccttattccataattaaaaaaaaaatcagatttaaatattatcaaatcgtacctaaagtgaaaaaaatttaaaaattcacataaacatatccatctaaaattacaaaatattaagaattaaatattacagtcatccaaaatcttattgaaattttccataacaaattaaatattatattaacaaaataaaatcaatttccatatcagcctcacttatcaatctcaatgtcaatagcctttgcttttggtgatgattccttcaccttaatttattttctacaatcataaaaaacatagttagccaacttattataaatacataaaaacataataaaaaaagaaatgcaattaatattgattataaataaaaattcagtaaaaaattccaacaaaaaatcggtaaaaaaatagattataatagtaattgcaactaataaaaaatttatatactcaagatcataacaatacaaaaataaccaaataaaaaataaaataaatatcgaaagcaaaataaaaaaaatattaacaaatacttattttctttcacaaacatcccaatataattgctctatatattctgaatatatatatatatatgttattttataatattaatagcaactaatattcttattatatacattatatttattcacaaagaaactatatactaacttttatataccattgtttatcagaaaaaaaaaatcaaaaaactaaagatgaagattaacctgagtttgtgaggtgtgagtgtgactgttgtgcgtcattgtaggagatcgagg

SEQ ID NO: 4201 - DNA, 1275 bp, Cannabis sativa
ttgagtaaactaaaacaattggtgtgaaaaagggcctttattttggtgagggtgttgtattgtaggcttgtagtatattgaaagtgaaagaatggccgccattaagaaagcagcagttctgtaccactatccatgccccgacggcgcgttcgccgcactcgccgcccacctatacttctcggccacttcaatcccaaccctgttttttccgaacaccgtctacaaccccatcacctctcaagacctacctctccatcaaatcacccatctttaccttctcgacttcgtcggccctcccggtttcgtaccccatgtcgcttctaaggtctccaatgtcgtaattttggaccaccacaagaccgccctcgagaccctcggcgccggtgctggccccggagacaaaaacgtaactaaaatcatcgatatgcagaggagcggagccaccatcgcctttgattacttcagggaaagggttagtcttagtagtaataatcccacggtgcttgcccagttcgatcgtgctcgacctttgtttgagtatattgaagatggagatctctggcggtggaggcttcctaatagtaaagctttcagtagtggttttaaggatttgaatattgaattcaatgttgggttgaacccttctttgtttgaccaggtacaatctcaactcttgcttcatcacacttttttgcagggaaaaatatatgtaatattgcataaggaaaatagtttgtccaaagaaaacaaagaaagaaaattgtaaagtatacaaataaatatggaaaaaaaatcctaacaaaaagctttctttgtctgattttggtacatagatagttataattctgttttgggttgtgtctgcaaatagtttagcattttttttttttggactatgacagcatgactactggtaatagaaatatatcatattgcaaagatatttacatagtatttttaacacaatgaacacaacactttatgtatcacattatctcttaaagcatttatatgaacactaagaagctgtaatatatatggttttgggcagttacttggtttggacttagaggaagtgataagtaaagggatgaaaagcttattagagaagcaaagattgatagatgaagctttgagcaagtcctttgaaattgcacttggtggtggacgatttggacattgtttggtattttcctctttatacaacttttttctttttttccaatgaaatttcttatctcatattttttgttagatttatgtgatttagtgaat

SEQ ID NO: 4202 - DNA, 1282 bp, Cannabis sativa
taacaaggggattgttaagcgagttaatgctacctgctatccatattcccttcttaacattgtttataacacaacagcctgtggactgcaaaaaattatgtgcctcatcttcgtcggggattctagctggaaattggagtctttctgtcagaaatgctgcagaagagtccattgaaaaagcaccaattcgcatccagtctactttttcccatcaaattcaaagtgcagataggaaaatattagttgccaatacagtataagtacatatttctccagaaaatacccaataagaaagtagatattcaacagcattggtttagcatttattatgttcatacagttctgtttgagttggtgttagttgtacattttcaaaacaagctatatgacttaccagtgaaagttaattttggtgaggctacttcgcaaattctcattttgattagagtacgtaacgtgtgttataaagtataataaatcaaacaattacagtatggtgtcgaaattggtcaaaggatacagaagaaactaaaattgcaccaaccaatatgtttctcctgctgatggaaattgtaagaatgactcccatctgcaagatcattcgtcgataaggatccattagacgacgacaattacacattaaaagtcagtttacaggcaatcatattccatactctggtccataccaaaagctgcagcatagaggtcgatccatttgaaggacacgtggcatggagtagaaacctgaagatcacgcatgcaaacatacttccatatacaatcttccatcagtgtacgattgaaccaccgactagtgactgcaagcatcaccagtgacctcccgtcaagaaacttcgcgacctctgtccacaggtccttttcaaacctattcacgcaatagaacaggagaaaaaaaacttcatattattataaaattacagaaacacaaatctactgttttctttttccctcaaagcttatccaaatagtcactctgcttagttacaatgatgcttgagcgcaaaagttaaacagagtatttctcacgtttctgcaagtgcgaacgagattaattaactgctaaatctttctaaaaggaaaaattaacaaattaagatcgttcgatcttcatttctctaaaccttctgatataaataaaacaagattctaatcggatgaaattaagttcacactaagctagtcaaattgtgcacaggaatttttatgacgcttaaacacgtagatgaaatgcatccaaggataagaagttcaagacgatcta

SEQ ID NO: 4203 - DNA, 1024 bp, Cannabis sativa
acagcaattaaaataaattcacttactttgcaattaggtccttagtttttaaattttctcatttcaattatggataattaggatttttactcctaaactttaacatgtccaaattatatcctctgaacttttcaggacagttaaaaaaaaaattcatattgagattttttgattcaagaacttatgtccaatgttcaattttactaatgcgacgattgtccatgtactaaaccgtgctcttccaaagtatctttcaaatcctacaattcaacaatctaaattttttttaaagacttgaaaaatttatgggacaaaaattcttattagcctttttcttagtctatgggcttttattattcttctatgaatttgtttataatttttatagagtaatttgcagcataaatacttaaatttaactcccagttgcaaataaatatctaagtttaattttttacaataataatatctaagttataattctagaacttctgtagctagttggtcgtcaagtaagtaaattgtcacatggttgtccttgattggtccaagtcattaaatttttatttttttatttaaatatataccttaagaaagttacacgtggataatgacttaacacttaacggccaggtacctacagttaggactttatgagtactttttttaagttggttcttaaagtatttttagtgtgttttagttgtattttgtgtaattttacgcttttagctattaatatttttaggtataataatgaagaagaatagaacaaattcgagaaaaaaatgtgcaaagaggatgaattaaaaaaggtcttgtcgctagagcactaggagatcaattcgagaaaaatttcgaagattcgatgtgattggagctttcaaaattgaagaacttataagtttgtagtagtgccacgacatagaaattcaatgtcagggtgttaaaaggcaaaaatttggcagtacgattgtggttagaaaatttataggcgggccttgacattggggttcaatggtga

SEQ ID NO: 4204 - DNA, 813 bp, Cannabis sativa
tgactgtgacttcatctatgatccaagctaatgcgaattctgaatctcttgcagagctgtagaaaatgattagagttgatgattttggataaacatgttaatgtgaggaagatgcatcaaactgcacctccaactatcctctggggaccctttttgaaagcagcagctttagcaagccaaagtttgtttattgtaaccattattatgcaaatcccacgagtgctctcttactgtaaggaatcttagcttgattcttcttttttgtgcagtcttatttttataattatgcctctaaaataaccccattggtaagatttgtctaataattgatttattgtacagaatgatcacagaggtgttataggacttctggggtaagtatatgcttaacatatataatttgtgtatagatctaagctttccatttgtatatcttgaactaagaagtaaaatatttaaatatatccatatgccttgaattccttctgtctaacatggtgacttatatgtgtacaagggatatagcgagtgagatggtttagtattattgttttgctttcttgtactgtaccatatatatatataaatcaaggacatgaatttctggctgactctgaagacactcgccccttctgtcaatgtctttggaaataatcattgttttcttctttatattattattttaaagcatcgtccataacgacaatcgatcaaatgcatgaacaaatcatagcaaataagagtggcaagtgtttcttcgttgacgattttttttcagtcaatacatacattaattaaaaattatatttttat

SEQ ID NO: 4205 - DNA, 962 bp, Cannabis sativa
tggagaattttacatttataccattctagactattttttttttttttatactgtgttcaggccaaaacaaatgaacctcatcattttcagcaagcatagccgaaaatagccgatcaaccacaaaacagctaaaaaacaactattatttaacctaatctcaagagcatagaatgttgatcatctccgcaaatactatcaataattaagaatttaatatttaatttcataaatttttaattaaacaggaccacttgtaaactaagaactttatataatatactcccctttcaaattcacccaaagtgacaaaaaattattaaactacttggtcacttgaggggtagtgggacataaagcatattactcataaggttagaatgtaaaaaaaaagagcgtatataaaaaaagagtatatatatatataaaaaataaaaaaaataaaaaaaaagagccttggggataggctaataaagtgtctcccttgatgtaaaaaaaaaaaagtctcacgaacaggctaataaaaagtctccgcaacatacaagaaaaattaaaacattgaaaaaattccagataaataacaaatcaatcatctattggaggaaggcgaggacccaagtctcaacaagattgacatccagttttttgtttttctcccaaaaatgggtcagaacagcttcaggtttgggtaagaaatgaagtttagtctcaaatttgttaattagacctccaacacatgaagacaccatgctcaaaatgcttcacacactagtcacaagtgactggggctgcaagagccttcttagtagctttgtggcttcctggttggtcttctcttgaaaatcacaaagctgcttgagctccacagacatgctgactgcattctggatatccgtttgatggagttcatcaagtttttccaccttggcctgaagtaccttgatctccttcggggtctaggtccg

SEQ ID NO: 4206 - DNA, 653 bp, Cannabis sativa
gaaaagaatataatcttttactcaactttttctttttaatttggataaacacaaagttttccagtaaaacatatcaatcaaggctagctgtatgtgacttaatcattattcatcatagttctatttacactacaaaaaatatttactggatttttttattttattttttgtgaaatgcaaatattaatttaccgatttaaagtaaacactattttcccctgaacatttttgttttgcaaaaaaattattgaaatataaaaaattaaagaaaatatcttctctaattgcaatttgctcattttctttaaaatattgtgttgatgtataatgtgacattaatctgatttagttgatcaagagccaaaataaaaaataaatacataaacaatagtctattgataaattataaaagtatatgtaatttttaaagttaatatttaatgtcaacaaattgaatttgagtagtttaaaattgttaaataaattagtgcaactatacctgtaattcatgtccccataaataaatcatttaaaaaaaataagcaaaatgtaatcaaatgaaaatatttataacaatttgtgacaaactctacaaaaatcatagttgatgggaaattttttttatttattaataacaatttgtatccaaatat

SEQ ID NO: 4207 - DNA, 1231 bp, Cannabis sativa
actagggtttcatcgcttcttctattaagcctttctgataaaggcgatgttatcgtctccaaaagctttggtgatacttcggtcgaaaggtcttagctcactcactttctaggtgttaggaagtgttcctaccttcatatattgccattatttaggttctttttcaatatttgtgagatttatacggctttttggagcggtgtaatgtattaagtcataatgattgcatactataaattttttaactctggaaattttcttttcatttgtctataaaataataataaattaaaattatctaaaattcaattagtttaagaaatattatgagttccatgcatgcggcggctatagacattttccttcatttttgcaattatgcttatttgtttgcttatgtcaactctcatctcttaaaaattatataattatatatagatgaagtagaaaagaaaaaaaaaatcctcctcaaatataaattacagggtggaaaaataaaattatagtctcttcaatttatgtgctccacccactccacataagtttaatgagcacacggggacttacttctcaaaatcagagcaaaccattatactcataggacaaaccccatctagcaagcgcaacgacattattaatccagaaatccaacaaaactcagcattcctacttactaaccttatcactccacatcttgataaccttatcacttgcatagcaaaagaaaacaaaatgtatcacatatatagggatatgattttatcccttaatgtactttcacgaaatgtattcctattacattagatgggtcttaaggtacattaaatgagtgtcagggtatgtttttactttttaactctaattactcctaaatcaatctcaaccgtcagatcaaataactctctcatctgacgactgtcgtacatcacggattacaaattttgaaaatataataacgggacaaaatcatatcccatgtacatatagcaagaaaattcttctgctacgcaaaggagtaaaagctgtaattagctatatttgtatatgctcaatccacgtgggatgattagattggttgtgatcactaatagagcgtcgacgtttggttttatttttaacaatagttggaagagagagagtgaaagtatataaatataattggagacaggaacggacccacatcattaataattaagctagtcagatcacgttgtttttttttttttttttt

SEQ ID NO: 4208 - DNA, 1983 bp, Cannabis sativa
ttatatcccttatagatatacaaacatttactgcattaatttgctcataaatatatagctcttattattgaaagttggtatcttttgtttattgaggaatttaaaatggcacacaagtacccaacctatttattatttttttttaagccaatgaaaatcattatcccataattttattttatctgtttttgttttttattatatatacatataagaaaaacatgttgatttaattttttttaatgagttgagaaggaatccactactcaaatactcgcattaaaaaagcaacaaactttaaaaaagaatatatattaaaatatatcttaaccaacaatcacaaatattttatttctttgtatggaaagttcaactatgtttcttgattatatttcattgattaatgagaatcacaaaaatgtagtagtaaatttgagtcatcgtattttaattggttagttgtgccaattaattaatttatatatatgtatatagtttcctttataaaaaaaaaagtaatttatatatatctttgggtgtttctaaaattaagtttaaataatttattttacatatatataaaataaaataggcaatatacttatttttatggctgcaaaccattttaattttttcaaaaatttgtaagtatccaaaatatttactgaaaatttgcaagtatcgaaaatatttactttgtaattagaattatagtaatttgaatatcgaaaatatatataaaaaataacttataatattaatatttaaatttaatttttaattgtaaataaataaataatttttatatttattattagtttaaatagtttctaattttcttatatatataaaagtatgattactttcataattggtcataattattttgttggggtccacataaaatatatatctttttcataaggctgaaaacatgaataaaatataaatatattttgagtaactcaatgaataataatataacacttactcattttttttactagggttaggtatattttctattaatgaattaataattttaattattagtattattttaattattattattattaaaataaataataaatataaagaacgttggggtgaaaaagatgacatgcagtaagccactgttggagtagtatatatatttatatatatatatatctgtgtatacttttcaatttctctctctaaaatacttctctgtctaatctttttccaaggggaagaaggaagaagagtacttgctccctccccctcgaatctccttcctcatccgctttggttaaatcccactaaggagagagagatagagaaagagagagaacccagaagaaacaaggcatggattcgtttctagtggaagaatttcaactctcttttcttggtatttgttatttcattatttcatcatcacacttcttctctttctctctctctttttttttttttgggtttttattttttattttttaaaatattacctttatatatatatatatttatattgtttgctatttttgtttgtgctctgaggattttcttatttacaggttcacaaaacttgggttgttgatgctaatgtggtgagctgattggttcccttctattttttttcctataattatggccaccgattcttcttctgagggtaattttttttttccctttgattcagtctaaaatgttgggttttgattttcttatgtgatggggttgataaaggttgaatctttaggtgattttctaatctgggttatggtcaaatcgttatataacattgtctaatctgttgttaaaggatttggctttgatttcaacatctgggtattattgggttactgattaaattgattgtatatatgcgaattggtgtgtttttgtttatagatcgatgtttgaatctaattaatttttccctttagcattgtcttttttatatttttatctttcttctaaacatttattattatt

SEQ ID NO: 4209 - DNA, 1852 bp, Cannabis sativa
atacagggaatatatcaatctggagagaaccgggtatttttaaaatatgagcatgaataaaaaaaacattcagcgttaatcttcgcaataactgtgaagtagaatatttaccttgcacttcttgcaagtatacacagccatactatatcgttcatccacaatcaacctgtcacggagacgagcagatgactctttatcagcaatatcatctaaagaaacagcaattccagagcctagaagactttgaagtagctcagaacgtcctagccaaatgtctgcctgtgataaaacttctgatagctcatctgttgcctgactgccgatggtagaactaccagcatctgaagatgcatcatcagtatccctgcttctttcagaattacttgaaaaatcactaactcccactgtctttctcagcaaggatttagcatattgaagaccctgaaaatgtcatgaaaagtatttcaatctgaattacaaaaaggaactacattgaaaacactagagcatttgataacaatgaaaaaagtaagtcctcgcaataaaagaaataagtgactccttttcttggtgacatgcttgcaataagcaacatacaccatcatacaacccggtgatccgtgaaaggactacctgtacaaatatctcagtggcatagtaagcacgaccaataacttccattgatgcattctcgggcaattgtcgagagcttaacacattcttcatctgattgacacacaagtccattgcattcttggccgacacactctcatcagaacacaaagaaagaagggcctagaaggataaagagaaaaaaaacagaagccttgctagagttagagtattgtggatacatatagaaaatccaaaatatgcaagaaattttatgtgtttcttagagacgaaacaaacacggcaacaataaactccaattactaaaaaatcagaaaactaaacacccttaaattccttttcgtgtcaaaaaactttcatagtttatttcatttgctagcttgttatagaaaatgaacaaaagcaacatacatggcacgagcatcatgctagaaagcattatttgttatttagtattgcattaatagtagaaaatgaaagtggaaataccagaacttaaaaaaccaggtatagcatgtcctggatgatattaataactgacatccaaaatattagctaaaaacataaaacaagttatcactgtaccttgaagagagtaatgtctggggcactttcatatcggtgagatagacgaactgcatcatccttgatggtatcaccagtcagcatccattcctcagtaatcaacacagaaggaagccgctcctgtccatctacagaataagttgaaacatgatcctcttgaatgccagccattgcttcccaagcaactctttcagatggggacaatccagaactttttcttttccgataggaatcttttggggcaggattgtctcctgtattccgtggaccccaagagaacgctctacgagcctccttttgcaagttacttaagctattagagaaggatgatctcacaggtgtgcctgttctagttttctgctttggtctcattcctgaaatagaaactcgaggttctcttgcaggagagctaaaattgaatacaattgctttagctgcatatgaaataattagactattgtctcgcaacgatggaaattctttaagaatctgcaaaattcagaatgtaaaacaattacataaaacatataattaactaaatgaggctttgatgttgaattgtactgcagattattttactattgaagtattaaatgacaggattaatcttagaagttatctaaccagcgcagct

SEQ ID NO: 4210 - DNA, 1252 bp, Cannabis sativa
ggtatacggacacagtatgttatatctctcttctaattaagaggatatattttttgtcctttgaattatgactcttataatgttttctcccttaaatattcctctctagttaaataatttgcttatgtggctatgagttacaggtataattgcagtacaaaaaacttatttaacaagtttaagctacctgaaatctaaattattgacattaaagatacaaacactaatctaaagaatgcacatacatattctcatagttcattattagaatgttatttatgcatttatttttgtctagatttttgaattggggtagactaacgccacgttagtgctacatcagcaaattgtttaaagaattaagcagaatgcaactatatgcagatatttacaacgatttttatttgcaatgatttttatagttcaaagaaaatttttacaacaatgaaaaatccaagaggcaaaactctacatgggtcatagttcgggaggataaattcttagtgtgaatttcgctcttaggttatgtccaagctaggaaagatattgtttgttagttagttaaactagctgtcatatttgggtttgagtattgtgctagtataaataacttttcttgattttgttatgactaacactttacattgcaaattatatcgtgttttttctcattctctttgttttctttgtgtatcaatcttcttgcaagaactccattgatgatgatttgaagttccaaagcaagatcatacctaagagtaaatcacttaaggacatttagctcaaatcttagctacacagatctaaaagggagttcgaatctaaagattgtaaataattttaacaacaacacaaggggatcttgtgtgcaactaaagaatttggtttttagggtactcgttactattttcaataaaagattgtattgtttaaaatctgtaatttggattgataattgtaaaatacacttttgttttggtgaaagttattatcttttttcttaggaatccaaggattagctgcttagaaacacgtgtttctaaggtatgtgaaccttgtaaatcttggtgttgtgattgtttgctttatcttgatttgcactctttaagtaagataaattgtagtaatataaacatgatagattcgtagggttatatatttacattattaaaaatagcttaaaatttagtagagacaaaccccctactgtattgacaacctaagtataacaagcatattgcaaaaaaaaaaa

SEQ ID NO: 4211 - DNA, 737 bp, Cannabis sativa
caattacacacagattctggtttcttgactgttctacaagaagatgaaaatgttagtggacttgagatcatgaacaaaaatggtgattttgtgcctattgagccatgcccaggaactctattactcaatcttggtgatgttgctaaggcatggagcaatgggagattctgcaatgtgaaacatagagtacaatgcaaagaagcatcaattagagtatcaatagcttcatttcttttgggacccaaaaatggaacagtggaaattcctcaagagcttgtagatgatgaacatccttgtctctataaacctttcatttatgaagagtacaggagtctcagattatccgagaaattgcatactggtgaagctcttcaattcatagaaactcacaatattgcctagggaacaaaaccaactggtctttcttttttaatatgataagaataagaatttactttaaaatggtgcaagggttagcctaagagttgagttaattgtatgtacctcaattcctaatatgcttaagaattactgtttatatttaaagaaagaaagttaaggccccaaaatgaggtttgtgaccaaattgttgagctgtactgtaatgttccctttaccttaatgaaaactaatgtaatatgatgatgattacgttgagtatttattactgtaataatgattacatataaaatatactccattatagaagtaatataatattgatatattctaatgaa

SEQ ID NO: 4212 - DNA, 782 bp, Cannabis sativa
tatacacataaatcacttttccaccactttattcattgtattaatcatttcttatctcatagaatagtagtaaggtacggtcttttgagtcaccaagatctccctaatttcttagaacaaaactttaaattataatattttgtatgtacttagaatataattattgattattctatttattgtcgaaagactattttagtactatattgtaagtcttagtgtcactgttatatgtacgactattttcaattcattctattttctctatcattgataaactggtttgatagtattgaatggatgcagcaagattagatctgtcacgtactaatggttattttctattattgacttttctatttttttcttgtttctcttacaatgctcaatgatcaggacccatatgataattttcttttattataatattagattgatttcaaagagaacttgagaatgatgaaacaaattatagagcacataccgttttgaatattaatattgtacacactaattgtacttaatttcataccaatagacattggcatgctttggaaacctccgttaagtttgttctaagttgattcttcgtctaaatttatatatatttgtcaataactattacttagtcttgttttaaaaataaatatttaatattttataccttctatgccttcttaagaatgtggactttgaatttaaaggttgcaaatcattactatggaacactggcagctatgatggtgtttcaataattatcaaaaggtaaatgttcatattgc

SEQ ID NO: 4213 - DNA, 622 bp, Cannabis sativa
atgtatttcatatcatacattgtaaaattgaaaaagtcaatcaattaaaatagatggagtaagattgagagtaatattatacataaacaaaagataaagtaaaggaaattgttcgtggtccaagcaaaagaagctttggattgttcttacttcttccaccttttcctttccttattttcatggccaaactacaaaaaaacatatatttttatatatattttatacacatatatgtatgtagttatatttataagatatagacttttgagcgttgacattaatactatataaatcttagtattttattaaacccagtcttataatttcatcatcatgtgatgtgtggacacaaatgaataattctcttcaataaatatgcaaatctcaaatcttgttccttctagttgttaatcatggtcactagttctttgtatagcaccactaaaagtatgctatcataattattagtgcagtttaatattaattttatataatttaatacaataatttttatgttattaatatttttaattaattgtaaagtatcacgttatgatagtgttagatattattggcttaatacttttagtaaataaataaaagtaggctaattagtaatttt

SEQ ID NO: 4214 - DNA, 915 bp, Cannabis sativa
cactacaaaattcaacgtaactctcgcttatcgaaaaagacctcagcatgagatagttgctcaactgaggacgcagttctaactttccctcttggaaaccaaaagcctgccattccacaaaatcttgcgcactccatcacgaggttcgtgtcatggaaaaggataatatataaaaattattggtggaaataccgcttgaagtttccacctatagttctagaaatagagccttggcttaaaatttaatcctacgacttttcccagtgggaactaggatattacagtcgagttcggtttcgcctctctagacttttgaaaatccccctccaagggatgacggggaggaaagacacagcctggataagtggcgtaagctacgcttcaccacacaaggggaggctaagaaacatgcgcccggaactccttcccagaaccaaaataggttacaacttggatttcgagcaaatgacaaagaatttagaggagtccaacgtctctcagttcatttggggggtatatggtacgctctgtctctgacgactgtaatttcttacacttatttgccaaagttattagctcaacatgcatatgcgacagaaagcaagaaacattttcaaccaagtcttccttaggaaaacacgattcaattcttctttgaaactaaaaacttactgtaaatctggagataagatgcgtattcggccaaaatctttgaaaaggaaaaatttgctcgaatcctttcttacatatctcaatggatttcctaaaaatctagttcgtcaggttttgcaacaagctaaaaaatttcatgctggcaaggatcaaaataagaaaagtgcctaaagtctaagacagtcgggggcattactcccgaaacccaactttgtgaaaaagatgaaacctaaggagatgtgt

SEQ ID NO: 4215 - DNA, 688 bp, Cannabis sativa
ttgttaatccatatataatattttattaatttgcagtacccgagacaagctgaaactatgcgagtacagtaactgttatatagaaagattctcagactggctagctagagcaatgaacgaagcaacatatatatacttaagtttgcacgtatatatataagttatttttaaatatttgagactgattaattttattttatttttaatatatattaattgttacttcaacacaaaattttactttaaaatatactgcaatggatgcgccctaactttatatttatgacattaatctctcttttaatttgctctcatatttgctatattaggaaataaatgacagttttttttttcttgttttatttttttggagcagataaagaaatgacagtttgttttggctgaattgaaagaatgagaatgacattgaagttaagtgatatgacggagaatctttattttatttttttacacgttaggtcaattaatttataaaaaaaatttcaaatcttaataagtcgacaattatagtcctacattattatttatgagaaaatgtatatacatgccgccggcattcattctggctcgatgcacttaaaattaattttaccagatttaattttgctggctcaataaaaaaatgcttctcatgaagttataagagcactcacaaggagtagctaaa

SEQ ID NO: 4216 - DNA, 2394 bp, Cannabis sativa
gatcactggagcagaataagtaccaccatagtagcctgcccgtgctgcaataaggctaccagatccatatttttcctccctttcaaaaagcgtagcatccgcgtttaacttgattttattcatgtctggtttagaccaacgctagcactatcacccttgttattaagacacaaagatgttagtgaggttttatcctaagctttcttccaatgatcaagtgttatggtggccaatgcaataaattctataacggaggtctttttttcttccaaactgttttgttcctagatttctacattgtccagcaagtcatggcaatcatacttacgtgttcagcaggagtcgtggcaaataaaagctccagctagctaccaaaatttccaccagggtaaaaaacaaatgagattccaatctttctctagcaagcgagagcaaaagagaaaaatattaaagcatgactagtcgtttcaaaatggaaattacacactaggcaaatagtagaaacctccacatgttttatgacaagattaacacaggtaggtagacaatttatggtaactctccacaaaaagttcttgaccttaggaggaatattgagatcccaaagatgagaccagaagctcaaaatagatttgtccacctaagttttttctgatctggaacaaatttataggcactttttacaaagaactcacctatatttttgctcaaccaagtccaagtatcacaagtagcattttggctaagaggaatgcccataattgcagcagcttcaatagcatcaaacatgtctcgaaaaagatcaatatcccaggcctgaatatcggtaagaaataaggaattgatttgttagttcaccaaactagggtgcttcattgtcacataatgatttttcaggttaggtagccaaggatgttgaaggatacttacactctcacctgaaccagttattatccttacaccagcatgaagcgacccttgagaactccatatactctgccaaacaaagctaggattatgacccaactcagttgaaagaaaatcagaatgagggtaatatctagctttgtaaattttcctaacaagagaatcagtattaagcattagtctccagccttgcttagcgagcatagcaaggttaaagtcatgtaggttatggaaacccatgtcgccatcaaatttatgggctgccattcactcccgtgacatccaaataataccatgacccttactagaagaggttttccaccaaaagcgagccataagtttttcaatttcttgacaactacctttaggaaagaggaaaacactcatggcataagttgggagtgattggacaaccgttttgagaagaatttccttacctgcacgggaaaggagcttcccaacccatctgttaattttcccaatgacattattcttcaaaaagcctagaacctcgttcttattttgcccaatgatttttaggagacccaaagaaagactcccttccgaagcttgtggcatgccaaggctttcacaaatttgagaacgtgcatcaacaactatatttggactaaagaagatcgtagacttattgaaatttattttttgacttgatgcattcttgaagatatgaagtaaattagaaacacccacagtcgcaccttgggttaattgatagaaaagataactatcattgccaaagagcatatgactaataggaggtgccccatgaaccacctgatagccttgtaaaacccgttgggattcaaacttcttaataagaggacaaaagccttcaacacaaataataagcagataagtggatagcggatcaccctgtcgagtgcctctcgaaggatgaataggacccatacaatgacacctgtgcataatagagtagctaacaaaagacacgcaatacataaccagattatcccatctttctgcaaaacccatccatgtcataacagtttaaagatagtcccattccatctgatcgtaggccttgctcatgtccagttgaagggatataaagcctttcttgccttttgtttttctcttaagatagtgcataacctcaaacgctaccatgacattattagagatgagtcgccgtaggataaaagcactttatgtgtcagaaatgacgagatcaatgatgcttctcatacaattagcaagaactttagagatcactttatacataacattacaaagagcgaataggccttaaatcacccactgtagtgaagttcttcttttttgggatcaaaacaagattagtttcattcagttcttgaggaaatgaacctaaatcaagaaatccataacaactttgaatacatccatacccacagtatcctagtgttgttgaaaaaaccttggacccataccgtcaagactatgagc

SEQ ID NO: 4217 - DNA, 608 bp, Cannabis sativa
aaggcctcaaactaatctgttccacagtatagtatgtaaaaccaaatcttaccaataatggcaaacaacggaacaaattgattgataaacaattataaccatttctctctgggataaacctgtatttttaaaatgatgaactcctatgaagacaaggacaaatgtcttgatggctaaaggaataaaggaatgaaaactttgattgttctcagtaccttgagatggtttacgagttcaacactcaagacattatgagaagggcacatatcaaaaacctgatttcaaaagtaattcgattctgcacaaaaatgaatatgattgaaaatgagctgtcgaattaaaattataaccaatcgacattaaatcaaaatcttttcattcatgtatagaaatattgggaaagactcagagcatactaaaatgcctcaggaacacaatgaaatcatcctcctcttcttcactaaaactgaaaacaagacagaaaacactgtctttgaaaggaatttccaggtcatcaacaaacagaaagactacatttcaaaaataactaaccaactaagaatagacaacactatcctcctcaaattgccataagatcaccatagttt

SEQ ID NO: 4218 - DNA, 708 bp, Cannabis sativa
aaaaaattactaggtaactgctgatttcaaaaataaaatatttactaattaatgtttgtttgtaacttgatcatcaccaccattgcagtgatgtcttctagcataaatgaacacttagcaaaggaagcattggacaaaggggcaagccttttcttaatgaagccactttcaatggcagtattaaagcaactatggcaaagtgtttgttggaagaacacaaaactaattgtagaaaataaaaataacaacaatattaatggaaagaaacttcatttatcatcatcatcatcatcatcatcatcatctcaagttaataataataataataagcaaaaaagacctactactagtcttaatagtgacaacaatgatattgagcaacaagaagaagggtcaaaatcaaagagatcttgtcttgtgtggactcctcaactccataacaagtttacaaaagccctcagcttgttgggagatgaaagtaaatacattaatacacctttctttgatgtattttcatttgatgtcttattttgttgagttagttactaatgtatttcttttttgtatgcagaagctcaaccgaaaatgattcgagaagagatgggagttccacatttaacaagacaccaaatcgctagccatctgcaggttcattccttttttttctttcttgcagttaacaattgcttaaagtacaagaatttgact

SEQ ID NO: 4219 - DNA, 919 bp, Cannabis sativa
atggttttggtgcttgtttgggatgagtctatttcagtgtgtttttcttattagaagaagaagattaagagcttaacattataattagggcatagatttcaaaatatatgtacacagagttgcaaccaatgttaggcgttgaatctccatttgccatcttgaatgtgtccaaacataataagatgatcaaagtttaagaaagaactagtggagggcaaaccccatattatagggtaaaaatgcatattttgggctcattgtttggtggattatgattttaatgagttaatttataaatgctttgtggcttatgctacaatgtttttaatttttttttaaaaaaatttaataaaaatcaaagttaactacatcttaaatatatgataaaaatcatccctccaaaataaggaactatattggccacgaacataaattggtatgactattcaattgttggtgcacccaagttttttttgaggtttaaatgaccagtgtttaaataaaatcttgaacgaagttaccagtagtctatcacctaaaacaaaaaggtgcattatgcattgtatacatctctgtttgaaattgcatattctttacaaatcaaacactcaaaacaaatcaatagtttcaggaggtttctactttctaagatggaaccatccttaaatatgaattattgaaatgaataaaatatgtatttggatcataaaccattgactgggaaaacgtaataacatatatggaaattgtgtggcacagagccacaatcatatacatatatagatatataacatgacctgtataactcataactaggaaattgccttcttcccttagaataaaaacagcccacaatttattatcaaaaccttcttaaccttgaaattcaaaatcccaattaaaagagagagagagagag

SEQ ID NO: 4220 - DNA, 1491 bp, Cannabis sativa
ttgtattgtttgacatatttttttcattgataaatttaattatatcaaatacaatattttttaataaaaatcacaagatttattaattaataagttcgttcaaaacaatagaatgcagtacattttttaaaaataatgcattgatgcatttttatatatttcggtattaaaaaaaattagtttaatttttttacaattatttatgttgtaattattaaagacatacattttacaaaattttaaaaaatttaacatgtcgaaaacaagtttcaattagtctattgcacgcatgaatattttaatttacaggtgtaaaatagaatgtttgaactatattttttgagtgttaaatattttcaactttttaaaattttgtaaaatgtattaaataactacaatatagacgactataaaaaaaaaaagtttacgcaaaaaaattctcttaaataccaaaacatattagaatgcatcggtatatccattttaaaagataaaatttttcaattacatatatgcatctcttgcaacatgtttaatatataggatcatcttcatctcgaatgaaaattattattatatatattgatgaatgaatgacatgttgtttttaatgattattaggtatcaaactggttcattaatgctcgagttagagtttggaagcctatggttgaagaaatccacacccttgaaaccaaaggcacattgactaataatactacttctaatactacaactacagatcatgatcatcatgatcatcaccatcatcatacaattagtaatattattaaaaaccataatgatcatgatgatgatcataatgatgagcagaattcaaccaaggttgttggtcatttgattaataaggaattggaatattgtagtggaacatcctactcaacatcactaccataccttaatagagaccaaatatctcaaggtagtcatcatcatcatcaagaaaagaggtcgagattggacggtcatgatcatgatgatgatgatcaagttcaaacacttgtggggtttgtgccataccatcgaactgagcttcaagtttggagtagtcataatgctccacaataaacccaaccaaactattattacataatctcaatgtatagtagtagaactacaattatgctagctagatagctactaattattataattaataatcataattattttttactctttaaattaagctgttttgtgcgaccaaataaaattattttgtcatctatattggaattttttgaactaggtttgtgttttcgaaacattgatttattttatggttatatagtagtattagagaggctagctttaaactagagatgtttactttgagaagatgtactttcagctagagatgttttgatgagtcgaggaagattatgtttggtatgaaaacctaacattcttccattgcaaaagtggatttgaagaagaaagtgagtagattcacaaggcacacttttgcaa

SEQ ID NO: 4221 - DNA, 570 bp, Cannabis sativa
tttttttttttttttgttcttgttcatggattaatttataattttattagtaaagttaggatttttttttcttcaagtatgaaatttaagtttttattatttgtttgatcatgcagttttgaagaaattgattgaactgagagaaggggatcgagacgagagaggagagagacaagatgatgattttgttattattattttatattattataattttattagtgttgatattaaattaataattattaggtggaccaatagctatcaacacatggcatacaaattaaactctggtttatttaatagaaaaataataatggaagtaacatatgttggtttttatggtccatatcagagttataaaagcgaaagtgaaattttgataaaaatggctttatccaatatgaaccataagctcaaccatctcaacataatgaatatagatcaaatctaactaatgaaagaaatttaattaccttttgatgcctattatggtatgtttgattcttttcgtataataatcgaacatccaatctaagaacttaactttggaaattattttaccaggat

SEQ ID NO: 4222 - DNA, 1025 bp, Cannabis sativa
acggataaatgggcgattggagctagtccatatttatcaatttctagatcttttgctaactttgctagcatatctacgaaggaattttgatccctagggatttacttgacgtaatatgttttgaaattctatagcaactctcgatactttgttacgtaaccaactatcttttctccctctgtttgttattctccaaaattttggcttaccactagttgtgaatcactataaagctcaatattctaggctccaagttctttggtcaattacaaaactgcaattagtacttcattttcaacctcattgtttgatatagtgaactcaaactggagggcacttggaagttgatgtttctacaaagataatagaatgattcctgctccagaacccttctcattcgaagctccatctacataaaccttccagagttctagttttgggatgggttctttaagattgtcatttattcatgtgcattctataatgaagtctgctaacgcttgacctttaattgatactcttgattgatagtgaatgtcaaactggctgagctccattgcccattttaagatttttttggatgacttgagattttgtaaaacttgacgaaaagggtgattcgttggtacctttatggcataggcctgaaagtatggtcgtagtttctgtggggcaattagcaagcagtaggaaattttcacaatcataggatatctagactccccgcccagtaatctcttgctcacataatacactggaagttgtacccttcctttttcttgcactggggtaacacttattcatgatcaaacactgccaagtacaaataatagttatccctcaattagcttggataaaattggagctttagttaattgttccttcaatttctagaaggcatcttctgtaatgactgcatacttagaatatagactagtagataattagccttaattaattaattatattatatgatgtgggtcctattttcaagaaatgtgcatttgaattataatttctaagat

SEQ ID NO: 4223 - DNA, 2626 bp, Cannabis sativa
cctattagtggggctgatttcacagcgacaggacacttaggtgagatagggaaagtgcgagtaggagaggggcagctcactgattgaagtggtgtgtcccctttcaaatcctccaaattgttgttgacagtgatttcattcttcacattgatgtcacacgcagctccagaagtatcttgatttttgtcatcaagaactgcaggcaacagataaaacctcactccatgatctaagggaagaatttaagcacaaaagaattcagctcagccaaatttacaggtgaaaagtgttcaaaaaatatcagagcagagttaaatcgaaaccgatttttcaaaagtaaacaatataaaaccaaggaaattgtatctgcatagcaaggaagtttaatgagcataataatgtgcttatttataatgtgcttatttacacactttccgtaaatgaaaggaaaacaaaaccaaatcttactgggggaagttctttgatctagattaggcgtcaatgaatcagctgcaccttgtaatttatgttgggaggacaaactttccctagtaacaccaaattttgaacacaaaaaattaaactgagatttaagccttttgtaagcatcaatgacgtcccttttttttttcttctcagtcagtaactcagaggaatttgtttgattttgttcaagtgacttgtgatacaaatccttaatctcagtcatttcacttgtcctgcctctaagctgtacctgtagttcattaactgtctcttctaaaccttttattttctccagaagaagttttttctctttctcactttcatccaacagctttgataattcagagccattcagatttaatttcagattttgcaacctcttttcctcaatttcttcaatctgtggacctagctccttttgaaactcacaaaagttttcttccaaactttccagtttggctactagtacttgtttctctatttcttgatcgtgcaaccgctgctcataattcaccatctccttgtcttttgattcgatctttttgagtaaattttctctcagctcattccctttaactacttcttcgttcttttgtttgagctccaattgaagctcactttccttctctttccattcactatatgcagcccttcgagcgttggaatataacttctgcagaagttctgatttcgattgaaaagttgggaagagatgactgcaaaatatgtcttcaatttgagaaattctatcttttgcttcctgaattgtagcaaccagtaatgtactaagcccggagacatacttcgcttcatcactatctgtaggagaaccccatttctgagaaattcgaaggtcaccctccatctgtggaatgataataaccaaaagaacaaaggaaactgagcagtatgcttatttgacaatgtccagaatataagactggaattatgataatataaattgcataaactattgaataaattttacggtttgtatatgctttcccacaacaaaccatttcttaactacataataaatgcctatctaacagaatttcttgtggcttaacagaatattttaaaaaagtctataagttttctaaaaatagggtgcagtcatctgcataaagcagatgtatgacaggggttgccactcggtctaccagcttctctaaacaggttattagttgggatgggagctattcaataaagcattgtccaaattatctctccaatcgacaacacaacattgttctatctaggtaactatgagtagttaaaataattacaattcaaatagccttgaaacaacataaattagatttgattaagtttatcaatgtcaccattcaccaaacgaattatcccaaacttaacacagcactgcaataaaatatatgtaggaacaaataccatacaaatgggattcacatgaaagaaacagaatttttttatcgaaccaaaatcagaaaattatgtaagtttctttggtcctggctcttacatttcaaatggaaaaagattgagagcaaaatctcggaaccatccagattagaacaaactcaataattatgaacacattcatattataacgtttcaaatggtaattatatacacaatttctaaatcttagaactgaacattatgaactaataatgacaaacctaactactacaaaaaagaaaagagaaatggataatagctaaagcatatccatgtagattgccaatgtagaacaacatacatagcagagaggaccacttgagaaaattcaaacaaccagacacagtttcaaaggtctctctgtatttaatcctcaatgagagcctcaaaaccataagtacagtacctgttgtgaatgaaataactctttatccagtggccagtgagtgaacagggaattcctcctctccgatctccgatctccgatcagttagtgaacgaggatgataatacttcttcgctgattagttaagtgagagaacggaaaaaggccgatagagagattgagtaacgtacggagagacagagccaaaaaggaagttgtgctgctgactttccaaggaactttggcttaaaattgggcttctcatagtgggctaactaacacaattttaggggataagttgaaaaataccac

SEQ ID NO: 4224 - DNA, 1080 bp, Cannabis sativa
  modified_base (815)..(816): a, c, t, g, unknown or other
gcctaaaactctttagatatcccatcattagatatgcaattctttatactaacaaaaactacataagcagtctccaccaaaaaatatctcaagagagttagctctctcaaaaaaaaaaaattgtcacactttgctccaagtttgaaatttgccaaaaaatttcatgtttaaaatttgccaagctaaccaccaccacatatttggtgaatgaatttgaactaagaaaaacttagattcacaaattaaaaatatcaataaagaaaagagaaaaattacattttccaaaatcattttatggttaaattttaaaaaaataaataaaaaaaaaatatgagaaaaatagtataaggtaactaattacccttttgttattttaagggtaattggttaccttcttaggataagataaccagttattttatattctttttctcataatataatttttttacacaaattgtatgaaaattataaaatatgtaattttattttaaaaaaaaataaaaaacataaattatagcagtgcaaaaataatttgcgtaagttcacttattttaaattatgattattcaaaaaaaaaatgattagtcccttctaaatgctcataataacacttgtttttaacttagaagttagaaacaaattaagccaagtccagcacacactcaagctctcaaatttgcaagcttataaaccacactctacgaataataaactagaacaagttggacttttgaatgagcagcaccagtgttgtctagcacctttgcgacatgtcgtgttgcaattagctagcgatactctctaaaagctannatattaaattatatgagacccaatactgagttggatcaatagcgatattgacacataggagagtgctaggcactactgtgccctttaacatttcttcttttgaatctatgatcctttaacgtaaccttgtgaaaacactaaaaagaatgagtgtgagagagactcataattcacttcttttttcaatgcattctacagggactatgataactttggagaaaacaatccctattcccacccaaaaaaaactttcccattaaaccc

SEQ ID NO: 4225 - DNA, 531 bp, Cannabis sativa
cagactgagatctcttcttctctcccagtcatcgctgacggagctatcctcctcacccccaattccagtctcgtcggtccaccaccacatggcgaataacagcagcagcagccaaccaacaagcaggtaaaaaaaaggtttgaccgaactcgtcaacccggccaacccaaactcgcaagtccaaagcttgtgaactcaaaacacttgaacaggcagatttgagttctcttttttggacccaaaacccccaacccaaaattcagtcaattcactcgatgttcaaccctagtatgagttgttttgaaagggaaaaagcaaccaaagcaagggataaattactggatttggactaagaagccgaatggaaaattctccaccaaattagcttaccttttgttggatctgaaaaaagaccaacactgtcacgtcgctccttctttgtggaaaaaactttggaataacaaagcgcatgaacaacataaagtgcttcggtggatcattctatccaattcgcttgctattcgatccatt

SEQ ID NO: 4226 - DNA, 521 bp, Cannabis sativa
aaataatttccaacacttaacaccagtaaggttactagtattaagatagattgccctcgattgtgaaccgatttagggagttttagtcccatccctttaaaaatcttttccactaaatctctagttagtggcttcgtaaacggatcctccaagttttcacttgatcacacataagatatttagatgactcctctttgaatcaactcacttacatatccatatcttagactaatatgtttagacttctcattgtatactccattatatgctctagccaatgttgcttggctatcacaatgtatagatattgtagagacatcctctttgataattagaatctcaatcatgagatctcttaaccattgggcctctttcccagtggcagctagagctataaactctgcttccattgtggaatgagaaatgcaagtttgttttttagacccccgagaaactgcccgtccacgtagagtaaatacccaacccattgtcgacagattatccccaaggttggctatcca

SEQ ID NO: 4227 - DNA, 1266 bp, Cannabis sativa
agagagagagagagaggggtggggaagctgtcctcatttatagaggtggcgtggtctatagtacaattttatttctaattgctgaagtgggtctctgtaaaataactagtcaaaaatcaaaattaataatcaaaaattatttgggctaaaaaatttagttgattttaacttgtaagttaaaaaagtaatttttaacatcattttattttgtttacaacccaagacgagaaaactgtgccaactattttattatatgatgtttaataataaaatcatataaaagactaatgggaggagagattgtcctcattaagagcccatttcccaaaaaccctaaaaccctaaccatatggttctctatgtatggtcgacttgttggctcagtctctctccatttctctctctctctctctaaaactgtgctaagtgctaaatgacaagacaagaagcagtgccttttctcatttctcggtggaaaacggtaaaaaaaaaaaaaaaaaaagcgcaagtgggattattaagcttttataataaaataaaaacaaaattactgttttacccattagtgtaattttatctcatttctttctggaatgagtaaaatcatcactcatcgctctctactacattcaaagaaaatctgtgtttcaaaaaggaaaataaagaaaagatcattaaatgaatctgacaaaattaagctctaaatctttcttctgtttttgttttgaaaagtaacaaaattaagcttaggactgatctctctttcttttcttttctttgttttttttttctcaaaatttgacaaaggaatttatatatacatactctctaatctaggcaccttagtggctgggggacttgttaccagttcttttgttaattgatcaattatcactttcttattcacttacccataaccatattattaatattctttttaataaaactttggagctttttatcgttttccgttacattaacatattttctcataaatatagcttattacataccattaataatattatgggaatgggaatatgggaatgtgcagttagccaaaacaaaaaaaaaatatctgaatgaccagatgcatgcttattatactattgctttacaaaaggcataagggcatggcgaagtaataagtaataagtaattcttaaattgatatattatctttctttttctatttttcgaatagggatatatatctctattttttaaaatttgctaattcttgacttttttaaggaagaaaaatgg

SEQ ID NO: 4228 - DNA, 597 bp, Cannabis sativa
tgagctctaggaaccatgtcctttctcaagaaacggacctcctcgtcttctatcaactgttttacattttcaaatgtatatattaattaaagagttgtgcttataaatttcgttattcaagtaattctatatatattctgatcaaaccttcagtattctctctttttgctttttttgttgctctattatatactgctttgtagccacctgtgtgtgcgtactaaggtttagaaataataattgacaatgtataatatttgtaattgtcctatatatatagattacctcatagttgaacattgcacgtttcactgctctttgctgagtatggagcttaaaatcttgttgcttgttattttcctttgcagtcttattttcagtggtagtgtacagttcaatttattagttgaccaatatttaaaaaatatagggagagagaattaattcatattttacatcttcaaagtacattaattcgtacgtacagagtattataaatatacatatatattatatttatgatgataccttaggtttatcacaaagtcggtctttgagtgcttcatcttttgtctgaaaaagccatacacaatcatg

SEQ ID NO: 4229 - DNA, 524 bp, Cannabis sativa
aagggggtgcgggtctcgatgaaatctgtgaaagagaccgatcggaggcctgagctaggttctcggtccaagcagaccaagtggatccccaaacggtcgactgtcgtaggcgtgcctggcatttctagttcgggtaatatggccgaacttggggaagaagaagtggggaaagtgccccagacttttgctcgaattagtttgaatagagttgaccctcatttgaatatggctcttatttcaagtgatattgatgggtcaaggaagcttgctattgggccgaccatctcatccactgggccgagtccatcttttaaaagaaaagaaaaggctcttgctaagtatagtgggccatgcaagtcacttgggcccaagctgggttttatttcctcatctcctggtgggaccggccccttagttatgaacaaattaagtgaaaatggaaatgggctgggtgtgaggcctattcttcctcttgggccgatggacaaggaaaatggagctcctaattgtgacaattttaaagg

SEQ ID NO: 4230 - DNA, 884 bp, Cannabis sativa
ttcctctatttcatttctcccaatcaaacacacccttagttttctctataaaattacatttaataggcagtgttgactgctatatatgtatagataagtgagagtgataatgaactgaaattaccacgttttgcaaaatccattgttttctcgctgtaattattttttcagatgtatttttgtaatgcctcttggtttctcattggttcaaatgaaagatagtcataatactacttgtagctgacagttgacagtgagctattgtaacttagttattgtttttccccagaaaatcaagtaattcataaagcacatgcaccgtatatatggattgtcgggagtttggggcttgttcttgctctcattgtgataggtatagtgatatatgtttccctgaggccatcaatctgctgtaccgaagcacgaagaggccagtcaaaggattcggaaggcaagagttcttataggttccatattcttcggaagccaagtttctgttgtggttcaggaagatacatcagtggcaaatctggagaatacaaacaacctaatggagagcctaaaagccacccaataacaattcccaaaggtttactatcctaactatcttctttttctgaagtatttgatgaaaggatcctgtcctatagctttaaagatatctgattggttttctttactcattgaagctcttgggactaatgtatttgaagtagagaagcctgtggttttcacgtacgaggaaatacattcctcaactgacgggttctctgattcaaatcttctggggaatggcacatatgggtctgtttactacagcctccttcgtgaccaggtctggatctgtctgtttttgtttcttcctatgtttttacaagatgcat

SEQ ID NO: 4231 - DNA, 991 bp, Cannabis sativa
ctctctctctctcttcaaaattcgtataagaaaaggtgaaaataatcatgtaggaactaggtagatgaagataaataagttttaaaggtaataaataggattatttgagagcaaattcatttctagaaagagagatcaaaaatcatttgaaggttggataaagttcatcttatattcaaccaaattaaattatattaaaggcaatcttcatttatatacaagtaatctcttgtgtaataatgaaaatcatataaaaaaaactttgtattgtataataaattggagttttattatttgagcaatttaactttcttttcttaataaagtcttacacatgttataagatatttttttcttgcaaggcatgttataagataattatttgtacttaattgagattaagagtcagagatgcaaattcaaaccttggtctcatctcaattcccaatcaccctcacttcattaattatatattaatgtcctcttaattaatgttaatgactcttgacattaaatatacaaacacgtaaacaaatggaaaaaatatttaaatcaatttatttttcattacataataataatatagtttaattatttatattatctcaaaaaaaaaaagtttaaatatttatattaattacaacacaaatgacttgaaaatggaattggatagtgttcaaaacattctcttattcaatttcaatccaatcatcctcatcaaaaccttccaacatatatttttcctttatcaaaacaaaaagacaaaaaagtggttataacatataatttttctttttgttagttatagttataaactgcaaatgaaacgaacattcttgaatgaaaatgaatgcatgagggacaaaatgggaaatttagtgaacccaaccataggaggttcataataacaaagtgtatttttctattataaataggcaaaaagttgtgaattataggcactccaatacaatctccaacatttacacacaca

SEQ ID NO: 4232 - DNA, 613 bp, Cannabis sativa
aaaaaaaaaagaaaagaaagagaactgagcaaccaccatcccacttgaaacttaccctttctttaaatctttattctgactatatctcataatcttttcttttattactcaaatcagataaatatatattaatatatattttcaccaaaagccgaatcccactgtgtctttttaaaatttaaaggctgtgaaagcctgaattcacccacatgtattgtatatttattagctatagtgagttgagtttgagcataatgaggaggcacatgtgggttattgcttaatctaaccattattttctatataacactctatatgcaatgcaaatcgatcaacctggaccagctgacattagcatcaatagattttccataccgtaccaaataaaaaagaaaagaaaaggagaagatgatgtcatcaatcccactttatttatttatttaatttttgtttgtgggggaaaataaatgtggtcctcctctctttcacttgttcattttcctttgccatatttatttgaaaaaaaaaaaaagcacgacctattgtcgtttgggggccattttggattatttgcaaagaatttagagttcacacttttcgttagggaccacta

SEQ ID NO: 4233 - DNA, 1146 bp, Cannabis sativa
tctctctctctctctctccaattgcttctgcatctcttcgttctgccttgtttttttgttatctttgtgttcgtcatcccattttctctgaattcatggcgattcaacctgcaacaacaagttagccttcactccggttgccttttctcagtctctgtcaagctagacgatcacaattttattgtggcgtccataggttctctttgccatttgaggacatcgtccttatgattttatctctgatttagtaaatcctccaccaaaatttctcaatcaagaagctcaaattcttggtcaattcaatccacgtttcttgggatgggaagtttaggatcaactgctataccggtggctcatctcttttatgtctaatggagtcctcactcgaatcgttgccactgaaatctcagctcaagtttagaaaactttagaggtatattttgtcactcaaacttctactaaaattaatttgtaaaccaaccatctccaatattgcaagaaaggttatctctctgttaataagtaccttcttcaaatcaaaattcttgtggatcgtttaggatctgttggtcacaaagtctatcaaagaatacattgttgcactcgttcgaatcaaagttgaatgctgcagtcttgctaatgctgcaacaaaattagtttggctcctccttgctcactgaagttggtttcgctcagcaacctattcctacattgtggtgtgtttacgagagtatagttctaatgtctactaattctgttctgcactcgcacaccaaacatattgagccagacctttattttgtgcgagaaaagatcttcaacaatcaacttcaagtcaagcacttaagatcaaatagatgacatattcatcaaggctttgcatatttttagatttgcactattaagagacatactaagtctggtctccctttcccagttaaacttgtggagggtgttaagcaagaatgtttgttagcggaatacaattagtagagttagttacaacttgtacactttatttaactgaattctgttatttctttcctaacttactatcatagaattgtaattaaagagctattactctcttgattcagtaatgggaatattgtttcattcatcctctgttatttcttttgtgcgaat

SEQ ID NO: 4234 - DNA, 1104 bp, Cannabis sativa
atgatgtatttttataatcattttgaatttgttgtaaataatgttaaaattccaagaataaaaatgtgtcaaaataaaaaaaaaaataataataataaaaaggaaaaaaggaaaaaaaaaaaataagataagaaagtaaggtgcgcaatgcgcattccagcgtcgtatagcgtcccggtatcggattataaggaagaaactcacaagatatgagtcttcctctagcacccagcttccccaaccaaccacgttggttcttacagacaccttcaactttcttcttcatggtgttcaaacctcttccgaattagggtttattggttttaattagggattttggattttcttactcatggcctccatttgcctttctaaccctacttttgccactcctttcctcgggaagaaaatgtattatttctctcactgtatatgtatagttatgcatataatatttgtaattagaagttgatcgaatttggattcgaaattttgtttttttagtatttataaaatgatatcgtgaggctgaaattttgaattttgattgacatttccttctttcccttgtgacagttcttttcgtgaaaactcaaagaagacttatgcctttgtgcaacttggacgcactagatgtgctgtggatacaccttttggaggtactcatttcaattttgatagaatgaaaatatgagaaagaaaattctttgtacaactgcttgttcctatatcttttctatatttgccatgtcttcttcatttgtgcatagttgcgttcaagatgatatcatttttcagttagtttttcttttgttttttggtgtgtgtttgtgtgtgtgtaggcaggggacatactaaacctgctcagctgaactttagttttcttttgataaccaaatatgtttgtgttgggtttcctagaagatattagttattagtcaggctctaaggatggcaatgaatttcttgcaagagataaatttcacaattatggcacccttactgagttgttctaatagaccccaactgcggtcatctgctaagaattatagtgtatagatgtttctgaatgttttcatggtggacttgatgagaattttgttt

SEQ ID NO: 4235 - DNA, 2459 bp, Cannabis sativa
ttatacttctgtagcaaaaaaccaacagggtcaactttttccttcaatcgatttttaactccaacaattttcctccaataccagctacaatcattgggagcatcatactcacaccattattgttctttcaagtatacagagtgtatccatttcacaaatatgaaatcttttttgcttgcaatatcccatacatacctggcaagggctgcaatgttccattgctgaatgtttctgaagcctaatccccccgagctctttgagttgcagacactttcccatgcaattaaaccaggccctggtcctccctgtattcctttccataagaaggatctacaaatggcttttatatctttgagtaacttcttaggcaaaattattatttgagcccaatacgtatgaatagaaatcaagacagcattgatcaaggttactcttcccatgtaagagatgttccttgagctccaagaccgaattctgctaaccattttctcaaggagttcctggcattcagacttgctgatcttctttgaacatatggggattcccaagtatctgaaagggacagagcttctcttaaagttagatgcttcgagtattctgttaacttccacatctgccatgcccgagcaatatatagcagttttttgctcattgggaaggaggccagaagttgcagagaacagcttcagtcctttaagcatcaacatgacggaaacaaagtcaccattgctgaaaattaggaggtcatctgcaaagcagaggtgatttaacttcagacttgagcacctgtcataaatcttgaaacctggccattccccaaccttcttaagtattttagacaagtattccatgcataatacaaagagcaaggggacatggatccccttgccttaatcctcttttcacattaaaatatccacgcatggagccattgagaagcaaggaaaactttggagttcttatgcaatccattatgagggaaatgaactgatttggaaacccgaaagctacaatcatttcctcaataaagtcccattcaactgtatcatatgctttcttgagatcgattttgatcatgcagcttggcctgcaattctttcttccatataatcttaccaaatcctggcatactaacacattttgttatgcttcgagtttgagctcttaccaaatcctggcatactaacacattttgttatgctttgagtttgagatcttcctcgagccacgaacacaagcagagaagaacaataaaaggagttgaaaaaagaagagacaaagatgagcacgctatatatgattgtggctctgatactataatacaaatgaaaaaaagaagtatgaaaaaataaatatgtatttaatgaacaaaaagactacaataacagagctgtttggacagctctaaacaaccaactcttaaccaactaactaatctgtctaagtgatctcataattaattaatcaataaatagagtcgtagctatgatttaaaattaaaggctatatatataatttaatttgtaactattgatcaatgatcataataaaattattctcccatcagcattatcatgaatttttatactttttatttttattattattattattattattggaatggattagattattgggagttatttatacagataatcggtaaactaattagtatatatatccttttaaaaaaatagtatatatatagtataagatcattaactgtgtgtggttgtggccataatcttacttatgcttaaatgttgttaaagttgctgtagacttttgctgttatataaatactcaaatttcttatattttgcgcagtgatttaatatgtacacaattttaattatttaattgaatattagcttttctttcctctgatcaaactagaatttatcggacaatattcagcatatttatattattataattaagtttagcccgaccatgttctaaaggaaaaataataccatatttatttatttctcaaaaagaaaataaataacggtgacattaaattctgtgctgttgcaccagaaaagtaacttctacataacggtgtctctgttcttggcattagataagatcagtatgttattatttctattattattggtataaatatagaaacatgataattaaataattctctcagtgcaatatataaagcctggtctagatattaataaggggtcccataaagtaaattatcaaactactttcagcaaattaatagtcgaattaaattttttattttccccttctttttttctttcagtttttaacggcaccttttttttttttttttcttttactaacatattaatgaatgggtcaggacgttcagatacattaatcaggaagggaaataaattaatagcaagaaaaaaataaaaggaacataattaattatttgtcccattttcatactgaaaactcttcgaagattt

SEQ ID NO: 4236 - DNA, 917 bp, Cannabis sativa
acttacactttaacataatttctcaaaataaaaaagatagctttattattacattatgcatgaaataaacaaagcatgcaattattataaatataattaataataggagaaaaacaaagacacactcactcactcactttcacacaaattttatttaggtaaaacaggaaataaattaaaggtatatatttatttaagagatgagggaaggagctgggttgtaggatcaacgtggcaacacttgtagctaatgtaagtctccatggcccgaaggcattctgggcatttcatacaatctggggcttttccagcaacagtaggcacatcaagacgaatacagtggcgaatagtttgagtgaccttagtgtgaacctctttgaaaccaacctcgaatcccttcactttaatcacttccttccactgttcaaactcctcaacaacctttagaatggtcgagccatgcccagatgtcaccactgcagaccctttgctaagaatagcccaagcactctcgttcttgtaagaaagaagcttttggatctcttgagtcaccgggtcaacatccttgttgtgatctttggtgaagaacaagctctctattccaccccagaatccccctagaattccatggtcttcttctcctttggttgtctttcccacgcaaaagaatttaatgttgatctttgcttccttgatgaagggattgcttccaagtgcagtcactttcttggtgaatgtttcgatcaaatctttgtcttttcctccgtagaagaagatgtatttctcctctttcacctatcataaatatataagaaaagaaaccaacttaagttttgggaaaccagttatctcactattcaaggagaagaaattcacacttcaaaaacaagagagaaatcatagcaaagaatcatgaa

SEQ ID NO: 4237 - DNA, 986 bp, Cannabis sativa
taatactcaacagaaagcctataataagttgctacattcattcaaagaacaatcccaaaattgtcaacatctatcatgttacatatcaatgaaaagaataatatcaaaattgtcactacatctatcatgtgagatatataatttaaactagtatgagacattttgtttaaagatatttatcagtatagaatctttttctttatgaaacatattctattaaattattcattacaaaatgagactggaaacatgctaaccttgccagcccttgagaaaaactcatagacatctctttcatctgcctttagacaaatctgccaattttgtttcacagtagaaatacaaaaagttacatcatacgtgatagtgcagtaaagaaaatttaagagcaagtaaagtgtaaggcatgtgaaagaatagctacctgataagcaaatacagtcctctgatccctctctgggtcaacctctggctctgcctgatcctcttttttatctttatatcttctgtaagagaatgaaaacgaaaaaatgagctgaaaatcttgagttaccaatatagtcctaaaatgatttcaaggaaacacagaactttaaaagacgaagaacagtgtgggatccttctgtgatagccatatttaatgtggcaaaagattcctcaattcacaagaaaattataaaaaggataaaactcaaaaaaaaaaaaaagcttatcctctgtaaacccgcataaaacagccctgcagataactgcttaaagttaacatgaacaaacaatgtctaaaacaaaagatatgaaagtcttgaattctaaaaatgatcaaactgtaaaagatacagcaattaaaagaaaatgggatacccattcctagaaaatcatctaaataatcctattccaaacagaagaatgacaaagattatctaccttctacaagcaacaaaatattgaatgagaaaagcattacagtggcctgtaccttctacaaa

SEQ ID NO: 4238 - DNA, 936 bp, Cannabis sativa
tgtttatcattattgaattaacatcaccatatcttaccaagttagcatctgtccacccaagttgaatctccttacaagccaatctaaaaataggaaaaagaagagaaatataaggatagaatccaatgggggcttatttattattaaaaaatatttatacatatattataatttataatcattcttacacgatttatttaattttgtaggagtttttctactattttagtttatgattatcaaattaaaaaaaaataatttaattttttaaaagacaatatttttattagtggggctgtagctcccacattaatacaagtgggtccgtcgtccttgattgtgtccaatattaatagtagtttaataattactaaacaaaaagagagacctaatatttatttataccaataataatattatatttgtaagtcgttaagttctttatttttacacaattatttaacttttaactaaaaattttgatatttcctatttaaaataaaattacaaaaaaatactaattttgtgcattatttatttttttgtaagaaaatataccattaggaaaataaaattgttacttttttaaatctcaaagattgtattgccattttttttatctctctcaagaaaacatgtgttatttatatattaactattgtttattatgttgagttaccccattgcaagaagagtgagagcccaagatagaagagaagaggctgaagcagtgtgcatgtttgggccattccattgaaaaatgttatggagtccagtgagtgatgtagtaaagcccacaacaccagcaaggagtgagaaaattatgaaaaaaccagttgccatgttacccattgggaagtagattggaaatattctagctggaatggacagaacagaagctgcacatacatatataaatatgtataaaaccatgca

SEQ ID NO: 4239 - DNA, 1299 bp, Cannabis sativa
ggctatggtgttcgtagtgggactacaggcgagtttcattgaggtggcccataaactagctggggatgagagattgaatttggctcaatggggtgtctgtctctttataggaattgtttcgtgcccagttgatgcagctgcaaaatacacatggaatctcaccaagaaggtacttcgtatgtttcatgactctgcttcttcagactctgtttctaacctagagtctccattgatgagtactgaaaattctaccacagaatcataacaaccatcctaattatttttagtgtactcttttgctattttactttttatgcagaatgttagtgaatatgtttagctgtattgggttagttataagttagttaattgctgacatcacatcagctactctgtctcttgtaacaactttcagttgtaaccatatatctgtattttattctaagtatataaataatactcagtgaatcttagcagatcagaaattcagaagctaacttacttttcaccacatctcatctttccaactcagaataagtattttctttttctactgaagacactttcataccaaatttatgctaacgacattcgtgttatattataacttggtaccaaaatctacttgtttgttcaaataaatataaatgtaaatcggttgtgtatcatgaagagtaaaaggatgtaaagtcttacctgagctaatgatgcccaaatttttttgaggcaggccatgaaccatggttccacgatgaagaagggagtggtaactaactggttctggagccagaatctctgaactgaaggttgacttctctagtcaactgaagaaattcaataatataccacttgggttttctcttacttttccacctcgtcatctaccaattacaattattatatgttaggttgaaataatattctttattatttatgtaatattcaataaaaaaaatcaaatgtgaaagagttaagtaaagaacatttgttcaatttagtttactattaatatgtaatctaatacttaataaaattaaaaaagaaaaacacaatgtgtaaattaaagaagaaaataagtgtgataatagaacaatgattataatttatttatatatcattattgatttgtttaaatctataaatcaaatatctgtaatatgtatgaattgaatgaaagctaattaattgaggagtccaaaaattatcagtagaaataatttaaaaaaaacaacaacaacagaaacaaaaaaaaatggagagagagacttatggatggttacctttacagaatgttttata

SEQ ID NO: 4240 - DNA, 1205 bp, Cannabis sativa
aaaaaaaaaaaaaaaaccctaaccggctctcggttacgtcgatcttccgtcgcacaatcgaaccagttggttcctgtatctgtaaaaaaaagaattaaaaatcaaaaaaaaaaatcaattcaaaatccctaatcaaaaagcaaaaagaaaacatcatatcataattttattcatttatttttttctcaaaaaaataataataataaacaagaacaacaagaaagaataataataataataatccctcttaccccaattccagaagattaaattgccttcaagaatctgaaaaaaggaaagaaattatatatatgaaaattggggaaaaagcaagaaaaacgagagagagaagagagagaaagagttttggttttggatttgagttcgaatcgtagggaccaactcgtcctatttaaaacgctttccaactttttttctctgccaacgagcgagaccctttccactcagtcggtgttcctacaataactaaccctaattacctctctaattaccgttacgccactctgattttttcggcccatcattttcaaaaaaagcccaacttttttttggcccatttacggcccaatatctcccgcggaaaacattgtggcccgataacgaattggcgggaacgatcgcctccccactctctctcttctgttatatataagctctgcgaattgttgaagggcttcattttcaaggctgtgttgaaaaatggcgaagaggaagaaagttagggtttcggaggagccagtgtctgaaggagaagaagatcaagagatggagtacgaggatgaagttccatcttcttctgctgctaataaaaccctttatgaggtacagttggggttttatatgattatattgatttgtatgtgtgtatgtgtatatcttctttgatgttggattagggttttagtgaactgataaagttaatgtgcgaattaccaggtgttttttttatttttaaactgattttgatcctaatgttactaggaatcctaataccaatagatattcttaattaattaaattagtcagttattacaaaagataatccttttgtaataacattctcactatatgcggatcatcatgggactatatcgtactcatttagctgtaacctaggttagtaaaataggagttttgggggttaaattatctttttttcattttcttcatactgtttggtttgg

SEQ ID NO: 4241 - DNA, 668 bp, Cannabis sativa
aacaagtcatcttgaagcggattcgatccatccatatcaatctcttgtggacattttctgataaggattattaatacagaggttttacttgtacattggtaatttatatatttttttcttctccaatttacagtttcataccatttgtagagttataactgttcacctattgaactttgtgtagctatgtttgtgttcttgttcaaatttgctcattttgtaataaagctataaataaaatatttcagcaatcatgaacggtgcttgtaaaaaactctcaatgttgattcagaggcaattccagttgcgcaatgtatctcatagtcttcatcttcatcatcatcaacctcgcaatgggccaactgaaagtttaaagcagaaagttgcagaaagggagaagaagaggaagaagatcaagaagaatgatgcatttgtggtgttggttcctgagggtctgaagtaccttgacacgccgactctgcccatgaccttaactttcattgggatcgccattgctgcaaagctcctttatatggtattattccatttctctaaaaattaaatctttatagtcttttgactgtatacctttgtaatgtttgataagttgtttcaacaaagctgttacttatgctttgtttggaatgatggatggaaaacggcaagga

SEQ ID NO: 4242 - DNA, 1035 bp, Cannabis sativa
acactaacaatattctaactacatagtttgattgttaaccagttctctaataacatgatgtctcatatcaatgtgttttgtacgtgaatattgaataagattttttgaaaatatttatagcactgatattatcacatgcaaaatgacaagaacaggattgagagtataacaattatcaacagatctaaacctttatgaaaatcattattcatcattgttaagatcataacaatgatcattgtcaaaattgatggtatacacatgatcataaatctgactaatactaggtaaatcataatagagtttatgccctgaaaaacttgtaaagacatttttgattattaataagagttgaacattttgaaatatgcaagaatgttaagttattaatattcaatattaaataatgaataaataaatattagaaaattagtaaagattttttagtttttaacaatgggatacttcactacaagaattgagtttgtgttccaactagtgacatagttaaaaaataaatgttagatgaagctcataccactctttactcgttacatctaagtaccaccaagatgtatcaggatttgaaacccttttataattggtagcctggtatgaagaacgatatgatggaatatgtatccaagtgtttcatatgtcagcagataaaggttgaacatcacaaacgtgagggtttattacagcctttgacccttcccaagtgaaaatggaaagacatctccatagattttgtggttgaatttcctagaaccatagagctttatgaatcaattttggtgatagtagatggattcactaatttggcacactttctaccagtgaaaacaacctacatagtggaccagtatgcaaaattataggcgaaggagatagttcatctccatggggctccaaagtcccttgtattagatggagatcctaagtttacttctaagtttttagagagtcactagaaagtcatggataataagtttaacttcagtatagcttttcattcttaggccaatggcgagt

SEQ ID NO: 4243 - DNA, 1924 bp, Cannabis sativa
tttcggagattttattaaaccttaagtataatatatatgacatatgtgaaaattcatatttttatgatatttactcgataacgatgaaaataccacaatttggctatttaagtcactcgaatttggtttagaatcttttagttagcggggaaagtatatttgatatttagaatatcagaattaaaaggaattatagtattggaccaatttactcctaagtctttagattgcttaaatgtgaagtaaggggcaaaaaaatcatttgtcctaaaaggattaaatttgaataaaatgtaacaaataagcagccattattttattaaattaagataatcaaaaggagaacccacctcttcactaagcttctccttagttcagccctagaggaaccaagaagactaggctttttctccactgtatttcattaaattcagcttgaattcaaggaggtttgaaggtttaaaatttgaggtaagccctggagttctttcattgtgtttctgaaagttttttaattggtttgatttctgggataaattgaagttgtacgttttaagtttacttgagttaattttgttggttgtttgaggaattgagcaagtttgagtttaagaactcaaacttgactcaaaaattgtgatttgtgtatttttgagttagacttgattctattgcttgaattttgtttgttggagcacattttatcgatgagataactttatatatatacttgtgattgataggtattattttattttttagaaaaataataatcacacttatttttacttaaatataggctaaccctgagatagggtaactttcaaatgttgtgagcacttttcgaaagtttcgtgataaagataataattggcgcaacgaatgcacacgacaagattatataagtttacattgatatttattaatttttgaacatttctttcaatttgtttggtattcaaatatactatttaatttatttgatttttaggagaaaatagttgaattggctacaaatcaaccagataccagtaaggatcaagaagctgaggatgatatggatcccacccagtacccacgagacctgcatgttatgacgcaagtactgggtgaaggatctcgacatctgagaggctttggtcatctcttgagattcaaggcagttggagctaaaagagcacctgccacgagttctgctgcctcactgactgctactatggaacagtatgagaccttacaaaaaaagtggaggaggcacagcaggaaactcagtattcgaagcaacaatatgaaacacaacaagtctacctcaagttattcaaagattagtttgagtatctctgtctcgggttgtgtatggtttcaacatgcctcgtatagattttttgccgttcctcactcctcctagtgttggatcatcatcacatcgtcccgagactcaaaacaacgacgttgatgacattacccgtctttagaacaatatatattttagaataatttgcgaccaaactccttaaactttaaagtttggcacgatcaaccccgaccctagactagaaaaattaggactaaactcctcaatctccacacaatcgttttactgtgtattcttttcgtcaaatttggtatgttaagtgccaaagtggactgtcatggtgtatataagttaaacgtggtaaatttttattggttcacataatattaataattaaaaaaataaaattaaaatatttaaaattaaaataattaaaaaacataataaattaaaaatagtaattttttttcttaatcaacattttggactccaaccccaacttggaccttaggacccgaactctggcccctgaccccattcccagactcggaccacggccttggccccagactgggcccgaacctgaaccgacttaaataaaattaaaaa

SEQ ID NO: 4244 - DNA, 2075 bp, Cannabis sativa
aacttcatatcccctcaagttaggactaacaaaatgatgcatacacgataacacgattcgaaacccacatgagagttagcgggttttggtttaccttaaatgggttcagctcatgttcgggttgacttgtctaacccatttaataaatgggtcgtgtttgggttggcaaaactaatacaaaattgacctgttaatgacctatttaaagttattttagttctttaacatatcataaatgggtctgtattgaatatgtcataaacgtgttattagttgacatgtttaaccaaaatatacttataagcgggttacacgggtcgtgtcgtgtcgattcatttataaataagtcgtgttcaggtttcattttctgacacgattattaaactggtcatattcaggttaggcatatatctattatacatggatcttgacacgatacgaatacgatctataaacacaaattgccacccttacctcaagttggagcatggccatcacaaattcttaacttgtgaagtaaatacaaaaacttgcgcttgccaagagccttagtgaagatgtcggcaagttgatcattagtagagacattagtggtaatctcatcacgaatggtatcacgaacataatgacaatcaacttcaatatgcttggtacgctcatagaagacagaattttgagcagtgtaaagtgttgattgactatcacaatacaaacgcatggatgacgaattagagacacccaaaatcacaagcaaagccctaagccatttcaactctgaagtaaccacatccatggaatgatactcgaccttagtagaagatcgtgacattgtgtgttattttttttatcttctaagaaatcagggaagaaccaagaaatactatccaaccagtaagagatcatcgattaaaagggcaagttgtctaatcaaaatcacaccaaccagtcagagataactcacaatcagtatgaagaagaatgccttggcccgaaagccctttttaagtaacgaatcgtacgaagcaccgcatcccaatgatcttgatgaggtttttgcataaattgagccaagatataatttatataaaccaagtcaggatgcgtgaaggatagagaaatgagattgcctactaggcacctataccttttgggatcaacgagcaaagatccttttgaaagagccagcgagtgattctgctcgatggggaaaccagcgggacaagcccatagcaaaggagtgtattttcattggcataagaaaattccctctaaactctgaacaacttcaatgccaaaaaaatatttcaacacacccaaatcgttcatatgaaaatactagtgcaaataagtcttgaaatgattaacaatggaagcatcattaccagaaataataagatcatcaacatacataaggacattaagttgaatcgagatgtagagtaaacaaagagtaatctaaataggattgaaggaaatcataagtcttcaaagaagcaactaacatatcaaaccaacaccacaatgcctatcataaattgtacaaagacttcttgagataacacactaaaccagaagtgcgaacatcgaagtgaggaggaagtttgatgtaaatttttttatcaagatcaccatgcaaaaacacattatgaatatccatctgatgcaaggcctaattcttgattgttgtaatttctaagaacacacaaacaatgactatttttgtaactagagcaaaagttttgttataatcaacccccttaatttgatgattgccaaaaataaccaaacgagccttaagacactcaactttcccattcatatgatataaattttatatacccatttaaggccaagagccctttatgtgaaggtaaaactaccattttccaagtgttattagcttttaaaccagcatagtttcgtgccaaccttcattctacatagtttctttaaaaaactgaggctctatgccttctgtgctagttgcaagaaaaacacggtgtcgtggagaaaacttattacaattcatacaatgtgtcataggataagaaatacctaaggagctagtagaagac

SEQ ID NO: 4245 - DNA, 688 bp, Cannabis sativa
gagagatcggcgagtaagaggacatgccgcccaatcagaatcacaccaaccttgtaaagacaagtcactatctgaacgaagtaaaatatcctggcctggggcacttttcaaataacgaacaactcgaatggctgcgtcccaatgctcctgctttggatgttgcataaattgtgacaaaacattaatagagtaagataagtctggacgcgtgacagccaaataaatgagacgacccatcaatcgcctgtaggattcaggctccataagcaagtctcccttagcatgcgcaagtctatgattttgttcgattgcaaaaccaactggcttggctcccagtaagccgacctcagatataatgtcaagagcatacttgcgttgacataagaacaaaccgtgaggactgcgagcaacctcaatacccaaaaaaatatttcaatatgccgagatccttcatatgaaaacaattactaagataggccttaaagacatgaaatgctgcgaaatcgttaccagagatgatcaaatcatcaacataaacaagcacattaatttgcacaacacccttagtataagtgaagagtgaataatcagaataagattggagaaaaccatagcttttcaaagctgaaaccagctttgaaaaccaacaacgtggagcctgccgcaaaccatacaaagatttctgaag

SEQ ID NO: 4246 - DNA, 776 bp, Cannabis sativa
aaatcaatactttaaactcaaatccgatgaaaaacaccaaattgaaaagtacccatttgttgaaatcttgaaaaatactcaattgattttatttaaaagaaataaaaataattacaccaaattgacccaattaccaaattctactatggagttaaggattagttgttacgaagagtaatataagccctacaaatcacactttacatatgcgatgtaggacagaacacaacaaatctctatttttcttataaatttaattacaccaaacatatacaaccaactctatcatggggtttaaggttggtaactgtaattagcttccaagccttcaaagataaaattttagcaactgcatgaatgaaaatatgataaaaatcaacactttaaaactcaaataagatgaaaaacaccaaattgagaaatacccatttgttaaaatcgtgaaaaatactcaattgatttttcttttcttgataaatttaattagttactaatttaccaaattttattaaactaaacacatacaaattaaactacaaatctctcattttcttataaattcaattaaacagaacacacatacaaatctctcattttcttataaattcaattacactaaacacaatatttaaccaaaattatccaaagataaaactttagcaattggatgaatgaaaatataataaaaatcaatactttaaaactaaaatcagaagaaaacaccaaattgataaatacccatttgttaaaatcgtcaattattaccttggtgggtt

SEQ ID NO: 4247 - DNA, 823 bp, Cannabis sativa
tacaacagatattggttttccaaagttgtcgatccatgaaaatagggaataaatgacattcttaaattatgaagaatatatacgaaactccctttaaattgggattggattacatattaaataggaaactatattaaatgcctctgtcacgcattttctcctgagtcggttggtataatgttcataccatttctttccgtccaggtcaattcatgcttatcttgtgtggcagattacacttggttcgtctgttggcacattcgaccgagtgtttatcttgggcagacatttcgcgaggtttttttatccacccaagcttatatacgatgatacgtgtcacccgaaaaaatgtgccacatcacccgggctaaaattggaataacatttgccccccaagtctgcggaggaacctcctagtaggtgcgtggacttgcttggctcacaactattcagatgtagagacacgtatcagagtaggtagttatgatactacatgtagtctcttcaaatccttttgagtatctaaggcatttaatgctttgacacgagtttttgtgccttagaagcatgtgctaacggttgtactctataaagtactcatcgcaaaatttataaggaaacaaaaatttgatttgggcatccaaattaccatcgtgccccttaaaaattcttaaaaagggaaggagaaatctcatttggcatttttgattctttgtacaaccagagagcatttttgttttctcaaatcgtaaggacgcatttggagatcgtaagtatttgaatcaccttcaactcgcttctcccccaatgagtaagtgtgttg

SEQ ID NO: 4248 - DNA, 640 bp, Cannabis sativa
ttttttaatttaaatttttgagatttaatcgaagattcgtttgtggagagaagtaagttcaaaaagagctttctctctctataatctctagagagaaagagagagagagattggaaacaatggcggtgagactatcgacgttgtttctgaaccagggattgagtggactcagctgcaaccattctaatggccgtctttctttctcttcttcgtatcgtttgtttcctgcttcttgtaaaatgcgacaacgtaatctcaggtaatctcactttattattattattattgatttcatttattgatagaggtgatgatttggttagattgtgattatgattctagaaagtgaaaactggaatgattggttcgacttactcgctatagagttgaattaatggttttgaattttgattggaatgaatggctccacttattgtgttattgaacagattttaattcaatgagttgattattggttttgttggattgtgattatgattttagaaagtgaaaactggaatgaatggttctacttgctcgttacagagttggattggattagttgattgattgttttgttagattgtggttattgtggtactagaatgtgaaaactggaatgaatgatttcaatcactga

SEQ ID NO: 4249 - DNA, 738 bp, Cannabis sativa
gtgttagtaaagaaacttaccctatgtgcataccaatattctttgattctttctctcttaagcatagcctctcttttgctcatgaacaatgcatctgcattttcctttgatagaagactatcatcccatcttctttgattgtaacaatccatctgaaaaaacattaattaagtgagaaaagtccttactttcaataatctctttttaatacttgtttacaaaatcaaaatcacatggaaactcaatttgctaagtatacaatataaaagagtgacacatttacattgtcaatgtgtttagaaagctaaaaaaaatgccattttcaacaattactatatatatctactaaaagtaacattcatagtacttagtacttactcttagtattttgttccttaaattctgaagttgatcatcaccatcttcaacatcatcatcatcatcataatcataagtagcagtggcttcagtggtttgaaatctgttagcacaaacttgtgactgaatattaataatagattgcaaacgttttagagttgtaacagcttggcgtctcactgctctgcctctaataatagcttgaagtgtcactattcccttaagtgcccttaaagcctttttggcctacaaaaaaatgtgttcattataaattgttaaaaatcaaaactttatgcataaaaattcaatcttgaaccacttatagagagatctaatagaatttgaaagaaaaaacttaca

SEQ ID NO: 4250 - DNA, 1709 bp, Cannabis sativa
gtatttttattattctgtaacgtatatttattacatatgaaaatatataagaacatgcagaacacaaccttctactttgcatgatgagtcagaagtgagagctgtgtgatataaaaacaacacaaaaaaagtctttctgcataattaatgaaacatggcttacaacaagtggtgctttaaatgaactaaacggagcggtagtgcaataatagcactacatttcatattttaaaacgactctcattttaaatggaattcaagtcatttcttaacctcttttctttacatctcttttggtcatctaccattgactcaaagacatccaaaagattatccaagccttgaagattatcatctcctactgcttttagtgtatacacaatgctctcaatggttgacaaacatccagccttgggctgcatcctcactccattatacaagcttaccttatccaattccaacttcaagtgtggcaaaagtttcaaccaggggttttcagcatatattctctttgcctttgcccatgttccatccaaaacaattaaattcttcacctcaaagttagcagtccttagtccatcaacactcattgcttcttcagttggaaacaagagtacagttcctgggggaactttgatctcaaactctaaatgctcttccaactccaagctcgcctgctgccgccgcttttgcaacttttgtacaataaaccctttttctagcacatcacgagcagtgtcaatgtctaaaattttatcaaactttggcttctcgtgattgttttgcagcatccagctatggcaaagatgcttaactacaccttgtttgctaattgttgccgttacaacaggcctttcctttccactttgtacatcttcaattccactacaatcaaaattagcaagcttgctctcatcagacaccatattaagcttcatagcagctgatgtcttatctccaacatcaggttgtttaaatagtttctcatgatgagtttccaaagcaacttcatcttcacccttaaaagatgttccatttctcttcgataagccagattttctctcattactcagatcttctattccattttgagcattatcataaccacttatatatctccccaagctaaacgtctcaagagaaccaatcatactattgcttttttctgttgggcatttcgcaaacagcttgtgtccaaaatcatccacattttcttcccttgtacttgtcccgtcacaatgctcatcaatcaatttctgggtatctctagaccccaaaacatgatcgaattccattccattcgatctatagaaagaacccagttcagattttgagtcgagtaaccaaatgtcaaaccgggcttccaaattcacatcagaaacagttgcaacagtgacattcttgaggcctaacacagctattctagtagaattaagagggtgtttttgctctaaactgtgttgaaggatggtcacacttacggaattgtcaagctccggggtcttgatccgagagcagaggcagagcctggcaggtttagtgcaggtttggcaagtgggtctcttggaggtggctcgaatctccaccatcttatgggtttgggcaggagttaagggccttctgagggtacggaaatgtttggtcagtggcggtgtccggatccttgtcaccaacgctggtaagacaaccatgtaaggttgatgtgtgaa

SEQ ID NO: 4251 - DNA, 1577 bp, Cannabis sativa
gactcaaactcgagatcgtaggcctataggtctaccatacgcagttgataggaccaaccgaaattctgttcgaatcaattagaacaatgtgggaaaccaatctcctctgtgggattctcttcacaggtttcatgactctaaaccaccttgtaacgccttactagattaggcacgctgtcgggttttctaaatactatgcactccttgctaatcaaagagtttattaaaaaacatgaataattaaaaattttataatcaaactttaatcttaaatttataataatttacataatcggggaccccgttttaaaagttacataagtttgtagaatacttgtactataaaagtcgtcgtcaaacgtctatcaaaagtgagcctaaattatcctgaagattctgaacactccaagtctaattgtcttgatatgtacaatcttcatccagctctagactcattcaggttcggttctagctcttacatgcacatacacgtaataactgtgagttgacagactcaataggaaaagcataaacataaacataaacatatatctagaccgtaatcaggcgcccataaacctaatcatgatctaaagattgggtcaagaatgttcgcgacaaaagtatgactaacgtcaaatttagcctatactcagtactctaatcgtactgatgtggtaacaattagttaatactatctgaaagcgtaccatatatttgttgacatctcagtgcaactctatgtacacttcagcaatatcctaatatgctaatttgatggctactgatttgcctaacatatatctattggcatcgcggtgcaactctatgtacacttcactaatatcctgatatgttattctaacgacaactaacatgcactctaaacatgtacacatatatgtaactattatactaatcttacattgattctaaatgcaagtatactggtaactctgagtggaaattgttcctcgacgatttacaggcccctaagtacgtaaaactggcaagtgatatggtaaataattttttcaggacttaaacttaaaactaaaagtttttctatcgatagatagcgtggaaataccctaaatatcgataaaacatgaaaatataagcctcaaaatctgaaaaatccagtgaactaaaacccaaaaatagtataccgttttctaaggttctattatactaatcttacattgattctaaatgcaagtatactagaaactctgagtggaaattgctgctcgacgatttacaggcccctaagtcacaacatacgtaaaactggtaagtgatatgctaaaagtttttctatcgatagatagcgtgaaaataccctaaatatcgataaaacatgaaaaactaagccgcagaatctgaaaaatctggtgaactgaaatcctaaaatagtctaccgttttctaaggttctaccaaaaatattggctcactgtttctggaaaaactgtgaagaaaacattaaattttgaaaaccaggtcagaactacccaaattgcatcaaaccttccagtacacctaattaagtcataacaaacatatttcaaccaaaaa

SEQ ID NO: 4252 - DNA, 1666 bp, Cannabis sativa
  modified_base (53)..(65): a, c, t, g, unknown or other
tagaacaccagtaaaacttaacaccagcatgctgcagtatgaaacttataaannnnnnnnnnnnnaaagtaaaaaaataccgcctgacagtatttttgtaaaaaaatagtaaaaattagtataccatataaatttctctaaaattattaagtataaaaatacaaaattatgaaaatatatatatttcttatatttaccgtaagaaaaagaaattgatatattagtgggcatattatgattaatagttgcaataaaattattattatgacattaacaaagaaaaaaaaattaccattggcatttggatgtttgggggcatagtaaacggcttcaagttgttgtgtgaaaaatcttttaactaaaaatgaaaataaaagcattgaaagaatggtgtaagatgttttaatcgtaaaaatttagttacatttgaaataaaaagtaattttgtgatataattatattaatattagtttttattattgtacttaaataattgtaaatcttaatacaaaattttatattattgttcacttaataatttattaaaaaaatataaaataataataataataatacaaagataaatattaaatttaataataataatataaatcatttaatacaaaagaatattttattaaaatctaataataaaatattaaacataacataatggtaaatataaaagcatactgtttattgtgatataaatttatcatgatataaatttaaattacttttattatgacatatttgcatcataatttgttacattattgaaatagacttttaactaaataagttatattttgtattttcataacttatttgcttaacaaaatgcttctaaaattgttgattatatgatttgacagtgcatgcataaatctttggttcttagtgtgcatttggtcaaggtagtgaaactggaaaaactcgattatcatttcactcttttaattggggtattattccactaaagttctatttgaagatagaagtgaagatggttccaatgtcaaattgattttttattttgttcatataatgtagattaaatgtagtttattttttattcttgtatttttatttctctcaacaaaagcatacttgtaatgtttttaattttttttttctctttttatttacagcgaaaacatgaccaatattacgctaaaattagaagcaattgcagagaaactttgtcaaattttgttggagaatggcagagatgaccaagtaaaccatgagaatttaatgtttgaggaaaaagagtgtgttgtttacttgtgcaaacataatcaccaacaacaaaactcccaaataactttaaacaataatgagaatattgaaacccaattgtgtttgaggcttcaacttttcattgaccattctcaaatctatgttcaatcagagggaggtgatcatttctactttgatgcaggtccagacacattacttgtcactattggaaaacaacttcaggtaactaataaccttattcaaataataatgatgtccattgtgttgaattttatagacaataggtataactacaaaactttctcaaaacattagtcaagatttatcccaatacaagccaagagcgggtcgggcctagactatgaggattaggtttgcacttaaggcccaacaagcgcaggag

SEQ ID NO: 4253 - DNA, 1295 bp, Cannabis sativa
aaaaaataatatgacaaattattatgtactcacaataaactacataaatataatattaaaatattttaaagtgcctaataccaatatttataaataatacgtacacttttattattacttatattttgaaataagccaacaaaaatattagtcgttcttcatgaagtttctctcttatgagctcatttaaattaaaaagctcttctctaattcttaggctatatccaaccaaacacgcctcgaactttttggagaagcccttaactgcccatccaaagcctatatctgtatatttccatgttaaacgtgcatcatgtttatgtacagtctttgaaataaatatatagcaccaaaccaaataatttaaagacaaggcacgtgtttgtttcgaatttaagagcaccaaaacaagagagttaggtacgttaataaaatatcagtatgtatataatacatatgtaaggaattactctatatacgattatttaataacttttcttcacttttaaggtttttttttttctttcatattattatacttttattatttttacatcaaaaattttcttttctattctttttacggtataaggctctttttttttttccttctctatttgcttccatctgataccattatcagagaccaccatattgctgtactagacccaaaacttaacccttccaaaagtaattttgagtaatctcccacaccatttaatggttctagtgccaaaagttgatgtttcaacaaccaaggaccaccactagaacatttcatttatccctgagatcgaaaaagcaaaacaaaaatttattaacctctcacgcttttctattgtcaccatgccatttattttccacaaaaaattgatagcgtcgatcatatttttgcgggaaacaacattggaagaagacatccttttcctacctcataccatcaaaagagtcatacaaagtcgtctatttgtcatgatcaaatgttgaacgttaaaaaccactccaataatcaaaattcagacctcatcacgctaaactctcttacagaaaactcagagtgaaaagaaaacaagagggattttttatttgtcagataagagaaataacgcttttcaacttcaaatttgtcaaaagccactgcacataaaatagcatttattggttgaaaaaaattaataattattaaaatatttgaaaatagctagaaatctactaaatgggtgtaataatttttcaattgctactgtatgatttatgtcttataaaatattagaacacttttcaactatactagt

SEQ ID NO: 4254 - DNA, 1903 bp, Cannabis sativa
  modified_base (1015)..(1015): a, c, t, g, unknown or other
gccacaattatacagaaaattttggcctgtttttttgtccttatagttaattgctttaaatataatcatgattttctaatataatgtacataatttttcgttggaaattatttcatcttcaacttcaagaaaattaataagaagacgaaaaatttgattttaaagggtgcattaattaatcatattggtatatacccttttcaaaaaaagaaatgttgacatatatactaaaatagtttatcacaataatataatgtcggctaaatattataattatatatgttttaactgtataaatatcactttcttataactaatttatatgtatatataatatattactttcaattagtttcaactctaatatgttttcatcatcaattaataattagatcaagataacaaaagcaaatcaaatattgaacaacttaaatttaaagctatatatatatatattaattaatatgtacatatataacgataacctaactaatttgaatttgatttcaaattaagagtgaaaagtacgttgtactatttattatagattcagtaaatcatcattaattacttgaaattacatatttaaaccaagcaaacaaaaaaaaaattatataaatatttaggaatacctagattcgaccagtactatatttgattttactgatatatgatgcctttattttcaaaaattagagaaattatatagtaaattacggtataaatatgtttaagtttaatttttcgttgtaaataaatacttaaatttaatttttaactgtacatgcaatacttaagttatatttctgtaagttacgtaagtacctagtcattaatggcatgtttactaataagtaatagaaatcaatggtaaggtaatcactcccttacattattaaaattaggaaagggaaaacttaattaaataagggagaaaagaaaaggagaactttccgcatcaattttgtaaggaatgtcattaagggtaatgaattttaattatttttattttatnttttaatattaaatatataatgacaattttatcctttacaatatgtcttgcaaaataactaccatataatatagtttaactcaaaaaggcaatttattcaatttaaacattccgattacgtttcctaataaagtaatcaagataaaccactactattctatttctaaaaaagtttaataaacaacatattacaaatattgattctggttatttttcatttattccgttacatttcttcatgaatttattccgattttgaatattgtatagtaaatgtgtcataaatgtcaagtgagtcattatatttacgtgatatttttttattagtatatttaaattaatttttaaaaaataaaaaattcatgagttggatcaatcaagaattaccacgtagtattaatttacttaacatttaataatagtcaagtatctacaaaaattctaaaattataacttaagtattatattattgccaaaaattaaacattactctaaaatttatttatgctataattttttcaaatgtggaaaacacaaacatataatcctacgtgctactggtagaagcaaaaatgatctatacttgaatataataaatattgtgattaattagtcaatattttgatacctaactatatatgctagggtttgagatttgtgaattgtgataagccatattgcatggtactaattagtgtacagatttctttctttttcgttattttgttaagactactaatatattcttctatatttaatatcgatatcgaaatataacacatttttaatttcacctatattaaactccaaattaaaatatattacgtactgatctatatatagtcaatatagaatcatgtcttggtacatttatatatatttcatata

SEQ ID NO: 4255 - DNA, 1093 bp, Cannabis sativa
atatgacatgtcactcaattcactaatattaggtcaaaaagctattgacatgtcactcaaaattagcttacatggcattgctaaaactaaaaactaattatttctttatcttcttttatttctttttttacaaatatcctaatttttttacttttttttttttcaattttgttttttttcttcatctaaataacgcggccaaatgaatcgaagtgctgaattgttaacagtacaataattttggaagatttgccttaaaatttaagttttgatagagttaattattagtgaagaaatttttttttaatactatttactttacttagataattatagtctcatgaatagtacgatttcattaattaatattaagtttttgatatattatttggcataatttataatgtcaaaattacaatttaaacattttgtgtagacatgttaacttggccttataaaaaagtatcatgacatgtaaaacaaattattttaaatatattctcaatattataaattaattaatatttccaaaaaaatcaatatatgtacctatactgtataatattatacagtatgatggtataatgatatgattatgatcatgaatattatataaatataaatattattctaagatcaaatggtacaaccattttccatttataggctaagctggtgatcaatttgatctgaagttttggattctaccttcgataaattatacttattttgctatatatatatactgtatagtgatccctatgtgcacagtaaaatatatctactgcaaaataaactatatatatataataaattaataatatatatattttgtttgaaatagtaaaatatgtatatttgtttggggcacataaattttttattctgctcagttggtgagtataaatatgaaaaagtaattaattagatctagtttgaattttcaagatcagcatatatatatatatatatatatatgaattcttgtattaaattatttcatgatcaaattaattaatataaaagtgtaaatttgtatgatccaatattataagttaaaacattattacagtccctgttattatatataata

SEQ ID NO: 4256 - DNA, 740 bp, Cannabis sativa
agtgtttgtttcaatgatgatttataatatatattataaaaatttaagtgactgcatggtggaagagaattttggttttcagactttaaagcatgcaatagcacaaaaaacatattatatagatcatttattttatttatttatatatattgaacttttatataacaagctaggtcaacgcacgtacgtaattatttgattgacctaaaaagctcttatattattagaacattattttatgaaagctttcttataattattaattaatattattgtaggggctggatttgcatcgaaacaaagctactcttctgggttcattaatttgaggatcaaattgcctgacagagattcagctggggttgtcacagctttctatgtacgttcgtacttaattataattatatatatgatctttttaattaattattaattattattgtttaatttgtttttgatcatgatcagttaagttcagatggtgataaacatgatgaattggactttgagtttttggggaacagagaaggaaaggcagtgactttacaaaccaatgtgttcgcaaatggacaaggcaatcgtgaacaaagaactctcttgtggtttgatccctctaatgatttccacacttattccattctttggaacccttaccaaattgtgtaagtttactatatatatcatctctctcacttcttcttccatacaaaatagaataaaggctaaatactattttggac

SEQ ID NO: 4257 - DNA, 816 bp, Cannabis sativa
gaacctgtacaccgaacagtgacaccagttgggatatgagtgattctgactgcagtttcaactttgttcacattctggccacctttcccacctgcccttgaaaaacttatatccaaatcctcctcagggatttcaacatctaatgagtcttcaggaagaagaggcatgacttcaataccagaaaagcttgtctgccatgttgtttttaagttaaaccattgattaggattacacatattgtgaagatgaaaatgctactttgatggatacctggcggagacctttggcattaaaaggtgactgtcgaacaatccgatgagttcctttctctccggataagtatccataagcatatcggccttcaacttcgagtgttgctgatttaatccccgcttcctctcctggggatttctcaaccactctggttttatatctctgcttttctccccatcttacatacatcctgagaagcatgtcagcccaatcctgcactggaaattatcaaaaggtatttacacaagaaaatgagggagtcaagtttaattttggcaacaaataatttgaaaacagtactcggcaaacatttaccaacacctaattttggaaaagaatgtaaatattgcataggacatagtagtactatttcacctgagcatcagtgcctccagcaccagctgttatagagataacagctccttctttgtcgtacggaccagaaagaagttcagtcaactcaaaccggtctaaagccttgttcaattccttgatgatactgttagcctcttcaagcaaagcagtgtctgtggagtccatctc

SEQ ID NO: 4258 - DNA, 736 bp, Cannabis sativa
gtccttcacttgattgtcatataaatttgtttttgctagcctgccatctatatcaatattcaccaccctaatgttagccaacaaatgtttaatccaaagagactatgacaatgtctatatcacatatttaaatatatgtatatatttgatcatatcttgaatattcatcgaggaaaatgagaatttatatttcaggtaagtcttatttagattggtttacattttttttttaaaaaaaaacaaatatataatcttatttaaacttcttgagtaaaactaatgagagaaatctaaaaaaaaaaaagaggagtaccaagataataatattaatcattaagaatcggctagtaagagctaatacaacttaagccaggtcatcaaacataatgatcatcataaaaaaagttagttttgcacactattgacaatcctaagacaataagagaagaaaaaaacattaagatgattacaataagctaaagtaactctaacaatacaaccaaaatataaatgatcaatagattgattccgaagggcattgaagacattgatacaatcaaactccacaaacacatgagaatagccaagacaaacacaaccacaaaaggccaaatggtcgtagccaaaaccaaaacaggagatgcctgcaaaatcactctgaatcttgctctagccttcatactatccacaccgtcatcacaatgtattttaataacctcagtcgggggcttctccc

SEQ ID NO: 4259 - DNA, 1124 bp, Cannabis sativa
taaaattgaacaaaattgaacaaaaggcattaaatccaacaaaaattaaatgaagataataactgcaatttgtaaggagaggaaatttgacaaaaaatgatgtggtagtggagaagatagaagggagactgaaaagttaaggtaagtttggttaagcagaatgaaaacacataaataaaaggaaaaattgtagcaaaagtccctaaaaagttgagtttgatgcagataagtccccaacattgaaaattggcagtaatagtccccaaggttacattttttgtttgtccgctggtacccaattttaactgcaccgttagattctaataaattgccatgtgttaattttttattggcaaaaatcatattttaattaaaaataatttaaaataaaaaaactaaaaaatatattttaaaaccataaaaaaaaaagaattctttttcttttttttttttcttcttcgtcttcatcataaagcaaaacaatttgacaattcgaaaaatacaaacccacaccccgaccctcaccccaccccgccccacccctaaccccatcccatccccatccgtgactctcaccccaccccattcccaaccatggtccctatttaccatcgacttcaaagaccaccagaaaacaataaaacccaaacccagatctcaacccattcattggaatcaaaatcaaaccatacacaaactcaaatattcattttcttcttggtcgttcaagtctttgtttatatgctctgattgcaccaggagagagacacaaataatgggcttcaatgatatccattaatgatgtcggagaggtctcaagttcagatctaagcatggtgtggcagggacggagggactttggtccatatgtaggcttaagccctcactcaaatatatacattaaacttttcacatattgatatatatatatattgattcacttcactcgcccaattcataaaagccttcactcaatatcttaatcatgattcatgagcctaccctcattctaatcaaacccattttaaaagtagcccaatataaataataaaaaaaataacaccttattaaaaaataatataatattgtttgacattaaactacctttgccttatcatcttcac

SEQ ID NO: 4260 - DNA, 2374 bp, Cannabis sativa
gatccccactaatctacattcaagattgtgagtgagtgtttcctatacatattcttcttctcttacctttcttatatatataaatatacgtataaatacatatatatagtgtagtatatattgttgtaacatttatttaatctttttattggtccttatattgtgttgcaataaagttgtaatgttttaattttttttctattataataaaatttctaataaaatataactatcatcattacatttttaatgtaaccattaaatatttaatattttaactactaaaatctctatgctagtttatgatatgcaagtatcttatgtcaaatgaaaattttctaatgtaattttatatagttattaaatatttagtattaatctacttattcccctaattttgtaaatatcctattgatgggatgaaaaaacataagttagtgttctttcttatttaaagttttattttgtagtttcttgggatatatctttggtgtcaacctctcaactttaatgttaatgcccatagataattaatttttttggttgaatggatacaaaatcttgttaagataagatttgaggccacttctcattaggtatgtcacaacaaaccgtctctactctctatggcatatgtagtaaattagtaatgctttctcaatttgtttcttcaaaatgtggaagagctaggataggctattctagttcatcttattcaatctcatgtgtattaaacaattcaaagtggaccccatttttgtcttatgttattgctttaattgaatactttttccacttaggagtaacttttatgaaaattgtttttagtaaactgacttttaaatatttttattattagcaaattgatattgttaggtgaaatttattaaattaataatttaaaatattaaaatttacaaaataattttttatcgcacaatgtaaatttatagttattttataattacaatgatcatttatggtcgcaaaacgactataaatttatattgtgtgactattataattgtatagagtaaatgaagcgaggttattttataaatttcagtattgagtaatttgcggtataaatttttaagtttgactcttaattgtagataaatacgtaagtttaattttggataaatactattttggaccatgtgttttgcaaaacttaccaattggaccctctgttttgttaaatgaaaaaatagactctgtattttccaaaatggtacaaataagaccctaaactaattttttttcaaaataaaatttaataataatccgatctaaaagttttataacaaaattatttacattttctgtatctgttgttcgtgttaggaattattttaagttggccatattaaaaaaaaattgccaaaaattaagctcagggtcctatttttacaattttagaaaatacaaggtcaattttgtcatttaacaaaacaaatggtccagttggtaacttttgcaatgcaaactacaaaagagtccaaaatagtatttatcctttaatttttgacggtaataatacttgttatatttatggaactttaatatgtatatgaacattaactgccaagtcaatatccacgtgtcattttcttattggtatatttaaatgaatttttaaataaaaataaaatttaatcagttggaccaatcaatggttgtcatgttgccattgacttgacacttaacgctagatacttacagaagttttaaaaatataatttaggtatttatatgcaactgagagttaaacttaagtatttacgccgcaaattactcttgtttggtacgttatattgtattatttaatacaatatcatgttttggtattgacttgtattaataggttgtgtaaagataatatattttgaataaactcgacctaaacaccgactacatgctgggtttcgggtctgattcaggtcctgggtccaggtctaggtctgtgtccaacgtccggtgtctggtgcgggtttgtggtccggtctgggtctagggtctcggtcccggtttgggattcgggtccttgtccagggttcgacttaggtcccggtccagcatccggtctgggtctagattcgggttagggtcggggtcgggtctcgagtcccgagtctcgggtctaggtcctgggtctcgagtccgacctggatttggggtccgagtccatggtttgtggtccatggttcgggtccgatcagggttccaagtgtgaagtctgcgttcgggttcagtcgaggttcaattccgtttttgggtttgggtccggtctgggtccaaggtccaggtccgtgatcccgggtccaagtccatggtccggtccgaatctaggtccaggtcggggttggggtct

SEQ ID NO: 4261 - DNA, 2068 bp, Cannabis sativa
ttaatcaatatattatattattcattacaaataatatgacactgtgtcgtccaatatcctagcctcatttagacaaaatattattgataaaaaaatttaaaataatagtgccaattaaccatttttctttataataaatacaagtctatataaaataaacacaaagcaatatagaacattaatttccaaagatgctctattctttttatggaaatgacaccaaaaaattgtgtctaaaaaggggctaacatcctcaaaattatgcaaatcacaaatcacaatgctatatacagctaatcataacatcattttcttctaataatagccttaagaccactataaagaaattattctataactcccatccagagacctgcttaaagctaagaaaaaagaacatttatttcttgatttgcaaggcagatcttgaaaactaagcacacatcacataacattcacaatggagcttaagaagatgtccattgctgtcattgttgcagctgcttctctcagctcggtcctggccgtcgatgaggacctagcccctagccccggccctggctcgctaagtgctgcctcatctactttgcctgtagttgggtccttggttggagcttcccttctttctttattggcatattacattcattaagctcaaaactaacacacccaaataaaataagcaattctataagacactctattgtatccaaccccgttatggcgcctcatatattattattgatgtaattaaataataaatattacatatttaatatttaattgtattactaatagtatggtatgttattagggtgtttggcattatagagtggtccttagcaattctcaaaactaaaaattgaaaaattaatgtaaggagttgtaaagataagataatggattctcttgtgctttaatttagttattattttatattaccattaatgtattctaaattatgcaatgtattaagaaaaagaaataaaaagtacatcattatgagttgtgtgtggatccacaccataatgtcatttttagttcataactttcttaaagcattgccattattacaaatgagggtctcttattaatttaaagaacaataaacataattattttcataaagttaagataataataaaagtagtagtgagtgttgtccatgaatgatgcttttttttttttttgacaaagacaaagtctcaagacgtgcttatcttatctaatatgataatatcatgcaatttggaacttccacgaccaaaaaaaaatctttggaacttacttttcttggatccaattcatgcaatcatttctatatcaccaaaaatgtgtcattgaatagagtataatagaaaagaaaagaaaaataacagataaaacagaaaggtgaatagattgaatgaatgcaggagctttttacaaacttcaaatagttctttcatttccataataatttctctttattttttggggacaagattgagaaatttggaaattcatgtcaataatatgaacatacaagtaacaaaatgaaggtggtataactcaattgccaaagttccaattacaaagctgcaacacaagttattttcagggtctctaatttccaatcaaacagcattcttggaagcacaaattataagaagactaagatacaacatgtttttttttttctattgccaatttccctcttcaaaattaggatccttcattaaatttctgtgcagacataaggctctttgtcaaccaaatagctgtctctcttgatgaagctgcatcttccccgaacggtcttaacacaccagcaagctcatcgagtttgtcttgcttaagtagcctagcacatagctcaagtagagattctaaggcatcagctctttgtcgaccaggattttcccactcggccttggcttctaccccagctagagaatttaacgagacatcttttggtgtttcgttatcaacatgatgacggtcgtcttttcctgtttgtttaggagcactagcattatctaccttaggacccgtctcatcattacaaggaaccacaacattgatgtta

SEQ ID NO: 4262 - DNA, 1448 bp, Cannabis sativa
tgattttatttaagtcgagtctgagatcgggattgggggtaggtccaagtacggggttggggtcgggttcggtttctaaggtttaagttagggttggagtctaaaatattgattaaaagaaaactgtctaaaaaatattgaaagtgatttttttttttttaaagtttagatttttaattaaaaaattaaaaagtaaaaatagtttcatagaatatgattttaggaaatatttttacttttttaattttaaaacaaaaaatcgattaaaaaaatgttaccaaacgcacttttaataaaataataataaaataatgaattaattgtacttccatgtgcttttatttaaaatactattacaaaattagcaaaaaaaaaaaatagagaattctatccttttttatataaattttgtataattgtagttcatatttttaatgttgactctctcttttagttaaaaaatatgcttagagtatgggagatgctcatacattttagtactaattttgcacaacttttacgtactattggggctatatatttatgatgagtaattatatgggaacacttaactataaatcagatataattttgacacacttataattagttttaacattctttttttaatatgctatattaaattggctttgtcaaaataataataataataataatttattttggctttttaaaaatagttgagcaagtaatattttgcttactttgcgattaaataatatcatgtccattaaaaaaaaaaattaattcttatttgaaagtaattcttctaatttttcatatataagtttttgttttgttttgtttttttttgtataagctcttctaatatataggtataacactaaattaaaaagataaaaggggtcttttatggcatatttgaaaaatgtggtcgtatcttgcaaaaacagggacaaataatcatcccactttcgttttcagacaaataaataaaaatcttaaaaaaaaaaaataaaaaaatgacagctcagctggccgttacagtagtagcagtacgcaagtaaagtagggacccccaaatcttgtgtccaaatctgtgagacattccaagagtcagtcaccctaatacccacacactcaaatatatatatataatcccaatcgatctccactattgccatacctcattctcaccaaatcttcctacgtcaacactttcaattcattcctcctcattctcaccgagtgaaataaaaatgaagcgacaatttcgtattgagaaaatcgacgacaagcaacgaagattggtttctttttctaagagaaaatccggtctcttcaataaggccaaacagctttctcacctcaccggcgctgaaattgccgttatcatcttgtccgagaccggtcgtccctacgttcaagccttccccactccttcttccttcgagtctctcatagct

SEQ ID NO: 4263 - DNA, 1517 bp, Cannabis sativa
cagcagaacccatacttaagtatccgcagcttacaacaatcttcttctttttttctagtcctccccctctttactctttttattttacaaagacattttaattatgccctaacttcgggggctctttgtaataattgtaggtctttacccttttccttgaagcttcacttctattttattatattgttttaagatctattatgttaggttgttttgaagtgtacggtttcaacacccagcacttcaaaccttttttcacccgtctgtgatctttcagctgatttaggaggcatctggggacttcaatctccttctccttgatcaccaggaagtaatgaaacgtcagcattttttatattccattagtagtaattatctgtttggagtttctactcaaagaacgctggctcaaggatcattttctttgtgaaagggggagcttcttcttttcaagcgcctcttgggctcttatgtttttgtgaaattgagttccgagagtaatgcttgtaagtgtcgtaggttctaagagttttcttctatccaggaatggggctgaaactgcctcatacttaagcagattttcttatcccgaaccttgccaccttgagtctttagctccttgcaaaaccagtcaaataaaaccttaggaaatcattgagaccattgagaaggaatccaggtagatttttcttcttggaaaatttggctaaaaacgcatcccatctctggatttacttcaaattttaaattttgaagaaggaattcaagcgtgttttcccttaagaattttggttgaaaacgcatcttgttttcagtttaatatgcatggcgcgctaatgatttgacaaggtaattgagtaattatactgctagttgctgagtcataagcagctagtcataacacctcccaaatgagctgagagacttggacgcttccaaattttcaataatttgtccaaaacataaccttggcactgttgtgttacttctagtctccaaaggggagagctaggttcgcgtcaaagttctagtcaagctcttttctaggaggtacaaccaggcttgtgttgtttaataccccaattgtggcctctccggctatcatcgcatgtgaaggattttttccaaaagataatgaaggccaggttgaatttgacagtggtcttccgacttgctcgagggaaggcttttgccacactaaaattcaagcgtaggcttcacgctaaaaactatatgtgaaaatgaagttgggtgacgggcttcaagcaatcctcaacctgaaggggaaggttgaagtcacgttcgacaccccaagcaatatttccacaaaaacatttggaaaagtaacccatcaagatgacagaaattgtgtggcgagaacacacatgcatgtggaacccatgttgaattgggtggcggactttcgcttccattaaggaaggttgaagtcgcactaaaatcaaaataatagtttcacactcaaggaatagtagaacatcactgggcgtgtgacagac

SEQ ID NO: 4264 - DNA, 1749 bp, Cannabis sativa
tctaccccagaacctgctgctttgccaagaaaatctactcgtgtttctcggcctcctagttaccttaaagatttcgagtgctacaacttgatacaggacaaaacttctacaaactatcctatatcaaagtttctttcctattctaaactttctcacacttacaaagcttttattcttgctgttactgcagaatttgaacctcaaaattacaaacaggctgttcaattcaagagatggcttcaagcaatggataatgaactattggctctcattacaaataacacctggaccgtggttcctctcccacccaacaaacgtgcaatcgggtgtcgttgggtatataaaatcaagtacaacagtgatggtagcgttgagagactcaaagctcgtttagttgcacaaggctacacccaacaagaaggattggatttttttgacacattttcccccgttgccaaaatggtcactttcaaacttctcctagccattgtcacaattaaacaatggcacaccttacaactcgacatcaacaatgcgtttctaaatggagatttagacgaagaagtttacatgcaaattccccaaggtctcaccattccctcatctgttactggaaacaacttggtttgcaagcttcataaatccatttatggccttcgacaatcttcacggcaatggtataaaaagctcactgaagctcttttgaaggaagggttcacccaatctcaagctgattacactctttttacaagaggaacccgagatacttttgtggtccttcttgtctatgtcgatgatatcatcctcgctggtcccaacctttccattttacatgctctacaagactctcttcaagcaagattcaaactcaaaaccttaggtcctctaaagtacttcctcggtttcgaaattgctagagcaactactggtcttttcttatctcagcgaaagtatactttacagctacttcatgacacgggttacaccagcagtaaacccgcaaaggctcctatggacccaagagaacgcctcaatgaccaagatggtgaccttcttgacaatccttctcagtatagacaactgattggtcgccttctttacttaactctatcacggcccgacatcacatttgccgtcaattctcttagtcaatacatgtccagcccccgcaccacacacttgatggctgtacaccatctgcttcgatatttaaaaggttcaccaggccaaggcattttttactccaccaactcatctctacatcttcgtggcttctccgactctgattgggctacttgtcctaccactcgccgctcaaccacgggcttctgcatcttcattggcgattgtctcatttcctggaaaaccaagaagcaagcaactgtctccaaaagttctgctgaagcagaataccgtgccttagccgccaccacaagtgaactcacttggatccaatatctcctcaaagacttacacatcgcacaaccatcacccgctttcatctattgcgacaaccaatccgccattcacatcgccaacaaccctacattccacgagcgtaccaaacatatcgagctcgattgccatttcattagagaaaagattgccaattcaacagtccgtttgatccctgttagcagcacgcttcaactcgcggatgccttcaccaagccactgccttctactcttcttaactcccatttgtccaagatggccatacacaatatatatgatccatcttgagggggg

SEQ ID NO: 4265 - DNA, 1014 bp, Cannabis sativa
tcaagacaagtggatcagtcaacccatgacattctctttgcaaacaaaagttaagtttgaagatggtgctgtagtggggtccctcaataataaaggtgggacctggagtgaggagaaaataaggacagttttccatcctgatgaccaagattgggtgtttgttgttgtgttgggagcgcaccagagtgcatatgtgcaaagcttggggttttctagggattgtctttactccattaattgtggatatatggtcaactatcggttcaagcaaggagctgattgttaggaaaagtatttggtgaagtcctggtggcgtacggtttagaaggctaaagttcttccaaaagtcaagaatttttggtggaagcttagccttaaatggaaccctgttcaagttagtttggcctcccatggtatgattattgttgggctgtgtgcgttgtaacaaagaatgggaagaagtgatgcatgccctttggtattctcctaacgttcgagaagtttggaagttgtgcgccttgtaccatgtgtttccttcttgagtaaagacccaatattttttgggattcatatgcaaaaataacttccaagccaagtctttgattcatggtggtcacttaggttgcttagctcgacaaaataaatttgagcatcatctttactgccccccagcctcaacttgatggaatgggtgtagtcctttttcaataaggctcttatcaaggtccctggcccaattagaattcatagctagaaagctctttagcctcgggtgatttcgattaattgtaatgcttctttgtgtgattccttatgagattgtgggattggggtggttggtcaggattgttaacacctaactgtttttctgttattatagttagttgttatgtctgttagggtagttgttagttacttttcttggcttttctgtattcttgtaacaaactctcagatattataaataaaggattcagtctaaatgtttgaattagcttttgctgctaatctcaa

SEQ ID NO: 4266 - DNA, 646 bp, Cannabis sativa
ttagggttaggagaagggaaagtatcactctcaggtaggtgggccgggttgggttgattgggccattgtgggcagcccgtgtccaaccctaggtgcatgtgttacgcaaattttttagattatttcagaaatatacaaaaattacaaaatatttacgtttttacaacatatatatttttatatttttccagattttttttaggttttaggtcattctaaaaaatatttttgtttgtatgttgtttttaccgtgcggcaggatcggccgtgataatatatggacctaagacgaattaaaatttggggctcttagatttatatatacatatatataaaatattaaaaaaaagtgttacgagattcaaaccaatgacattgtataatatgacatacatctcaaccaactaagctatgaatatttattatttacaaaggaaaaatggtaaaaaagtattatggtgtctagtactatttttagtgtcataccacagttgctataattaagtatcgaatcttatataacttaaaaaaatagatcctaaaaaatatcgttaaacaatcataaattgttacctataaaagatattgagcattactagtgctcaatagcaatacgttttttagtcctatcttacttagatgagtg

SEQ ID NO: 4267 - DNA, 1443 bp, Cannabis sativa
tgatcgttggtctctttccgagctatgttatcatttttgttattaatacggatagattacatttccagaataaggtgtcatctcattaagtttcaactgatgaagaatttgaaaatcatgtaggatgcggatcagcttttggaaaagagagtaagatctcgcttttcacatagaaaattattattccttccttctattaatgaggaatggcataggtaatgttttattgtatgagactcttggatgctaaggcagattcttcttatgtagttgacaattctgatataaaattcttcttgtttgattttgttaaattcgatttccacagattattggagcatattttgttattgccaacagagtcaaccctccccccaaactatgttaccgaattcaacgagaagatacaagtatccttaaatcgaagagtttatcacttttaactaaatttcagagcctggagttgattctgccttttgatatgacttaatgggtctcattagtaataatcatttgtaactaatttactgatatattgttcttatccggtgaagtccttgacattgcgtagaatattttagcagatgtaaaattcaaagagattatcactacatgtacgaatattgattccaccgtcaatgccttgttgaaatttctgtaagttcgtctctttcgtttggaagctcagatgtttcattgtctatttgccgttacatatcatattttgttcgaactaaactcaccctgcacggtcatgattccagatttcgtgctgtttcaaatatggatttgggaactggattcttatctctggagaatttcaaaaccgcattatcaactatgcaaaggcagccaaagctagaatgcataaaaggtagaaatgctaagattctcatacctattatggaattgcattttctttgttagaacatgttatagacatttgatgcaatatgcatttgagagagactaaaattagaattctatctctcattttatgaaaacttttaagctaaatatgaattgatatgttcaaggatgagtaaaggttttaatcaaaattttggagacaaatgtagcttatgaaagtatattctttctttggcgaaagacaggtatggttggttaccgattcactatttaatgcttcattcacagaaggatttaaacgaaattttcgagatgatatgtaggatacgaatgaaagttatatgtttgagtgaaaattctatcttttcctattgtttttattcttccacttccccgtagtcccttaactactaaccctgttgtttaatgtaatcaaaattaatggtatcgattgcattttcgacctgtggaaacagattgttctatattggaactatatattctggtatgcatgaggaggatggaaattaaagaacaaaactcatacaacttcaattccataatgaaaggtaa

SEQ ID NO: 4268 - DNA, 967 bp, Cannabis sativa
acccattgaaaagaaataagaaaaaatgcaaagaaaatagattattttatattgataacctactcagaaattctctaaaattatattgaaaaatacttttgtttttgacaatgtccactaccaaactttgatgtggaaagttttggcactatataatttctttttctcctccactccaaacctttatttatttcacttattcattcaaataaatttatatatctttaattatatttttttactataaagtatatgaaaaatcatatttagaccatattaattgaaatataaaccacacacatatggtttggtagtgaatttcttatataggtctaataattcatctatatagatctagaaaaagctagtacaagtttacaattattgagtaactcataataattcctaaaccacacatatgtttggagtaggtattgccagcagagatagaaagcatagaaaacgacatcgttttgttgaagaacgaaaagtcatatcacttcgagacaattgtattttgtactgggttcaaaagatcaacacacttgtggcttaaggtacgtaactaacaattatattattttggccactttatatatttatttactaaaaataaaaagagactgaattataattaattattttttaattttttggtagggatatgattgtctgctgaatgatgatgggttttcgaaaataagctacccaaataattggaaaggaaagaatggtttgtattgttgtggattatctaggaaaggtttgtttggagctaaacaagatgctctaaacattgcaaaccacatcaagtccttgttgtgtgacaatacacaaaatgatgatgatgatgattctaattcggaaaagaagccctaattaattaattatagttgttgttttaattattattatttagtgttaagactatatactttttttccttttgttaattaatttggtggaa

SEQ ID NO: 4269 - DNA, 1674 bp, Cannabis sativa
tttataattttgttgctatttgattattaaaaataataatgaactatttatttgaatataataatattttgataatattgctatactagttcattttaaaatttcagtacattcattaaatttgtcattctctagctagcaaacacacacaattgagaggctatacaattactaacttaacatttgtcttccatgccattgttttgtcctatagtttatccattatgcatattgatctcgattttgtgttttttcctaatattgtacaatatatattatttgtccttgtatagttttgttaactagtaaaaaaagttctatgtatacttatgagatgtgctcaatgcattacaactatcttaaatcccttcctccaagaaacaaaaaggtgaccaaaaatgacaaaaaaatgacatcataaatttggtgagagagtgagaatagaattttatttgataagttaagagagatgaaaggtagaattattatatattccatttagagatgataagatattactttttatataaaaaattatgtgtactaactaataatattgtaatgtactcttagtattactaatatgatgttcttatgagtgcatggtcatataaatttctaattataaataatgattgttattaggtacaagtaattttcctaatattagcataaagcaaaactttacaaatgattaataattttttataataataattaaattaaaatatataaaattacatacttaattatattaataataatatttttttatagtatggtaaaatataataggaggaatactagatattacaataacttattacaaactcttaattaacctccacatttaaaataacaatattcattatgtattatctctaaaaaaaatttaaattgtttacaatataaaagtagagttcataagaatctaatttacgctggataaaaaacaatgcactactttaccataaaattgtaataaaatacaccacttttttacacactcttattttccaaatgtacactcactcctatagtataggcgcattttagcctaacttccaaatcccattagagagaaagagagtattatttaatatttccttttatctgtctctctctctctctctatcttccattttcatcggttacattattatagccttttagcttaaaaagaaaagagctttcatttcatttttcattgtcattaattttcttttaaaaacattttattttgaataaaattagtatagttggacttgttgtcattgattttgtttcacttgaacctttttctagtctttctttacacccaattcctctgtttcttctctgtctttcttcccaccccatctcctttattcttcctcatatttaacttccatttttgtattctttctttcccaaagaaaagaagaaatttttattcaaagaaaaaaaaaagtggaactgggtttgttgcttaagggaagaaagaatcatttttcaggttcagatctagctgagcttgagtttgtttatgataatggagacatacccaaatgcctattttggttttcttggctcctctttctctctcttattgacttgaaaaaaaagaaaaaacccatttcttgttttctcttcttttgagcttttttgttaagcctttctttcttcttcttcttc

SEQ ID NO: 4270 - DNA, 1048 bp, Cannabis sativa
gggcataaaacccaacagtaactttatttatgagaggagaaccatatagttacttgtttcacggttgcatccacattgcatctctgttgttttagtctgtgttacttattgtttgcttatgttattgttttctatttttcaattgatttgattattgttgtactttgatctctcaaatacacttgagtccaagatgctgagaaacttgatgagtgctattgaaaaggtcaatgacatggatgatggtaaagggaggcagaagaaatctagggccaagaaggccaaagcatgtggctcctccaaaacctctgacgctgaaggaattagccacacgcttgacccttcagccgttcaacccaaagttaggaacaattcaaagatcagactggttactagaggtggaagcaacatgataattaaatttctcgttacgatagatattatgaactaggagatggaacccatgattctttcaaacgatgagggttctagggaaggcttggtatttccaaaggcagtagcatcattaaaactctccagcaccgacccacatcttggaaggaaagacaaaagggatagacacttatctcctagaggcattagagaccttcgagcatctgtgtctgttagggtagaaagccttccagctcaaaaccaacagtcgcagtcttccaattgcccttccatgacttaagtcatcaatacaattcacaacccacaagataaaaatgctaccgaaaagcatacctttctcgcatccaccaatcctttaacacaaatccaaccaagaaagcaccttaccccaaaaaaccaccaaaacaattcttgagtaatcagtcaattctagcttcatcttcttcggccaacactactaacgaaaaataaacccaagagctctaaacttggttgcccaagattccatcatttccatttaagtttcccttgaaacttaccaatataagggctaatgtcttagaataagtacgcaaagctgacagctatttgaaacgtcaacttgctgaggagcataacatcgtccaatctagga

SEQ ID NO: 4271 - DNA, 1974 bp, Cannabis sativa
ggtataaccttggcataagatgaaagaatacaagagtaaaaatcaatatgagaaacatatttgaaaagattaagttgtgattaagaagcttattaattaccatattataatgggatttggatccaacagaagatgggttcatgggaactatgaaaaaggggtcttcagatttaaaatcttctgctctcttgaaagcttcagtctttgcttttcttttattcaacttctgatttcttacaaaattttcaggtacaggagattctccgcaggctttgttatctgacaaatcaaaattcactgaaaacagattcaacacattaaaaacctacattgcttaatcagttctgggatgatcaataccttcttcttcagatttgacatatggacttgttttcattctcttgtggggatgattacatggtaatggagacttgtcccatactccaacagaaatatcatctttagtatcaacattatggttaggatcaaaagggtaatctatctcaaccatagttttgtcgaatatgattacattgaaccgacagttcccttcataccgaaacactaagaggtttccacggcttaaagaacaatgttgtgcaaaagctttccagcccttgtctatccatacatttccatcactactttttgtcaacccaacctcccatgttgatccacatggaagcttaagaaatacttgactcgataaggactcacaatatttcacccaaaatgtctttggaatttgctgcacaaaacattactacacatgactgcaacctctacataaataggtgtatacagatattctcctcttcatgttgcagaaactatgattaagtattataggagttgaaaattcaacatcctcttattttggcatatttgaaaatttttccactacaaagtagacatcttagggtaaaaaaattgaaaaaacaaaaacaaaaactaggcttgaatatatagtacagtaagaaattttgagaactcatgtaagaaaaagatactgtactagttttttaaaattcagatgaatctaacaacaaaattatggctatataaatatatataaataatataatatatgttaagtcaacctctaatctctggtacatatatataaagtgttgaagcagagaaatagagagagtaataataatgtatacttactagccttgtattcccaggagtttggccaagaataatcttggaaaaatggggaacagtaggagaaaacattgtgtgagccttggcaatatggctatcgcaagccattgttgaacacgttttttttttttttttttactttttttaaaacaaagaactctactccaactgtccaacacacataaagctttggttaccagttaagttaccagttaccagttaccagttaccagttaccagttaccagttaaagtcttaactaagtcctcagtcaaagcaatattggggaaagcgcaaagggagagggtctcatcaacttctacatcaaacactttgtttcagcttacttgtcttatcacatttattcatataaaaatcttaattattgtgaacataattccaagattttatttttttattaattacttgtcatttcccaactttttaattttcatcaacctttatgatataacaatcttaataacaaccttaaatgattaaatcccagcatataataatagtaataataataataataatgtgttttaattatttcaagtagaattttcattattttttttgttacattagtgaaaaaaaaaaaacttgtcctctgtagttttatgtagtattttactaaatatttatgttcacaccaaaactttacaaggtatacatataataattttgtgttcatcagtttttttttcgtatttgttttgtattatttattttttcaaaaaaaaaaaaaacagatatcttcgtattttaccatacttgagaaagtgaagttgagaaatcatt

SEQ ID NO: 4272 - DNA, 891 bp, Cannabis sativa
attctgttgtaggctgctaaagagagaataataaagtacaaaagataatgtgaatagatttttggatttaggagttggattttgagagaacaatcaatttatgttttcaaggtttgccttaaatttgaagatcagatttgaaaataaattttaaaaattattaaccaattagctgtttagattttagatggcccgacagatttagtttccaaaccataaagttgaattcaaattctaatacgagtgaggccttaagggtttgatcagttcgtgaatataaaactatatgttagagcttagaaaagtctaattctgaaaattgattcctttccatttcattacctccaaccaaatgcaacctaaaggttagataaattagtgaaaaataagtctccattctctaagaagatcttgaaaagtaaagccctcaaaagccttgtcttgtaaacccaagttgctacccataatataaccttcttccaaaggtctcctgcatcattcttgtgttgtgaccttttcccaaaggtctcagaatcacactttattaaaatacagttttctaattacgagctaatcatataattactttcttgcacctattatgtttgttgaaatggtctagcattatacctatgtatccttgtgtaagtttgtgtatttaaattgctatttgatttcaacttggatgttggtacatatttgaacactcaattgggattcttatatgaagcttttgaactaaatacattctaattcatctttatcctttaatgttcttaaagttgtaattatttttttagaaacaaaggtattttgatattgacttttacaattcatttaaagttttcaggcaacaacgttcattacttatgggacgtaatatacgccatt

SEQ ID NO: 4273 - DNA, 1238 bp, Cannabis sativa
acttgttggtttgattttagtcattggcccggatgaacaaaaaagattcatggcttttctggtggacactataccttacggtaagccaatgtaatttcgataaaaggcagttgatcaatcattataccttacctctagtggtttaacacacaccaaatatgtgatacatatcaaatcaatatacattgttggaactaaagtagatttgtactgcataacatcacgaaagtaaaacaaaccagatggctaatacatttgcttgcatgttggaagaaggacctggcttgtgagtcaattatattacttgctccatttgttgtaacatctcaagtttcttcctttgtgctttataggctgttctatggattttgcttggaatattctctcttataaggtttcaagctgattatcttctggtcgttggagtttgtttaaccctcagtattgcaaacattgtaggctttaccaaatgccgcaaaggtgtgctagcaagctagttcatttaattttggctataccaaagtgtatatatatatatatgctttcatatacctgtttgtttttatcacactaacatggagatgatgccttcttctgtctcagatgcaaagaagcagatccaacaatttgccacccagaccatcgcttctcgcttttcgtctaccatacaatcagcatttactgttgtctgagcaactaccccaggtgctatgcaatgcaatgggtgcatgtactgtaaatgaaacactatattggcctgcattaacccgagcttcgttacagatacaagatggcatattatagagatttttgtacacgccttattgagttttctaattgtttgtttgataaacatgttgaagttcaattcaagctgcttgtacattttctcttcgcacaagcttattttatgaattttttttcttcttcttctataattgaatggacagagacctgtggcttcagcctggaaaaagtcacttaatctaaactcagctaggatatcactatcagttctaaaaaggataagaagataaagattacctagtaaacgacaatggccttcaaaccaatgtttaaattaagttttaatcattggtatattatatagggttttcttcaaaatgaatttgagatcaatggccctaattgaattaaaagtacagagtttgaaatagcaaactgtgtggggcattgttgtgatgtttaaaaaatttagattttgattgttcaaaaaa

SEQ ID NO: 4274 - DNA, 2488 bp, Cannabis sativa
aagcaaatgtgaagttggccacttgttcttttggagtgtcacaaaccaattacaagcttccttttttttttccttctgtctttttctcactgttgcaattagcaacttttattagtaaaggaatttcagatttgtgtaccaaaaagaaaaagaagaagaaaaggagaaaaatgaaaaaaagatatccaacctttaatattttgttttgtggtaaaacattgcttgcttgattattttataatcttgtattttttctttctacaggaaaaattgattgtgagggcagtcagttttcacctttatctgttgaacatgtaaaacattaatccaactaagaagttccataattctgatagcttcggtcaggacgggttacacttgcccatgggagaagatggtacgaccttcaatcaaaataccattggcatctcttttaaccaggcctaaacagtaactatgaccactctcgaacaaaaccccatccacactgattttgatattgtctacttttggtaaagttcaatgctctttcccatcacctaactgaaattcagcttgtgatgctattagaaatataaaaaatggttaattagttaaaatttgttactatgtatttacttttgtccagctaactttttctagctgttttctattatttctactggtgtattcatggttttgtacttatatataatcaatgcaatcaaaggctgtggatttgatcaagctattttcatcttttttgttccattttctctcattctatttttctctctcttttttcttgtctgcaaatattcaagttgtgcttgaattctttcatggtatcagagctatatagaatcaataccaaccaatcgtcctattccacaaatggtcgaacaacatgctcctgctcaagatgcaactcaacacccagtagctaagcaacaagtccctgcactgaatccagcaccgaccaatcttccatataacaatctcttgcctttaaacctttgtcttgatcgaacaaatttccctttctagcgatctttagtactggctattgttcgtgcttatgaattgggtggatacatccttggtacaatccaagctcccgatccttttccttcaagtaatgttcctaatcctgcttatcaaaattagattagatttgatcagttcatcatgcattggctaatgaattctatatctaaaccaatgatggcctacatcatcaattggcaaacttctgctaatatttggaatgtcttcaatcaactgtttgccactcaatctagagccagtcttcttcaagtttgtggcctctacaatccaccaagaaaggctctctgagcattgatgaatacttcctcaagatgaagaagtatggtgactctcttgctgctgcagatcatcccatctctgatgaggatctgattctttacttcttgggaggtcttggatccgagtatgaatctgtggtggtcaatctcacctcaagaactgaccaattaactcttcaagaagttcaattcatgttgtatagccaagaaatgctaattagtcagcaaataagtgctactttagacaatattcaagcaaattttgatggtacgttagttcaaggaggttctagtcgtggaggtcaatgctatggttgagaaaattatggatctcacagaggaggaagtcgaaccatttacactaataggggaggcagaggtaacagaccaagctgtcaactgtgaggatgtcttggccacactgctcaaaaatgttaccatcgttttgacataacatttactggtcctcaatcctctggaacatctacttcaaacaccactaataatccttaagctctcatatccacaacaagccaaaatgatgattctcatattgcttagtacttggatacaggagccacccatcatatgacccttaatgctcagcaattggaaaacaaagaagactaaaatgaaaagccggagtgatagtgggtaatggttactctatctttattctgcatataggttctaactcttttgacacaaaatttttaaatcgttcattgtttctaaaagatatcctacaagtccctagtatctttaaaaatatattgagcatttctcaattcaccaaagataacaatgttgttcttgtgtttgattcctcttcttggtttatcaaggacaagaggaccagccaagtacttttgcagggtaccctcagtgaggacttgtacaagtttcagcttccttgttcaagaacagtcacttcattcccacctcaatctacccctcccaataaaagtggtactcctactcttttcaattgcactactacaagcaacccggtgtttgacaacgccaaaactttcacaacttggcactatcatcttggtcacccctccaaaaaagttttaaagaaagtcttttccatagtttctcctaattttaagtgtaataatgttgatttttgtgattcttgtcaatatgaaaaattacat

SEQ ID NO: 4275 - DNA, 861 bp, Cannabis sativa
attggggcggggagtaacacacccaactccgccccgcccccgatccgggaaatgaaaatcaaccccgtactcgccctgtccccgtcaagccggagattccccgcctcattaggggcggatccctgcgggtccccatccccatggagcttttgtgcatccctaaatagtgtattcttagaaaatgataattttatgtgcaatctccaacaatggttttggattagtgtttttgctcatttgtattcttcttctttagcaaaggttctacataaatatattttaggattttctatcttgaagcattttttgaaatatatttagatttgtaattatttgtatttcttaaatattttataaatcttaacaaatagtattagagtcacctttattagattaattgaagctatgataatttaactttatgaatttttgaggatttctaagtatatgaatttaatttttgaatattaagattttaatcattattgtggctgatattatttttgtttggcttcatctgccatttatatatatatgtcaatttaagttgattaatatttgtgtatatatatatatattgggataagattttgtcctgttattatatttttaggtatataatctggattgtattgtaactgctagattgagtcttgtcattaattaaattgttgttattaatttgtagagttagtaggctttagtatgagtattaatatatttattaaattggcaaccggttttgtaagattaataaaatattaattgtttggtactttttttaaaaaaaaaataaaaagatgacatgattgatgtcagactacttttaataacttgttaaattatattaattatattgta

SEQ ID NO: 4276 - DNA, 2711 bp, Cannabis sativa
agctgcattttattactaagaacaatatcatcttgttcagaaggaagactagcgtaaattgagtgagaagaatccgatactttaatgaaaaagccttgagttggccagagactcttctcgtcgagatcggccgggactatatcagtcacctgtaagagcgaattccggtgctcgctggtgggtttcgtccctgtgttcatcccattaaggagcttcaaaagaattcccggtgctaaagcagccatgataatcaaaacagagctgttagaagaaagataatcgaaaacaaaagaaaacccaaaacagatatcgaggattttgatcaagattcgagagaatcaagattcatgacgatcttggatcgaagattaacagtttctttccatagttggagatgaggaagtatgtggttgagctggggtttatttgcccagcggatatgggcaacggtcaattagtaagaggaaatctttttcttttttaaattttcgaacgttgcgtcaagtgcaacggtcatattctcgaaactgtgtcgtttcgtaatgagtttttgaattacattgcatttatttttatctaccagttggtttggctcctatttggtttgccttgtgacttaatttaacaaaaggctctattttgttggcttgttttggtaaatcatttattttttatattaatgcaaagacttttttttttaaaaaaaaatattgatttaaagacttggactcaagtaaattaattttgagttaattaaaaaaaaaaactaataataagaataaactaaaaatcatttattgcaaaggacgttaggaaaagtgatgttacattgattaatcaaagctaaaaaagataatcaaaaaattttatatttattaattaagtccactcttcaaaacagtaaagagagactttaattggaaccaaagtattccttttcttccttctttttacacttttttccagcatagtaaacacttcaatagaattagtaagatttaatcttgtagctcaaaaggaggctaaacttttttttttatctctaaaataattttgaaaatgaaaattcacaacaatggtgtatacacatatgtcttcaacatatttattattactaataatattaaacaaaattatttaaatagtatatttatttaataattataattaattattaaataaattaacatttaaatatatttattaattagactttcaaggtctcttaattaagaaattactataaattttctttttttctcaaatatatccttttttagtaaaatttataaataagatatagtcttacttagaatactacttgattaaataaatcaattaattgagattacaaaacaatattatctcaactagtttgggaccatgggtctatgtagccaatctcctaataagcagatcttgaaatttatcaagtaaatttcctaacttattaattcttcctcactccactatatattcggaattgtactcttgattacataaaacactctatataccaaatataattatgctataaattatccattgtttaaatcacaataattattgatcctctatcgacggtttacattgagtaaggacaaaattactgttttacctttcaatgtattttatcctttaaacacttagccacttgtaaatgatatatcgagaaactaatataattaccgaaatgagcattctatcatttatcgcgttaaaccaagctctaagaaaccatcattttacttctaaatagttatagaatgtccatatctatgattaatactcccactcaattgtattatcaagttcccaagatgtaagtattatgcctacatgtaatctgtaacgaacaagtcaaagaactcgtgcaatacatttaagttagagcttaaccatcgcaagattgagatcaaatgatttataatcaactaagtgtcattgacttaaaaaagatataatggcaagtttatgatatcttttctattgtcaatatcagtccataccgatgtatagtcgatacattgatactagtgtactaatgcccaataaaagacattccacttattcaagttgaataaaccttatcgctgatttatcacgtcaatgtaaatccagtatactgataaatcgtgatacttaataatttgaagcatataatcacaattacttttcactgtagtgacatcactgtaattataaataactatatgttcggaatttaataaaacttgtatattaaacatataatctgtattacacatgtgaacaaaacatatgataaagttaagatataatttttgatcgttattgaaagtaaataagattataataaaattaaattttatttagggcataaaatcttaacactatgattatgcaacaattcaattatatcattgtaagagaggtaagtcacatcatcatgccctataaattgaactgattttcctaaaagataccaatttactctcactcattatacactactctatacgtctattagttttctattagttcttaaaggtgatggagctagtgtgtacaaatcataccataaagcaaccatggagtgcagaaaggtttgtgataatataatccttggctatcattgtaaggtggtggccaaggttgttttaagttgttcagaaagactttgtttgaccctcactaaaaaacttatcaattgcagttgttgagaagatcac

SEQ ID NO: 4277 - DNA, 709 bp, Cannabis sativa
tgggagagtcgccatgatctctggcgagcctcacattggaggaaccaccaagaatgaattgaagcgctacgctgggggcctaaagcatgacgaagaggtatgggaggtcactcaactcccaactcagaggcccaggctcatggatcaacccattactttcacggaggaagatacgaagccaatgcatttccctcaccatgaccccctagtcataaaaactcccattgccaataaggtagtggctaggatactgatggataatggaagcttcatgaatctgttgtttaaagatgctttcacggccattgggctcacggatagggaccttttgcccagcggatcatagctcacgggattaaacgggacaactctcatcccgatggaaaagtgagacttcccgtcaccctgtgtcctgacaccccacaaagcaccttcaaatactgcacctttgttatggtggacttccccatcagccacaatgccatcctcggcaggccggctctagtcaattttggagcaattacctccattcgacacttgtgccttaaattccctactcaggaggccggagtaggaacagtgaggtggaaccaaggagaagcaagacaatgttacaaggctgtagtacatctatcagttctgatggtgcgaaggggcaaggatcccatggcagcaggacaagacgaattggatccccatattggatccg

SEQ ID NO: 4278 - DNA, 1553 bp, Cannabis sativa
  modified_base (110)..(119): a, c, t, g, unknown or other
aaaaaaaataatctttatttatttatttgtatacaataaaaaatacgatacaatatacatattgaaatttcatatactttactacgcataataataataataataataannnnnnnnnnaataataataataataaatgctatctatttgtatgttttaacaagaactattcgtaaattttatttttatttttgttttcttttaatcaagtgaggatggagaaagtaaagtgagaaaaaatagattggagtgagtttagggatacagtcgattttgtgatacaatatataccatgtcatataagaaactaattttttgatagattaattactaaaacagggtgaaatggacaattgtgtaaatgatactgcttctttactatagtcttagtgactgctaattataattgatctttgagttctacttggcatgatggttacaggagaatgtcgggggctgtagagaacattgtttaagaactaataaacttgatatggcactggaagagaattaggagaagaacattgtaggtgcatcatcttttggggaaaagtcattggtgggtagaattatttcttagcgagatattaatgaaaaattatttatgataatttttgggagaatgtggaagggaattgttgactggaatgttagtattttgaagaagaaggggagagttttgttgttgggattatgtataaaactaaaattgatgctaatacagtcttgggaaaacaaccatgggtcttcaatgggggaatacttctgcttgaagagtggtcgggctctggctaatggcgtgatgcgaagttggacaaggtttcttgttgggtgaaactgaaggggatccacatcacaactttcacaagaaacaatattaggtgcattggagagatggtcgggatgattgaagaattaaaatagggtaatgaacaacgaatgttactgaatgggtatgtttgaatgagaattagattttcgttgtgaaaaaacatttttattgaaagatatatcccaagtagagggaagcaacattggattcaaataaagtttgagagaatacctatgctctgtttcatttgtggaatttggggacatgaacaagaagattgcaatagtgaagtgaaaatgaaaagagcagataattgacagttggttctaaagtatggtccttggttgaaagaagatgacctaatgccaaattattttatgacatacaagcaggaaagaaggcaacaagaaagtaatgatgaaacagaagaaaaaaaaaccttaataatgcaagagaaattgatgccagtgctgaggacaacgaacagagcaatgatgaaatggtgggtagggaggaccatgatattgcaactctgatggtggtgaacacaatttcgataaaaaacaattagccttggggagaactaaggagtggaggaacatttattgagggattaactgatcgtggtagtggtggaggtctatagtcctttgggatggattctcacataggccttggaaaggaaatggctaaggacttaactaataggcccacctctgta

SEQ ID NO: 4279 - DNA, 3076 bp, Cannabis sativa
aatgctcaatattttgttcatagatttttcaatattaaaatatatatgtaaatgtatatatttttaaggaaatattacactatatataaatatttagttcaaagtatattattatttaaacaatatgaacatgttttgtttattttctacattagacattatgtgaacttatttttctaggtgaaactaataatatatggaggaagagtgtatggacacagatttggaaaaaaagaaaagtgaaagaatgttaaatatgcaaaaggagaacgatgaaggaaatgattcaggtgtaattaaagcacctaaatctggaatgcattttagttcatttaatgatctctatgagtactatagagaatatggaaaacaagaggggagggttttggaataaaaaagaaaacgacacgtgcttcagaagatagaaagataagatttttgacattgtcgtgttctcgagcaggaaaatctgaatcacacaagcaaaattttcttaatccaaatcctttaacaagagtggaatgtaaggctaggattaatggtaccattcttgaagatggaaaatgtaagattaattcggttatacttgagcataaccatggattgagtcctcaaaagtcacgattttatttgtgcaatagagagataagtattggtgctcaaagaaaacttgaattaaatgatcgagcgggtattagtgttgtaaagaattttcaatcattcgtggttgaagccggaggtcatgaaaatgttccattcttagagaaggattgtagaaatcttattgagaaagcaagacgattacgacttggggttggagatgctgaagcaattcataaatattttgttcaaatgcaatctaagaattcaagttttttctatatgatggatttggatgataagtcaagaatcaaaaatgtattttgggctgatgcaagaagtagagcaatgtatgaagaatttggtgatgtggttacatttgacactacatatttgacaaacaagtatgatatgccctttgcaccttttattggagtaaatcaccatggtcagtcaattttattagggtgtgggttgctatcaagtgagactactgaaacatttatttggttgtttaagacatggcttgcttgcatgtctggatgtgctccgaaggctataattactgaccaagctaaagcaatgaaaaatgcaattgaggttgtgtttccccaaagtcgacatcgttggtgtctttgacatataatgaaaaagattcctgagaagttaagtagctatcaattgtataagccaattaaaaaagtgctgaaaaattgtgtttataattctttgacgaaggaagaatttgaagtaacatgggattttttcatcaatgatttcaatcttcaggacaatgaatggttaaatagcttatatgaagaaagaaatcgttgggttcctgcttttgttaaagacacattttgggctggaatgtcaactactcaacgtagtgaaagtatgaatgcattttttgatggatatgtcaactcaaagacaacacttaagcaatttgttgaacaatatgatagtgctttgagggataagatggagaaggagaatcgagctgattttcaatcttttagcacaataattccatgtgtgactcattttgcaatagaaaagcaatttcacgcagcctatacaaatacaaagtttaaggaattccaaaaagagttaattgggaaaatttattgtgatgtttcttgtcttgatgaaagttctgggttattcaatatatgtgaggctgtattctttgaaggagtaagtagagaagtcaatttcaaagttcatttcaaccaagaaaattctgaagttcaatgtgcttgtcagttgtttgaattttcaggaattttatgcaagcatgcaatctcaattctcattagaatgggggtttcaaatgttccaatgaaatatattttatcaaggtggaaaaagaatataagaaaatgtcatacaaagattaaacttatttatgatgatctacatagcaatcctatatcacaacgatatcatgagctccaaaagaagtttgataaagtagcagaatgggctattgtttccgatgaaaagtttaaaagactttggaatgtgatacatgaatttgaaataaacttagctcaagatgaggttgattgtgtacctgatttcactatcactcaagactatccaactatgagctctcatgaagaaatgatcaatgaaagtaataaacctcgttctcctattgctgttagaagacatgggcgtccaccaaaaaatagaaaagttccaatggttgaaaagctaatcataaaggagaagaaagcaaagggtcaaaaactcaaaaacgaaagaaagaaagtaaaggtaacacatttatttattattgtcttaagaaataacatttatttcaaatcaaagcttatgtgatttatgaaattcttttcacaggatacaaacacggtacaaagttgtatgcataatgagaatattattggtacatttggtagaatgaacaagcaggtaagggtatatattatatgttgatttgtatattgacatgtcttctatttgattatttagtaatttgtataatttttctattaatccttttcagaatgaagaagtatccatgtcatgtgatttaactacaaggcaaattttagatttccaaccaaatttacaaactttacctttgccctactttcattgtccaccatcatataacttacaacatttcatcttccctaataatgcgtaccacgtacaaggtaaaagaaaaactctccatgcaagaattattattttcatgtataacataaatcttttattgtttatactatgttaacttagttttgttttcttttagaagaaactagaaactttttaaattctgcccaaacaagtagagatcatcaaatgtgaaaaggtaattttttttttagtgattaatagctttctactgttatatgcatgtcattaatatgcaatacttatggaaattattttttggcttcgagttcgcttgtaataatgtgagagattacggatccttctc

SEQ ID NO: 4280 - DNA, 607 bp, Cannabis sativa
gaaaataaggctttatcatcatactagctagctagttcccataggccatatggctgcacttaaaaactcattcaacttattatattaaatagttttttttaacaacttaaaaatagttaagccaataggatttcccattttctcatagctagtataaaaggtatatccaaaaagttcaatctgaaggcatctcaaattattgacaaaaagaaaatcatagacccccaaaacaagaaaaaaagaacaattatgaaagttgagaacaaaccgattgataattgttagagccatcaattaggtggaaatgatgagagtcttgagagaaaaagagaagtttaagaaactccatgacctcgtcagaagttttcgagagtttcaagagcttataataatgatattcctcctctgcacaattaaaatcgatttaacaaattacttttcaacaatacaatgttaattaagtcagtacagtacaatatacaattgcaccaaatgtatcccatgcacttctctataattactggaaatcaaattatatcgaaccaaaaataaagaatatgaaaaatacataaaactagctaaactacagtctacaacatacattttt

SEQ ID NO: 4281 - DNA, 1167 bp, Cannabis sativa
accaattccattacctgatctcttaaactcctttgacccaattttcacaggatcatagtgcctctgctgtttcctccacgcgacctgttgaagcgcgtacatcacctccgccaccgaaaagtattgctgcatatgaagaacagggttccaattacacctcctctgttgaatgcttccgataacgacgtcgtattcccctggctcacccacagctcgtaaatggtgacaaagtgagtcgatcatcgcgttagccgccgcgaattctccacgtaaccaagaaataaacccatcacgctcgtccggaaaccattgtctgtgtagctcggtgccggcgccggcgcctgttacggctccggcaccgttcggaaactgcattttgtccgatagtatcacatttcccgatggcattgccatgagaaaaccagtgaaccggaaaaaaaaaacagaattttcactactactaccactactactacaactaccaagaactataataaagcatactcagatccaaaattcaacaaaattcagtgggaacaaaaaaaaaatgaaagaaaagcgtaatggggtttgttttaaagtattcaaattttgtaccgatccgacgaaaattgagcaaattgatgggaattaaggaaccgggatcagaaattggaggttggtttgagagaattaagcagatctggaaaaaaggggtagtaccgtagtagaagtagtaatggtactggtaatggtgggggaaattagggggggctagtaggggaaggaaggaaggaagaaagggaaggactttgaatggtgccgtgaagatggggcgagtgattattaagatctagggtttggggtttggggtttggaattggaattgaaatatcaaatgaaattaaagattggaactttgtgtgtgtgagcgtgtgaaaatgtgagaattgtttgtagtgaagaaagaaaaagaaaaaaatggcttattgagcacgcatgtgtttctgtttttggctttggaggaggagagaaggacataagtgaaaggttttttttaagttaggggtatatttgtaatttcgatatttgagttgagtgtgtgtttttggaatattggaaatttttgtgcttacttgaggaggttaagggtcttagttatattgtcttgacttttttctttttttt

SEQ ID NO: 4282 - DNA, 1240 bp, Cannabis sativa
atatattttgataacttttagttgatttacttttgttgttttattaactaaacaaaagaaccattactccctacaataatacgaatataatttcataaattttactaagaaaaaaaaaggaaaaaagtgagattactaagatgtgtttttataaggtaaaatagaatactagactctaattagagtagggaggcagagaatatgaagaagaagagtatgaaatgggttttgttttttttttgtttgaccagaaaataggtatggaatggtatttttttagttgttgactgactgacttccgaaatagtccaaatctcctcagaatatattccatacacgttttctaccaattttgtttcactatctctaaaacggcatgcaaatttgtaaggaaaatttaacatcaattacttttataattttttaaataaaaataataataataattacaaaagctaaaaatacagcaagccaatagtacactcttaattaaaaagttcttcgggagattttatttttttcggtatttatttagtcatattatatgttattattatttataattatttgtaaattttttagtaaatttcaaataaattaagtaccaaaataacatttaaatattttattgcatatgttattatttttatttatacaagtggtaaaaatctatttgaattttattttaaacacggtaaactattaaaaatttttaaataattataacgtacatgttcgtataaaaaaattagactaaaaaaaaactctactaaaagataaataatttaaagtaaataccattttggacactgtattttgtaaaaggtactaattgtactttctgttttgttaaataacaaaataaaccctatatttttcaaaatggtaaaagtagttcattgagctcaattttaatataactaattttaacacgaacagatacagaaaatataaccagttttattataatatctctaaatcagattattattaagtttaattttaataaaaaaattagtccagggttctatttatacaattttagaaaatacatggtccattttattatttaacaaaacagaaaatctaatttataatttttacaaaacacaaggtcaaaattagtatttagtcaataatctatggaactcctttaagagttgtactacctatgtttcctaagtaatattatggatacaattttataattaatagttccagagttttttttttttttttt

SEQ ID NO: 4283 - DNA, 662 bp, Cannabis sativa
ttataaataattaattatatacgaattaattattaagttttattcaatggttggttgtgatcaattttatagtatttaataatattaatttttgtttctaaaatatattaattattgaaaattatttcagcttccacgagcacttttgtaaacaaaataaataaataaataaataaaattgaagcattacacaaaatacaaaaaggacataaccaactgaggagaaaacaatacaacaattatagtttattcaaaaaaaaaaaaaaatacaacaattatagtttagtaggtattttacaaattacaatcagtccaaataatatattacatattatgccaactcttttgtcaacgtttacataaaagtttctaggatgagcaaattttataatatttctaaaatatacgaattggacaatacaacttttcaaattgcgttttataattgtaaaaagaaagataaaatattcatatattcatttattatgttagttgccatttaaaaaatagtgactgctaatttagtattctgtatttttctttcaaaaaaaaaagtattttatattgtttataaatgtttaatattctgaactcaaatcaaaaataggtgtcaaaattacaaatttgtgatgtaacgtaacaattttgtaatagtagataac

SEQ ID NO: 4284 - DNA, 689 bp, Cannabis sativa
atatatatatctttcatagagaaaaagccaaaacagtttagtgtttatacttacaaatgattcatagaagtaggggctgtttcggcacatgttgcctagagcactgcaagtttttgaacgtacattgggatcttcatgagtaagaaattccttcaagtactgcaacacagaagctctgtcgatgtactcatagaatatctgaaacatacaaaaaaatctgaacttagagcattgaagttttgtttgttgcccttcgaatagaacctatagtgagattctgaaatacaactactgttttgggccatatctaaccttgtgcatacgagctaaatctgaaacaatcattagagcatctaatgtgacttcttttgggcatgaagaatcaagcaatcttctccacctatttggatccagtaaaccttttttcactagttcacgtgctagattcggggtgcgtatcattttagcaacaaaggcgacgggccttcccatatcttttagttccacatactccaaacaccgaagaattaaacttggcactccaacctgaaaataaagaagaaattaggcatagaagcataaaggttttctttcgtctaggacatgacagttggaatgtttcaaacttcaataaaacttcttatccaaaacactgaatgttgtagttagctaatacttaagatcctatg

SEQ ID NO: 4285 - DNA, 1369 bp, Cannabis sativa
gccaaaggaagtcccttacacttagcaacaattttttctccaacttctttgagatgcaagtaatcattggtgtcaacatcaattgaggcatgatttacaaataaagcccaactatcctcgtccgaaagtggctttagcttataaattgactcggttttcacaattgaagcaacttttgtgctacgtgttgtgacaataatcttgcttccttgcaatccagatttgaaacaacttctcaagacattccatttagtgcaatcttcatcccaaagatcatcaagaacaaacacaaacttcttgttactcagagtcatctttacttcattttgaaggtcatgcaattccttaatttcacatttcctagaagtgaccttctccacaattgacctcatcacattccacaagtcaagtggaccatctcccactgtaatccacactcgagtaccaaatcttcgatcgactctctcatctttgtagacaaattgagcaagagtagtctttccaacaccacccatccccacaatggggataacagaaaaagtaccaccactactactactactagccatgtcatcctgtagtagcaactcaagaatctcttctttgttagcattcctcccataaacttcgtcatcatccaacaaaggcgcccattctctttcaggaagcctcatccctttcaaatgctccaaacgatgttggtttacatctaaataaagattcaatttctcaagtatctcttccaactcgggttttatttcattattaaaagtagtagaataataagaagttaggatactactttcgagctcatttcgcaatgcttcagtctggatcttgtaaaccaagtcgtctgcattataaatgttgttcttgagatcatcaatccactgcctcaccttgtggtctgtgatgagcttcttctcagcctcaatgagcagtagatcagctgtggacatcttaactttcaactcctccatcagcctaagaatggcttcatcttttcctgtgaacaagtccaccatccctgaagccattgtaactaactgatcaaacacctgattaagggaagcagagacaagccctccaataaccaattcagcagccatgatcgcaaacgaatatactgcaaagattaattcataaaatgtgttagatttgaatgtatacagctcattaaaaaccagatcaagggatatttgataattattatgtagttttgttcaattataaagtgagggaatggaataaagctcagaaagcaaatcaaagggtatgtccaccaccacccatgaaaactcaccagtcaccacacaaaggaaagcagacacaatcggttcaggaacgaatttgaaatgcaaagagtgag

SEQ ID NO: 4286 - DNA, 1087 bp, Cannabis sativa
tcgaattttgtccccactgagatctatctaaggcagtgcatgcatgaggattgacatatatataccccggtgaagcacatagagaaggggacttttcttttaagacttttcctttaggatcttcaccttcagagggaattgattcttcatcacatcaagcaaaaatatatttgtaaccctgctattaactctagaatattcctactaagcttcttttgttttcaagaggaacacggtgaaaatgagtaaaagtttattgtattcatatttgtataaacaatcaccggtcgacgagcctaataaaatggacttgtagactaaggatagttaacgtttgaaccacgtaaaaatttcttgtttgttatttcattacatgtgccatcattactttcttaagctttaaaaatattcggttgctgaaaaactcgataaacatgtgtaataagaagtaccaaatgcaccctaagtgatataattttatattgatttatagaatacagaaaataattaaaaaattagaataataaacaaattacaatagagtaaagttacataaaaatccaaaactatagaattagaatcaacaataatttgaaaatcaaataaataaataaataaaaagagaaagatccatgatttgtagatatgttgtttaggatgatttttcaaaggttctaaagtttacatcttttgcaaaagataatattgtttgatattagattaattaactaaaaaaaaactccaaattgtagattctgttaaaagaaatggtgacaaatattgttcatagattcgatattggttattttattaattaatggaccataataatattctattaaaatctatgtgttgtgtgttacaattcctatagaatcacccttcaccaccttatttattatatttatttgacacttttattaaaattacaaaattatctttttccaaaaaataaaaaaagcaacaaacagtacttattttttattttggaaaagaaaataaaaccaacaattttttttcaactttaacatgcattaaaattgtatttgttgcattgaaagagaagagtgaaattaatatattaatt

SEQ ID NO: 4287 - DNA, 1213 bp, Cannabis sativa
agaaatgacatctttgaatggttgcggttgagtttaatgtttttgtctaatgcctatttcagtttttgaatgaagaattgaaaaaaattcaaaatgtgagtgagtaaatgaataacagtgtaaacaaagcaagggaattagaaggatactccttggggaattagttctcactagagcccattgagtctcgtaacatttaaaattaataaaccgaatggcttctaattgtctttttggacttcgggggcagttctgctctctgtcctgaattggcatttaaaatgccagagcgttgatctttatatttcttctccacacttgacatttgttttaagatctagttttagggtcatagaaaattatatcagtgagtgagtacagtcttaacatatcttttatatgcagcggtttccacggtatctacgatgttgagcattttatcaaggcactgaaatatgatgtgaacatcgtggaaagcattccagaaattaagaaaaatgggaaaaccaagaagataaaagctttacaggtataccataaacaattatttaaaatcttggagttctttgatagatattaactgttctgtttgactattcttttcatttttctgtttctttattgcctcagattcgcccccctagggatgcttctgttagttggtacactacagaggctctaaagaaaatgaaagaacacggtgctatctatcttactccattttctcatcgtttagcagaagaaattgacaacccagagtaccaacggttgcggtgcagagttaactatcatgctttaagatttaagccacaaattatgagattgagtcaatctattgttgataagctccggactcaaggtcatttcatgtctattcatcttcgttttgagatggatatgctggcatttgctgggtatgctctcatcaagttatcatattatatagagacaccacctctaatttatttgctctaaccgaattgtgtgcattttattttatatttttttgcttataaaacaagaaggttaacataggagttgggaaaaaacaattttcttgtcaacccttttctttttcactccagatatacttaataaaagtactttgtctgtcctagccgtagcactataggtaacatttttaggttttattgtagttgaagcaattcagtctttctcgatttgagagaaaaaggaattaccaagaaaagat

SEQ ID NO: 4288 - DNA, 500 bp, Cannabis sativa
gtgttaggcaccattgatacctttaacatttctctacgtgtgtatgtacaccaattaagtacatattaatgggaatttgagagtacaccaattaagtgggattgggttgtgtggatgtttgatatgataatgcggcgatgagtagttgagttttcgattaaaaatgatgatgacaatcgactttagtgcaatgcaagtgtaataatttagacagcatttgccattttctttttcttcctattctttttttaaatctaaagacatgtcggttcaggctctttttcattggacattttaaggagtagtagtagtttgaataaaaacacatctatagcaatagcaaataaaatatcatgattatttatttgatcctttttagaaaaatagtaattatgtacttttatgtatggtaggtcatctccttgcattgtcaccattagtggcacccaggtatagatccggcactaagtgaggcgagccaaatattattagtatatata

SEQ ID NO: 4289 - DNA, 570 bp, Cannabis sativa
aaacagttttcatattctttcaattgaagcatttatataatttcaaaaactcagattttccactatagtcaatatatattataattaatagcaactgttattattataataaattccctcaagctgacatgtcatctatatacatgaaaaaagtgtagcttattttagcttttgataaaacattgttaaatacacaaagatttaaatcatatatttgtttataaaaatattttaaaattaggagtgaaaatagtgatgaaatagacaaattttaaaataaatcgaataagatcacttctatttgaaaatagcaagaaaaaaatatgtttaacattaaattttaatgaagtaagctagatttaataataataaaagagtgtttcttacctactaacttttaatgagattttaattacaatatataatcttatagcattaagacatggaataaattatgagtttaatgtgttaatgccaacaggaatgtttctatgttaacaatgataaatatactaattagaacaaagaaacaattattctgttcatagattctaaaaaaaaaaaatacac

SEQ ID NO: 4290 - DNA, 539 bp, Cannabis sativa
gagagagagagagagagagagagatttggaatgaacgttattggatttttaaatttaaaatggtatccccaacagtttaaaaccatcgagtttcgaaatagagagagagtttgcacagttgggattttgaaattgaaattttgggttttatataataacgggtatccctaacaattttaaaatgtcgactatttattcccgacagcttaaaatcgtcgaggatacctattatacttgttttcaaaatttaaaattgtgactattttaaatagtcgagaactctaaatgaatgtttaaaactattaggaatacttcatttttcaattttaaaatcgtgactattttagacagtcagaaactctaaacgattatttaaaactatcgggaatatacttcactattgtctacaattttaaacagtcacgtaactttattagcgattgtcctcgaaaaaatttgatttgagaaccgtcgggaataagtgtttttatagtagtatctttctagatgttgtaatttatataaattttgatatttat

SEQ ID NO: 4291 - DNA, 806 bp, Cannabis sativa
gttgctacaaatatttatatatgtcaaagttgaaaagatcaacctatataattgataaagatgtagtagttacttatttaaaagaaaaccagcaaaaagttagttggatatttgagttgttcaaacatcaaacagtattaaagcactaacaaattattaagtctatagtctacactattaggaattgaattcaaaaagtgtaaagtctacatattaattagtgttattatataataatttgtattagttgaagaagaaaaacagatgaccctccaaaaaaacactatactataataagaaaatgtatattatgcaatgtttattggtatgtaattaattatcatttgatattaatttaaaatgcacactttcttggctttgtatatgtattgaacaaagagttgaagacgtagcagaaatagatcctatgatagtagaattggcatattaattaattaatcaaaccgtagtcaacttatgcaattcttttcttcttttctataataagtaaatgttaaatagtcttctataattatattaaatgatttcaaagggtaactaataatgtaagagcggggccccaattcaccaaagcttatcgcttaaatttattgaatttgaaataatgcccataggaaaatgaatatatactttttaattgttcttttttcttcttaaccacattttatcattttatctttgaccatgtaaaataagtaagctatataatcaaaaataacaacgatatttcaccatgacattgtcatgaacataatcgtaccaccaacttatatagaaaagttcca

SEQ ID NO: 4292 - DNA, 645 bp, Cannabis sativa
catatctcttgatgcttcttctagggcaaaaacaaaacgttcatacctgaaacattacataatatcattaaataccaagatcaaaagaccattttttgttcaaaatctgaacaacttaggacgtatagtgtaaatcaattataattacctttgttttaaacattcttcccaataccaaaatagtaagagggagttaccatctttagtctcaggtacatgattcaatggccgctgtaacagattcttaagctttcgatcaggcaataaactgaaacaagaagcatgcatggaatatcagtgaaaacgcattacatcatcaagtctatatgacgtcatccctaaaaaactaacatcttcggataggtttgttgggttgttttcttttctgtattgatttggataagcggtaggtgaattttcattttgtgattcaaattattcaattgaactagtttcattttcacacttcttcatcctcgcaaaccaaagcctataatggctcataaaaaaaagtgaatagagagcgagagatgatatattgaccttgaaacaaataactctttcagtgcttcgaaccctgttattgcgtgccgtttccccacttttgatgttaccattcctgcaagaaacaacttgttaaagcat

SEQ ID NO: 4293 - DNA, 1769 bp, Cannabis sativa
ttggtactaaattggagttgaaagcgcatttttcagtgtaatttagaatttgcaccgtgacggaggctaatggagccgtggcacaacctgacagagagttgttgtggtatattttcaacacgcaggtaacactcaggtaagtgagatcgttcccacgatgactgtagctaagtaacaatcaatcgaatttttgtttctatttgacaatcgaattgataaattttgaaactaaataagttaagcaaaaataaataaaacaaacaaatgaatgtgaaattagggatatgatttcaattgtatctatccattatggtctaccatgattcaattcttattaccaaattctatgcaatagtaggtttactccagtaatttatagtcttctcagatatataaatctattttattattaaaatgttaatagaaattgtttgacactttattttagttttaatgtaatttttttttccaattttttatgtgtatctatttcattcatacttaatttcttttcattgccaatcaccaattaaatattttatgattttaatgcaaaatctgagaagtaagtattgattatgctatagtgaaataaacacaaatttcgatataggacgagagttaatatatggtttgtgtaacattcatgatttttatgcttaatgcatcttatttattaaaatttatcacgagagtagaaagtttgcatataagttgagatttataagttctaacttgaatataaatttctttagtaaatctactatcacattagaattagaatttgagaattaaactatattaaactataggttgaggtctcttcatggtagacgttcaacttcttctaagcggttggtgtccgcgtgagactcttcgaatgccttcaagatgtctcttgaacatatgttgagcttggtcttctccgaattatggagaagcagtaagacctctggctcccggatggtggtatgctgcaggacaagtctccaggtagatttcaggcttagtcttttcccgaacctgtataacttctaagcgatcctgactaattaagggaacttaattagtgaacctttaacccggtgctactcacttttataccacgtgtcctttctctaaaaatatgaataacaattagtattaatgaattggtagttaaaataattaaagttattaatttcttgtttacaaaattaatttttatttcaccaaatagaaacaaagatctaaattttgttggtacttagctacagttcactattaccaaattgggtttttagtcgggtataatattccgtcagtcattaagagcgacgcctattcgattttcggaaaaattagatagaaatatgctaccgtggaaaaatatcgagaaagttttttatttgactgtacaaaattgttgccaatattttgtgttttacgaatggtcgtaccgtcctggtagtagtaaaatctgttactagtttttttttagtcatggagttgacatatactagttctaatttttgagtgattttttatttaataaaaataaaaatagtaacaaacataaacatataaaggaataataatttatttgactatttataggacgtcctgtttagattaatttaaacaaattcatgggaaagtaggttgaaagtttgttatcaagttatttgaaaaaaaaatcatattaaagctgacgattggtactatagtgcatttccaatgtaatgtatatacatattttaatttatttttcatacaagtaaattttaatg

SEQ ID NO: 4294 - DNA, 1036 bp, Cannabis sativa
acttatcccatttatttatagtgttattaataatttgacaaaaaactttgccaactgccaacaaccaaattaaattacattaaagatggttgatgaatgagataaggcattagggtatttaactttattattgctattgatctaattaaatattaaatcttatataatttaatgtaataatttttaaaaactatcactaactaatcgcgaaaagaaatatctaaaaatgcgagatgctctaataacaatattcatagaaaaatcaatatgttgaccatgtggttaacatttaaagttatgaataatgatacatgacaaatacttgtcattgcatataaatgccccttattacttgttgtgttttcagtggacatagaagttatgaattgtatcatcactacttttcagtggacgtagagttatgatcgtatcacggtgatgaggcatctatattgttatgaattatgatcgtatctttaagttttcatttcctatttatgtttatattgaaaaaaaaatatatagtgtcatccaaatataaatatggtatgtagatcatgttaagaggaagagatgtcaatcatttcttctgttgtgaatagtactgcgagcaaaaattttgacaatcttactgagcatatatatatatcaattaaaatttttctaaaatgaggctaggtttttgaattttgatgtagattataatttgagagttcattcgaattggataagtttttttgatatgattgtcttggttacttattaggactgagttaacatttatggcaagggatcagattatatataattttatcccaatttttaaaataggtgtgaaatacaatatataattttaaattttaaattttctattgataaaactaactaaattaatttaaaataataaaaaagtttttagggttttcccaagaatactctccaattaatgcatgcatgttgtgataagacttaataacaaatatgcctaatatttaaatgtttttttttaattgttattattagatcaactacgagt

SEQ ID NO: 4295 - DNA, 736 bp, Cannabis sativa
aagaaactcgaaattattactaacctctgagagcacaacctaaggccagactcaagctggtattggtgaaagtttttttcatttaagacatgtttccagcaagaaaaatgttttacctgctggtagacatggcagatacaaggctgttaaactgtataatagtttgttgtagaaaactcatgtgaactacaaacaagcaatgtggtgtagatttagtattctgaaacatagatttgtgctctagtatcttgtcaactcccatttgcttagtacggatcttcttctcgatcctgcatccctattaattctataatctgtccaatttgtggtatcctagatgagagtcatatttatatttttattaaatgtacatttatctcaaagagtggtcggcttgttattcaacttattgggattcagagcttggcctttagatttcagcagctagatcaccttgtggataaacaagaatagatgtatttattttgacagtttctctcactcatattgtacatagtgaaagaaatcaagataattcttacaatgtaaattacagaaatttaaatgtacaaaagcaaagattagttattcgattgatgtgtatgaggtaaaggttgtccattttttttgaggttgctgtaagtagcttgtttttgttttagtgtgtttctaagctagcagggccgattcaaggtgggaaggcccccaccaaggcccaaaaaatcctttaataaaa

SEQ ID NO: 4296 - DNA, 707 bp, Cannabis sativa
aatggtggtggtattgttgttgtacatgtagttgttgttgttgctgcttaaaatagagtaccctcagcctattcacttctgctttattcttctcgaattccactgaacattataattaatattatcaagagagtaatattattattattatcatattaagcaagtgaaatattatataaatatgtatatataatataccttgtccaagtaattcttgatttgtatatacagatatctgatgagtcaacttagtatgctccaattgtaaaaattgatgctcttttgtgtacaatgcaactcgaggagatagcgatgatatttggctctacatttatattaattttttttcattaaattataatatatatatctttttatctcatatgtacatatacataaagctaatcaaatagcatatatatttgattagtgtatatggttcgaagatatcttaggagcaagaagaaataaaaattatcactgcaaaatttttcgtgcttatctttggaaagacggtgagatgctaaatggccctaaccgtgtggcttggtaagaaatttgtagtaataaaaaagtgggatgtcttggtgtcaaagatattacattatggaatctttgtgtcacaagcaaacatgtttgggctatcactaagaataaggataacttttggattaagtgaattaactctatttacttaaaaaaagatg

SEQ ID NO: 4297 - DNA, 1126 bp, Cannabis sativa
actttgctagactgaaaagttcttcaaactagcacagcaaataaaattactagggaaaaacaaaactacggtgattatagcttaagtagtcctgctcatttcttaagataatcaaacataacataaacagaagtagaagtagcaggagaagaacagaccgtaatgcaatcgacaaagaatccagaatgccaatcctccaccaacgctgaaaagtccagcagtgtgtctcatcaacctagaacaaggttttgcatctgacctcatcagctcgccatccgaaaaccccaataatctcctcaacgccatctgtgtatcactgttatcatcagttttgattttgaattactgtgtccatgatatgaatgagtatccagaaaggtatccatataacttttattgttttttaagtgttgggttttaaaattataagcaaaaatagaggataaaagggtgctcatagtctaaaacacaaaatatttaactacaaagtgagttatagtcgaaaaaaacaaatacaggatcatgaaaaactcattcattttttcatttcctttttccctttaaattatttaatcaaacacttcaattacattcaagttttttctttgagtaatttaatcaaacacttctactacattatacattattaacagtaaaacaatcatccacaattccacattgtcagtcagttttgtctttgagtcatttaatcaaacacctcaactacaataaacaacagatactcgataaccaatctatacaaagccaaatgaattcataaaattgagcaataccaataaacgcagtccaaaaacagaagtaattataatatcaatacatccacattcaggaatgaggagagtataccaaataggtggagagagaaataccgaagaggaggaaccgctaatattggttgattctaagcttcttcttcttcttgcagctctaattatacagctacgctattcatattctgttcctttttcttttttcttgaaaaataggtcaacaaaattgattaattatggttgaatttaattgatatctaaatccaacactgcacgaaatattatacaattattatttaatttgcgttataaatataaatttctattgtaaataa

SEQ ID NO: 4298 - DNA, 1325 bp, Cannabis sativa
aagggttggtgagaatctttttgttataacacagaaaatgatatcaaggctagaaattacagaagttgtaagattctatgcactctgacgtgtttgcatcccataagcgaacttcatgatccaaactcccactggcaagaatttctggacacgatgggtggaacctaacctgtaaaaaccctattactattagcaaccgaagatgaacaagataccctattagcaactaaagtgtttgacattctatcaactaaattgcacaattatcaaaatgttaaaacctaatgacataaactacaggcactatttcagtcatttaccaacctaccgacagcactaactaacactaacagcccgaaaataataataaagcatagaaatcggcaattataagccacattgcacaaataaaacttaccacccatggcgtcctcctatgaccacttagaacttttacacagctaccagtttggcaatcaactatctttacagtgtggtcaccactgcaatcatgaagcaagttaaattagaaacaagttgaattgtcttaagaacctaaaacagaattttttcaacagaaatttactgtgtggaagctagagttcttccgtcagggctaaatgctgctgcgatagttgacctcggtggaggcactaaagggcaatatttggctgataaatgccgaagagattcggcttcaaccctaacaacaacacataacacatgagattgttcaatacgcaaaacagatattacaagaattgatctcaaatgaaatgccccaataaataaataaagaaaaacattgaataccatgagaggagaccacgcttagaatctcttgctgtttcactttgagacccagagggagatcccactttctttctagaagcttctccccaattccttctcggaatatgctttgttctaggagaaatttctctccttgctatcaagctaaaaacatttcttccactaacaaaagatgaaaacttcaataatcagaactgagctttctatataaccagtcaacccaagttcatagaaaatgaacacaaaacttaccaaaacaaagtagctaaatcctataaaaaatagatatttaactcaaattcagcataaatgaagataaccaaacacatcataagatctaagctttaaagttagttgtttcaagaaaacaacccaaaaaaaaatctccagttcataagcaacttcttaattacaaatcaagctaaaaactctcaaaaacacccttgaaagcttttacagtcgaaatttcaagccatagtaatcgaattacaaaacctaaagaaaaccccaga

SEQ ID NO: 4299 - DNA, 909 bp, Cannabis sativa
tatatatatatatataatacacacatgtatcagtcactcaattgcgaagtagatttctgggaaatgtagcatgcagtagtgaaaaatggctaggtgtcaccgaaacgatgtgggttctttgattctcgaccgacccgccgccgcaccagtttcctccggcggacaacacttccggttatggtctacattttcagcagcctcattccgaagaaaaatatttgacgctgtcagttgcggtggtagctctcgctatcgtcaccacaacgatgagcatgaagcttctccgattaaggagagtgaacgatcagtggtcgttgagagctcgaaatcggagaaggtagtggtggtggagaaagctaaggtgaagagtaaaggtagtaatgggaaatcagagaagttattggatcttctcaacttggctgagtggtcggagagtgaagctgacgctgctacgacgaagaagaaagttgatgcgttggagaaactgaagcgcgtggttagggatttgcaggttgagaggaaattagaagcggcgcgtgaagttaggttgcttgcgaaggaagatttggaagcgagagggactcttgctatgcttggagcgatccctccacttgttggaatgctcgatttcgaagacgatgatactcagatcgcttctctctatgctttgctcaatcttggaatcggaaacgacgtgtgagtttttgcagttttcattgttttgggaaatttctgttttcgttttcatgcacattccatgttttgttgttttctgtttgtgtttttgctgttatttttctttctttgaatttagattcattgtatgttatgtgtcaatcgattttcaatcttagtaattttattcagatatttcagtttcattgtttttgttattttctgtttgggggg

SEQ ID NO: 4300 - DNA, 808 bp, Cannabis sativa
aaaatttaaggaatttaattatgagaagttcactcagactccactgtcttcggtacacatttactaccttttccttttgtctactaactaagtaataattacggatactctaatatgggcgttcaatttttgcagtcacctatgaaattaaatttacttgaggaagattccagaataagcaccacagaattaaaggagaaaatagttaaaggtgaagcatatgtattggttgacgttcgtccagaacaccatttcaagattgtttctcttcctgggtccttgaacatccctctccgaagtttggaggctaggcttcctgaaatctcttcagctttagaggaagagagtaataaagcagggtctggttcaggtgcccaattatatgtaatgtgtagacgaggtaatgattctcagagggctgttcagtcccttcacaaattgggtttcacttcagccaaggatatccttgggggactagagggttgggccagggatgtggatccaaacttgcctatgtattagcagatttacttcttcttggtacttcttaattgatgaacaatgtagacttgaaagactaatatatttatatgttttttttggctacatattttgttaattatgaactaactatagttttggtatgtaatttattttatgcatctgcacatgctctcatcatattaaaaaaaagcttctatagaatgatatttttattgcttctgatagttatagtttaaagtaccaagaagcttaaatttattaatcctatagcatcactttaacttgagcaaaaactcacagttaa

SEQ ID NO: 4301 - DNA, 568 bp, Cannabis sativa
aaaataaattacacttaatatacatgcatcttaatttacacatttatgtcaatttcaaatagggctgctccttttgaatcaaaaggaaaaacaaccacatcatatgctattcctttgaaaacaacaacaacaacaacattgtaatctttacataaagtaaaaataaaaaacaaatatttgggataaaagtatttagattattatctttgttacacttaattatgtaaattatttttaactgtgacaacaaaaatcatgtctagggtttccactccaaagcattaacaaatttaaagaaaataatatgtaaatgttttaggtttccaattgctcactcacacccttaagacaccaaaagtttaagatgtccaaatactatatgatatattaaattcaaattattaatagcaattttttttgataaataaattagtaacaaagttacatactcaaataaaatattaaaaaaaactcaatattaaattatcaacggagttgttcttagtcttttaatagcgtatttggtataaacggaatcaatggattcacaatcagaaacttcttgata

SEQ ID NO: 4302 - DNA, 1601 bp, Cannabis sativa
tatatattaatttgaggtgggttactggttagtgtaaaaagctttgccttcattgaagattaataccaaagcattgtgcaatacacgtgatgagtttggtgccaaatgacactttccattagatacaccgacacattcaaaatacattgttaataattaagtgtactaacaataaatgcaattttctaaatcttgtgtgagtgatctattgtaattttttatctcatgtaagaaaatattatataacaagggaaaaagttgttagatatatagagcattgttattaggtttcaattctgcttagtatctaaagtacatatgttgtattgtgattaactagtgatattctctaaaagttattatattaaacgaaattcaatatttaattggaccaataacaatatttatatataagaaagtgctaaacagtactaatactcattaacatttctctctctcatatatatatatatattggtgatcatgtggctgttgattaataacttaactgatagtttcttcttattacaccatcaatttttaatgaaagatgtaaaacatttattatatataattttttttttttaaatatagctcatttaacaaaaaaatgtactctaataccaaaaagtgatgtaaatttgttacatagcaaattttatgtcaaatttggcacaacatttactatgatgtaaaatttacatcacaataaatgcactacttttttatttacatttatattatttgtatattttattagtatagttaactataacattaaattatgaagcatttatattattattttattatctttctatattaaaataataataaaattgataataaagttattagttttattttttttaataaaaatatttattagatattaaatttaacatcaaaattttacaattgtgcattggagcacaatgctaaaacttgatgtaaatctaccacaaaattactttttgtgccaaataaagcacaatttttacatcttccattggagatgttctaacatataacagtaaaattatataggatttttttcatgtatatattaaaatggcaaaaatattacacaaatacattaggcaggccctataaacatttatacagctcagcaaatttttttttatagaaatacctcttgctctaaccattcagccgcacgaaccaccttctttaacagcgacatcttccactaataaactagcaggccaactgaaaaaaactaagcgagacggagaatcaccacaaattctagcgacttcacatgacaaaaatactgtaagaaatccaagcacctacaatttagatttatacaaaatcgggcagaaaagctggttcgaaactaaattcaaccctagattatgattaaaatcgtaaaaaactaatcctcataatatcaattttcagattcaaaaaatatagggctgagcatcggtcggtttggtcagttttttttctatataaaaatccagaaatcggttttcggtctagattggtgcaatccaaaaaacgaccgaccaatccagacctgtcttaaaatcgaacgttttgaacatcgggttggtcagtttaaactgcccaaa

SEQ ID NO: 4303 - DNA, 2654 bp, Cannabis sativa
tttgagaatgtcacgtggataactgcagtcattagatgtattaagtcgttgaaagatcttggagagagcttagttgttacagcagaactagcaacattgggttaaccccattcactaagcacaagctttgtaattcaaagctgatcgttatttattcatttaccaaataaaatactacaacaaattcattttaaagcacagttgtaaaaatacacttgactctgcattctatgaagaacaaatcacaataattatttcaaattccaaaccatacaaaagtttaaaagttcctttcatgttccattgtcattaccactacattcattcattacaaccaaacgacacctacagatgcgctccaggcccccttttttcacatatttaactggattacttagagaatcaaatgccaggaatcgatacaccgttttcataacagtgaaaattcagtaactggctacaagttacaagctacaaagctagtctacaggctactgactaatgctatgaaataccttatgctttttaccagtaaattcaagccgagctagaaactgcttcctgacgaccttctgattcatctactgttgatatttcatccaaaaaactaggagacttcggggtcagtcccagcaccttgaacatgagttgatcagcatcaaaatcattgtttggggtagtcaacaacttctcacccgtgaaaattgaatttgctccagccaaaaaacataatgcctgctcaggcatggagaatcgaactctaccagctgacagcctcaccattgcttttggcataacaatacgagcagtggcaatcatccgaatcatctcccatatttcaaccggctagattatagaaatatgaattctgttaaacctcttaaatcatgaaaagacaacacgtgtatcacaatttaaattaaatgaacaacactcccccctactattgtctaatttgtcttcatattgtgaaaaactgtgtaaagaaatatacggtgcacattaagaaacaaatagtacaaaaccctctaatgacagataccaaccaggcatttatgctaattaatttgcaaaagcagcaacaccttgatgctaagctggaatatatgtactatatatagataaatatatatactgtacttctttaccttttgttcttgaagaggtgtgcctttcactgcaagtaatgcattgatgggaacactctctggatgtgtgggtagtgttgccaaagtatgtaataaaccgactcgatcctcctctgcctctccaaggcctattattcctcctgataatgcaaaagagaactatcatcacacattcagaagaatatcgttcacttttcttcctcattttctttgaggacttggggatgtatttgacaattgaacgttataagaataaaaatatgaaaccaataatcataaagaaaaggaagggggaatcagatcaatttcgatccattaaacactgaacaaaattacttttttgtgcttgaatcagcagtgggacttgaagaaggggaaatcagatttctttttcatttttcatgtccagatgatacaaaaaattcaacatttgcaattaaaataccaatgattacttattttagtaaatcaacattcaaaatcagttgaaccataaagaagatataatttaacgaatttcatttcgtattctttttcttacagggaacagcttgcacaacagagaccactaaaatgagaagaatggatgggatcatgatacgtaagtcaaattttgtaacaagagtaacagccaagactacagcatgttcctggtgcaagattgagctccaagcaattctagatgttttcatatatcttttataagatgatagttaagcaacgtcaagaacaaaagttccaagagcccagcatacaaaaatttgttgcaaaaagcttttctgaccaacttcattcagcagtagaatcatatttactaggatttcttacctgagcaaacattaatccctgcatcccggacatactgaagggtttgaaggcggtcatcataggttcttgttgtaataatgttcgggtaatattcccttgatgtatcaagattgtggttataagctgtgaggcctgccttcttgagtgcttcagcttgctgtttctctatcatacccaaagtgcagcatacttccatccccatattcctgcataacataacaattatccactataactaaccataaatcagaaggtggtgttttcagatgcattggggttttgtttttcactcttttaattaatgaatttacaatgaaatggtatttgcaactactttggtctagctcaagtacttgggtcggtgagtgtatatgtgtgatgatacagtattcaagttcccacaactgtatcttataatatatttatatatatatatataaatatatattatacatatggggtatgataaatagtttttggccaaaaggtgtcactgtaattttgatataacaaagagggtgcaaaactcaaataaattaaagtcattggtatagtccagaacgccaacctttcaacaaaacttatactaagctacaacactacacttctgcagtataatgttagtatggcattggttggtagtacataactcttcgggcatcttcctctcatacgtta

SEQ ID NO: 4304 - DNA, 1432 bp, Cannabis sativa
cccccattggcaacagacataagagcagtaaaagtgggactaggggacttgaatctgaggatttaaggagatagtaggaaatgtagcaataaggaaagtttctaggtcagtgttgaggtttgggttgtgtgagatgatagaaaaagaccagcagtgtcagtgtaatctcctacattatgttgaaaggagaagtcctgttgtaggtcttggccacaggggtggttaacattgaccatattgttgacaataagatttggtagatgaactatctgggatggagagggtgaaatagactggttacgaggttggtttggtatcaacagggggccaaaagggttaacattggggcgaacagttcctcttaagacatttttataaaggagaggtggtggtaggcttgactcgttagaggctctcctatactcggtgtaaccaatataggagtgccctaggcagccacaatggtaacagtggtcaggaatgtcttcatatttcaagtctagccaagtaggtgaggccatgccagggaaaaggataggaatgcctcgagggaggggtttggtaacattgaacataatttgaactctaaggtaagaccccccaagtctccaacagggaaggtagatggattttcaaaagagtgccaatcatttggccaactagtctagcaagggagacagacctacaagaaaaaggtatgttgtggatttagacccaaaaagaaattttcctcatagaatcaggggtaaggacagtatcagggttagggatttcgagtaagacagggcatttatcaaaaacccaatgttgattaaaaatgcctttgtgtctatctctatcaaagtggaacgtagccaaataaatgtttgaattggtgctctttcctcgacactaacaggaaaacgcccttccagtattttttgagaaaattcttcaaggcattatggttaaacaattttatgttctatagagtggccagtaggtgaaactggggtggggctggtggaagtccctcatttggtcagcatgatcagcgagagagtggatagtgttttcaatttcagtgaggtggagggtcgcagaaaaagaacgagctaagtcttccatatttaacaaaatagaatttaaaaagaaggcaatacgtttaaaagaacacgggatgaacaaaaatatatgcaggacaatacttaaatatgaaaaatatgaacaatagtaaaaagaggagaagtaaaggctctgacatctcgaagtatactcgagtaccaaagatgaaaaaaaaaagagtgtaattaatgaccaaatcaggcgggggattatccaaatctagctcatgattaggtaagtagacacaacaattaaacctagaaaccctattaagatctgaaaggacgttcgtaattaaatgccaatagggttcattaagagatgtgtt

SEQ ID NO: 4305 - DNA, 1789 bp, Cannabis sativa
tatagccaataataattaagttatgatataattatcatattattaatgtcaacgattaatttatgattatttctaaaataaattaaaagaattgttataatgaaaagaaaaagttatgcatcaatttagtgtagatccaaaatctaacatcatcaaatttacggttttggttgctctgatagtttttatgtaggtcactatatggattttagttataatttaagttgttccgttagttgttatatggatttttacatgcaattctataaaaatacaaaaaacaactaatttaaagtgtaaaaataaaaaaacttcattattatttttatttatgttgttctttttagttttataatttagtgttatgttgtttttattttatttaatattagtatttttatgtacagtattattgttattttgtattttcaaatatattagtgttttaaattaattattatttttgtgataaattttaatttgaaaactaaactataagattatttttttaaaagaaaattacgctaaattgatatagattcaaaatataacacaattaataaggtagaattttaatgtatcatttgagtgggaagatgcaaaaattctacacaactttataaatagtgcatcattgaaaatattctaatagtgtgaaattgatgtacactcatttaatataatttagtgtctctttaaaataaaatagtataaagattctacataaatttaataaattggtgtactttcaatgctctaaatgattatagagtagaacgagttttcaataaacaaaataagaaaatatccttaacatatttatgtaaacttaattacaatagttgagtagagacctattttattaatgattattttcaggtacgtcaaaaacccatcaagaaataagaatgaaaatagattaaatcatttttttttcttcttataaactagaataaaacattttaatagtaggatcaataaataaaagaaatgaaaaaggtaatataattacaaaaattaactcaaatatagcagtaactcatttctttttaatccaagtttaacataaaatttacaacatctacataacttttattctttaaaatatataattcatatctttatttgtatgaaagtggtgacatatatataaattaataacctaggtaaagcagttaatgattgatccaataaataatataacattatagaccagtgcatcatatcataagcatattattttgataattaattagctagttttgagtagctgatacttctaaatctaataatcacatcattttcttttcatttcttttttcgtgaccaacccaatatcacttgatgtgactaaaaattaatacaattccatgcttattgaaggtaatgacaaagtcactaaatataataatagctaatgccgcatccatctttaatttaatttattattgttttttgtttctggaatatgcatatcctttatccttgttttctgaacaaatttttaatttcagctaatatagactagacaaaaaatatcttagatactttgggccatcaaatatgtattttcaatatatttcataaaaacaaaaagcctaaatctccatgataacactttataattattaaatcacctaagcattccatcttttcccacttaagaaaaaagatgcttagttagaagcatgagagcacgaattatatgttttgtaacacaaaattgttacaaacaaaataacataaagtgatcttgatggaggatattttattttgggttttttttttt

SEQ ID NO: 4306 - DNA, 587 bp, Cannabis sativa
ttgttattatagggccattttcataactactcaagcaagcgtgcatgaatcaaatcattaattaagttactatatataattgatgagacattagaggtgtgtaaattgtctaaccaagattgtaattacaaagtataattataattatatattctcaaccaagaataataagtcaaaaagaaaaagaaaaagataaattaaaatgaaaatctaacatatttatttttatttgttattgcataaaaaaaataatgaattattatggaacacctctagtttgaggctgaatcccattggcatgattttgtcccactgagattttgattttattagaatgaattattgttgacctcaacttcaataatttatacttttaaactctacttataattatcaacctcatcttgtcaatataattaggttcataatcaatcacatcatcatcatcatcatcatcatcatcatcatcatattaatgcaatttttaatagaaccaagtgtagtggagtaataggttgtgagcttgtgactcgtggcttatgatgtcataaataataaaatcgtggcaacatgactttttttttttt

SEQ ID NO: 4307 - DNA, 796 bp, Cannabis sativa
tttgtaactttctccacgtcattgcccagaatgctatagcattttggcaccatttccccctaggttttagcttcaatatttatttttgcctcgcaccatgttctttcctgtggcacttcaaccttcctttactaaacaacaaacaagtaatattttagttaaattagtacaactagactaacaattcacaatactcaaaagctaacatactaaacaaatcaaactatcacacttttattactattttcatgataaattaagcttaaagccaataaaataactttataccatagttatcagaatccctaaaataggtaaccctcttataaccttcaagtcatatagagatattctcatctcactgctactatgatgaaatgtgttagacaaaggaccccaaagttgagcaccataaatccttgcctgatttaaaatatctcgatttgtatgcaaaataaggtctgtccattcgataagatatgtcataaattcagcatgtccataaaagaaaattactattggtatttttctctgctaaaacacgatgaaggcttggatgaaagttcgcagctacttggtaaactagatcagcattccttttattgtcaacatccccaagaactttagcttggaaatagggatcgaagcctcgggtgtgctggacaatattatcatcaagtgaaaaatgatattttaagtcacccacaattacatcttcaatcttaaatgaagaacagggccttgatgatcattggatgcttgaactacatttaatgaaatgaagcgccgataagat

SEQ ID NO: 4308 - DNA, 1575 bp, Cannabis sativa
acgtattattacgtaccaataatcccaaatacgtaaggagtatctggattgagctctggaggtgtttcgaaccaaaattctcttgctacatcaccactcccaattttgtagtagtacttagtgttatgctaaacatgcaaaaccaaacccataagtatatataaaggaggttttaatgcttaccttaaatattttacatttatttttaagcattaaatcactatattgaataattataattaatttaaaaattaataaaataaaataaatattaaataacttgtaacttatactttattttcgtataaaatttaattaaaactaattatatttaaagttaaattactaataattattaattaattttatataatttattactaagaagactttttaattaatttttttaaacttaaataattaaaatatttgtaacaaaattttttataatttaaagttattacacacataactttaattaataaaaaatagcaaaaataacctctaattacaggcaattttacacttaatattattttcaatacttttaagtgccaaatcagtgcttaagtctaaaattagttcaagttatttcatttttttaatagtttaaaatgtaataagaattataaaattaaatattagttaactacttttgctcttcgttacatttatcttcatcaatttagggcttgcaaaaaataaaatttctaaaatagttatcaattaattaatattattgtttctatttcacaaataagcataccatttagatttttgaaattggaggttttttttataaggaataaaatgggtcaagaggttattgcaaaaaaataattaaatatcattttttttaaaaaaaaataataattattcaaaatttattttaaaagaggtggaagtctaatttttataataaaaaatataattttattataaatatattatgatgatatggtttaattgttaaaaaaaatataataaggacttaaatataaaaatatttataaatattaattgctaaaaatagtcttcttaaatatttaaactaaaaactaattatttaaactaaaaatagtaatatggatcctccgtataatattatccttttagggctcatttggtacgccgtacaagggtcatattatattaaataataaataatactatgtttggatacaacaatgtattgtattaattattacgaccaaattttgaatacaatgtatgttgtattatttaatacataataaatggtctgcagtaccttgtattataatatttacaaagagtttggggttaacaccaatccgacccggaccccgactcggacccgaacccaggaccctggacccgagcccgggcccgggcccgaacctgggacccagacccagaccccggacctgggacccagacccagatcccggacctggactcggactcggacccgaacccgaacccgtgaccccgacctggaccccgaccccgacctggacccagacctcgaccccgacccgaactcgtgacctcgacctggacccgaacccgtgacccggaccccgaccccgaccc

SEQ ID NO: 4309 - DNA, 840 bp, Cannabis sativa
aaataataaaaatgttggcttcaatgttgggtttaaatcctaaatatattatgtaattaattaaagtatatattttttatttccgttttttagggggagtgattgtatactgtattaagcatttattttttgtttaggctaaattgacgtcatattagtgctatattaataatattttgcagcgattttataaattcagcataaacttttgtaatagggaaaaatttggagagcaaaattatacaaggattataattaggaaaataaatcctatttattcacgcatatgtatagtttcacgcttataatttcttcatcaagctacctataataacatgtatgtacatgtatatattccgtacgtagaagtagatacaactgcactcagataattattttcactcgtcaactaaagaactatatgtatacaacatgcatatatatatatatatatgatatatgggtaattaattaatgtatatatagcagtacggatcaactactttatcatagagtgtataattagtcgctaacgtatatatactatttattataaaagtggtaacatttttctctggagaaaagactaatttaattgtaaaatgagaggaaaaagaattaaaaagctcaaaacatggagatatatatatatatatatatatatatttatatagatgtcatgtacacattactatagtacacatacatgaggtaacaaaaatacatgatcgattctgagaatattaattctgcccaatattattgttgatcatatacacatataatgaaaggaaatgcaggagcatcacttacaacgcaatataattagtacctaattat

SEQ ID NO: 4310 - DNA, 804 bp, Cannabis sativa
aaataaaaataaaatacacttaataaattatttcacttgggatgacaatcataacaaatgtttgtagaaattatgttgagaatgtctgctattccaccatatctttagacttgtttttagagtatatttcacgatatggaaatgaatcaaaattcatggagattcgatccattttttgaaacagaaaatgaagaaccaggttctcttttttattttatcaactactacttattcttaattactatgatatgtgccctgtattttctttgtagttctctttcaagttttcaactttgattcccctctaaattagtttgccttttcaattggtgctattactattttatactttattttaacgggagaaaaaggagtgatttcttttttaaaaataaataataaataaataatgcagattgttccaagaatacaaaccagacttttttgttgttgctgttgttgttgtttttgagtagtgtttatttatatatatatatatatatatatattaacataaaatctgctcaccatgatttgttaacttcatccattgctcttcacattaccgagtacaagttaatgccgattgcttttttttttttttttttgtctacttgattgataaagtgacaatcacaaacaagagaacctgaaatttttaagaaagatcaaagtctggatttcctttagatgggttattttctaattgagaaaatccagaaacttgatttgagattttactggtacatatgactgaggctgctaatcttggataatttcattgaacttgttgttgttgttgtt

SEQ ID NO: 4311 - DNA, 746 bp, Cannabis sativa
attatacatttttttattatatattgttttttaaatgaaaatctttcattcatttcaaagattacgtaggattaaacaagtcaaatcttaaaacttaatttacacaaaaaggattaattccaatttacatagcactagagggagtgttaaaattttggaataatatttaatatttttttaatttcatataaatataatttttagattggataccaaatatttattaattgtatagatatattataaggagtaagtagtgcttatctaaaaataagagcatcgtgttcccaataatattttgtatctatatcctttttcggaatgcaagtaagagagagaaaataagtattgagaaatgtacaaatagacgaggtgtacggtaattttaagatcacagaaaaatttcatatattatatgttaattgagaataaatttttgtattaactttaagaaaaattgtaaagagcgtcattttgttcaacaccttatattattagtagaaatgacatcttactaaattacatcaataatattatttttagtcttaatgatttatttttaatgtttgagattgagtcgccataccctaacttatttggtgggggacagagctaaacaatagatgttaccaaataataatagtatcaatgttaatgtagatgtaacattgtttaatgatggccgtagttatggtcttggtattataactcgtgaattcaatattgtttccttattagcgggtgca

SEQ ID NO: 4312 - DNA, 1477 bp, Cannabis sativa
gggggggggggagagagagtgtgtggcagaagagagagaaagtgtagaagaaacagagaaaactctaaacctaaatgtctcttttatatgttcagttataaaaataaataaataaatatataaataatgaaaatatacccaagaatctgtgatagaaaacactattaaaagttttaggatgtgtttggcaacataccaaataaccatggtggaaatattgttttttaaggtccaaccatatagggccccttgttccaattacaaaagggtgttaaaaggtttctagaagatattgtatccctttttgtttttctaagtataaaaatggggacaaaatgtctcttttttttgtagtgaaaatgatgtaaccaaaattttgaaagacaaataaagcatgtcactactatttcttccaagtacctactactatttcctctgcttgactggatcaaactgaattgtgatattagagtaggaatggaggctatgtgtattgctaatgttgttagagatcacaaggggaagttttgttggccattcacatcaagacttgattttatagatatgttgtgtagcaaggcggctgcttgttgttttgccttagagaaggcattagagaaggggtaccattttgttattgtcgaaagtgactctcgagtggtgattaattctcttaatggagtggagtctagatgagaaattaaaaactactcaagacacagtttaagtacttcttctttatttacgggttgtattttttattattgttgctcggtcttgcaattatcttgtcgataatatggctaagtggaattttacccacaatcagtatggttatttggataattccaaattaccttaggacctattttgtaatgacctagttggtctaacttgcttattaatacgctttttcttcaaaaaaaaaaaaatatacataaaaactaatctcaaacttgtccgatcaattataagtatctaactccccaacatcatcacttttacaccacttatcactacccattaaaacaattatacataagttaaatattttgtatttttgagatcttataagagggaatctatttatgcataagttaaatactttgtagtttttgagatattactaatgaatcttatctttaggtgtgaccccgtggactagtaacaatttacaaggattattgatatagcacgtctaaaaatcttgtatgtttttattttttgtacttttattctttgttgaaattttattatgcagttacagaatcgtggttcgtatctataaaatatttgttttagtatcaactttattattttgcatctaattaattaattaataagttggtgattataaaatacggactcgcaagattgtttggattttgtttttggcacgctaaatttgtttaattttttaaaattttacaagatgtcttaaataaattatgttaactactatcatataaaaataata

SEQ ID NO: 4313 - DNA, 2649 bp, Cannabis sativa
agaaatattctatcagctatttccacaattcagcccttccacttacaacagcccactaatacaaaaataggaaacaattactataagaccagaatacaaagtaaccccctgccaaagccattcctttggtctcctagagtgaacaaagtgtattggggcttatcaccttgtgccttcaaaagaaacatattaccattacaattattcccatgtttacatcttttaaagaatattttattttatttttttggcgtccacttttcttcaacactttagtgacatcagagaatttttaactaaatcaattcctaagggctcgtttggtacgccgtgttgtattgtattgtatagtattgtgttggattgtattactacaatactatgtttggtattgagttgtattaatagattgtgtaaaactatattatcattaacataaactcaaccccaatcctaatcccatccctggagaccctggatcgaagttggactccgaaccccgagccctttgtaaatattataatacaaactaatatgaattatttgttatgtattcacattgtattaaaatttatgatcgtaataattaatataataagtttttatccaaatatagtgtttattattacttaatacaatatgaccggcctaccaaacgagtcctaaaggatggaatggcagagagaaaacactgaaacattttaggataaaacaaataagcttaaagcttagatctacaaaagcgtacctcttacacagttcaccttctagagtacaatcaacccttcccataattatacgtccatccaactctgggtcatatctgaatacaagcaaaaaataaataaataaataaaagaacttcagtgtaaaggcaacaatttcttaataatagttgaatggaaataattaaaaaattacttttctcgtattgtcctggctgccttctcccaagaaggtttctaaaacaaaacaatataagcattaagtacaaatgggtatcttaataaaaaaaaataatgcaaagataagctctcctttgattgcaagttatcaatgtaatttaagagattcctctttccaacaaggaggaaagagaggaagtacgaaaaagagagaagtacatatgcacatggatatagtgtacgtgcatcatagactctcaccaaaattcagtgatagaagtagaaaatttaccaggcgattactccagtagcaccaaggagcaaaaaagttgacaattaaaactggatatctacaagagaattgttacacaaattatgggaagataacactttaattagatagcataaaaagtcttccatggtcaaatcattagctgagaattgatttaaacatggaccacttactggtgagaaaatttatcaaagttatttgctgttagagcaacagaaccttcaccagcttcttcatcaacttcatccccatgcttaatgaaatttgacattggttctgagtgaaactcagcaccagtaggttttaaatctgcatctatggagaatttacgtattgtttttgttatattcaacctgttctgaaagtgaggaaacttaatgtcaggcaaagtctataatatcaatcaaagtaacaaaataatagtgaagaataaaacctacaaatatatatatatgtatatgttaaccactacatttctaatagacctcaggattagatgtggtagagcttactaaaagaggtatttgctcgggtcattgtaatgaggacgagtattggtatagtatacatatgagagtagcaaagggaaagggtgtggaatgttttgttaaaggtgtaatacctgtttaggagagaaccaagctctcgaaatcttagatattcagtacaaacttactccattctcgctactgtcctattaattttgacaggttattcctatcaatttctttataaggatattaagctctaaatatgtaaactacaaagctaggaactcttagatgaactcagattttcgtttcaaagcaactcattaatccttctacattttgctttgtcttgtactagaggaatccttactttagagatgcacaaactcgatcaaaaagaacaattaaagtctttaaactttgaagggaacaggattagaatagatctatacagaacaatgagacaactaaattttatatgggaagttttatttgcaactcaaaaaagtataaaaacaccctattttactgtttttattttgaataaattaaattatgcatgtttttttttaatttgtactcattctttctgatatttttttttctttttcacattctaaaaaaatacgtttttaaaccaagaaatatataaagttttattagagtaaaaaaaattgatatgcattaattagaaaacggtatatgaaaacgaggtaaaagaaaatattgaaattattacatagtaaaatataaaagaaaaattatcatcagtaaatttaaatattaatttcagttgatatttttttaatattggagcgcaaatagattttcttgtggtgtaaacataatagtattaaaggaaacttcatgcaccccttctcatactttttttcacttggaatatatgaggaataggaaactatagcagttgctaagaaggcacccatgagaaacttaaacc

SEQ ID NO: 4314 - DNA, 714 bp, Cannabis sativa
aataataatcctcctatctataaagatatatgtgcacatggaataagaagagtgtgcagtatttttgttatctttaagttgggttttgggaaattggtgtaaaaatatggatatccatgcagggcatgcatggcattctaatataatcagaatcagacgttttggatttggggcagtgtgcctacacacccttccattatttccaactctataccatattaatgcttatgttcattgcatgtgctccaccactccacaatacctatatacctatatacatgtatctatagagtaatttaaggacatggaatatgctctttgaacttttgtttgaccgttaaaaattcctcttaaactattgagattgttaaatttaaggacttttgagtaatttcatttaattttactgtttcagtgattgtttatgtactaaaccatgctctccaaactttgatatctaccaaatcatttccctcaaactttgattttgatatatactaaatcatgcccctgaacttttattcatgttagaatttttttattaaaattagataaacctatttaaatttaacaatcttaatagttcaaaaaaaatttttaacagcaaaaaaaaaattcaagggacatgatttaaaattactaatttaccatatctatatatgaaaataatacactattttctatgccctatatatatatgtaatctttgtcata

SEQ ID NO: 4315 - DNA, 651 bp, Cannabis sativa
atgggaatttgaaaattatgtatatgtagtgtaagaatagaaatatataattaacaacatatatcatgtgaatgaaatatatatattcttttctttttaagaatgaaatagaattttaagaatagaatatgatttgttttttctttttaagaatgaaattaaattatgaaaagttaaattttgatatttaccaaattatggtaattaaattttgatacgtactaaatcatgttttttaaacttttattcgtgttagacttttattactaaaattagataaaaatctttaaatctaacaatctctataataaaaaggaatttttaagttcaaggagcatgatttgctttatgtcaaagttcgaggataggagggcaaaaatcataattatgatttttgctctctaaacaccataaatacttcatgataatgctcttatatatgtggagtgttagggtgcaatactaaggccaactcctatagcaataggcctgcaaaaatccattaataatgtgatttttcaaaaaatcactccaaccgcagagcaagagtaacatcaattttgggtttgtctacagtattccaccatattttggtgggcattgtagacaacactaatatattttttttttttactttttaataattatata

SEQ ID NO: 4316 - DNA, 1875 bp, Cannabis sativa
atggataatatggatggtgctgagctctatggccgagtcctcaccgtcaattatgccctccctgagcgcatcaagggtggtgaacagggttgggccgctcagcctagtaagaaaccactatctttccccttttattctaaaaccctttttgcttgactcaatttttaggttaagtactttggattggttgagtttgctaattttttggtgatggaattttttcggtgattaaatttgtggtttggtttgtactgcgtatgcgtaatttgttgaattcctcattcaagaatttggggtttaggattttagattgagtgtgcactttacatccaagattgttccttttctagttctatttctccctagttccacgagattacttgtttgatagtgtagtcgtatagccgtatgggttggtagttttctgcgttattatacgaagtagcttacctaaacattagatcaatgcagtagcccttgatactgataggcgaagaaagattgtttattatagctcgaacaaaaaaaaggtcttttgggtctctagcattgtttttaacaacaatgtatgatttgctttgctaggaatatagaaagaacctatggcattactgaatcagcagttcaatcaactagcttttggtagctagaaagtgttacattttctgccccaaagaaaagaaattggcaatttgagtcttctaattcattgcatatttacttcatatattttaagcatcgttgcataatgcataactgagaatataggaaggaaaaatcagatgaatgcatagctgaagacagttaactttttaaatggggtagattgggccttctagttcatttaccagttatgactttcttgcatgtcaataacttagaatgtatggttgcctttaccacactcgctcttacgttttgatttcttgtcttacatgaataacgtgccttctgttttcttttaacagtttgggcggatgcggacacttggtttgagcgtcaacaacaagaagaggaaatgctacgtattcaggcagaaaaccgggctgcgatgcaggaggcagaagatttgcacagaaagaaattggctcaagagcgagaaggggaaatagaagaaacagaaagcagggatgatcccatggccatggcagaggcagaagttttgaaacagaataactaaactaactgctatcaatttaatatgattacactctggagaagttttttattagtaaatttgcctgctaatttctttttttcttttttggtcgggaagatgatgaagccaactcattttagttttaaaagtaaccactggtgaggttatttggcatgatatggcgatgaactctggtaaacttttgggaatataatcatagacaatatcaggaaagcccagctgagcgctgtagtcttatatttccatttgcttagaatgaacacacggaatgtgagaaaaggtcttatcatttccaattgttgtgaaaggaatacaatttctatagagcgtgacatgtaacataatatcagaaacaggtcgccaatgtgaacctcttcgtactcttgcgtgtacagtatttgaaattcaaatttgtaattctctttatctacctctctacttttccaattcatttgtcttattacgtaggtggacctgcatacgcatttgtagtataccacattaactgtgaagaaaattcgactttttctcagtaaaatgtaaaatacaatacacaaaattaggactaaacattgggtgggttgacagtggttcggattgaaaaaattgtacctggcctgtgcacgtgttgcgggttggcgggttttggattcacaggttagcaggtttgggttgagcaaattgatcgggttaac

SEQ ID NO: 4317 - DNA, 1862 bp, Cannabis sativa
gattcttcatttttggtgagtagattgatttgggtttgcagttgcagatttgaatttgtttatatatgaatgactactacttcatatgagtgcgtacgtagtatatttattacaaccactaaattctttcatttattattcttttatttttaattaagaaaagtcttgatggttgatttttgcccattttatacgttccaaatttaacaaccaaaagtctacactatcactcaataaattcttttaaatcttacataataatatttaggcacatgcaagccttattcatgggtccaacacacttaaattaaataatagatagatgacaataacatatttctatataattactcatttttctccttcaaaataaatactgccaattattttgtgataggtctaagattatgttgcacatatataattgaactgtacattattattagtattttagccatttttgcaaattattttgtattaaatttgatagcaatttttgattcatctttgtaaaacagtatttatgcaaatttgatttaattaaggagatgacttactcaaattttgggtctgtccaattcatttctaacaactgcatttcatttatttttgaccaattgaaagtttccccatttcacacgttccaaattatattattacattacacaactatctactgattaatcattattatgtcaaaacgttgaactataacacctcatattagtaatatatatttatatatacatatatattatttatgaagataagtaagataagtaaaacactcacacatatagttatttatgaagttgatcactttcttatgagaaaaataattgggaaagatgaatagcgtgataaagcagagcaaacgattaattccacatttttggttagattattgaaaacaagttgtatttactaaaaaatatggttgtctttaaggtaggggctaggaatgttgcccaaagcccctcaacctaagtggtttcctattagagttagtcacacattattaatgtatgaaaataaattattatatttaagatcagtatgctactttttctattgttgattggttttgagatagaatcacatttaccttattctaaattctaacatggtatcagagccgcttgtgatttgctgtgagccttctcccttttaacctttagacgtgagggggtgtattagagtaaatctcacattgctaatatgtgaaaataaattagtatatataaaataagtgggctactcctcccattgttaattagttttgagatgaaaattcattcactttatcccaaattctaacatggtatcagaactgtttgtgatccgttgtgagccttttcccttttaacctctatttgatgtgaggaaggtgtattagagttggtctcacattgctaatgtgtggaaataaattaaattaccatatataagataagataagtgggctactcctcccattgctaattggttttgagataaaacctcattcattttatctcgaattttaacacctcctaatagtaatttctttatttttttaacattaacccataatgcctcaaccaaatatttgctaggaaaatattttataaaagttatttgaatttcattttattttttaataaaaagccaatttttaaaattttacccaatactccataaaaactaaagacaacccttgacagtacttacaagtttagagttattatataatacagtcttgaatttatattccttattttatacgttccaaatttaaattagaaatctatattgtcactcaatcaacttcttctaatattaaatcttaacaagtgacctttctccattgactacttatgact

SEQ ID NO: 4318 - DNA, 589 bp, Cannabis sativa
ttgattcccgtactgaaaacctgccacgcccttcaaggttcgggagagacacttctcatcttgctctttggaaagcaaagactgctgcaagtaggcttccgcgtatccctttactttggatgcctcttagtgcggggagacccttcaacaactgagcgctttaaaggacttcgattaatggaagattaattgggccttctctattatactctaagtgtcattcttgcataaaacacggataacattcatgattttcttagatcaattgatgaaaaaccacatcaatattattagatataaaaattattttattcgtatatatattcaacgtgtgcattgattacaagtgtactaatattctcaatatgaataatatagagtaatttttgtttaactttaatatttgtttagatgatttttgacataaaaaagaaattgctctaaattttaatattgaatataaatttaataattatgtgttataaaaattagttaatattaaagtttgaaattgtggccctcttgcatagaattcttggctccgcccctgcctacgtagaaaaagcattaaatgaagaaacgggtaggg

SEQ ID NO: 4319 - DNA, 1018 bp, Cannabis sativa
tagttaacaactcgttatatagattctttcatcaccacaaaccaatattccataatgataagttgataatccaaaaatttgctctctcattgaatatacctcgggttgattgtgctgattctctagtttcaacggtcaataaatgggtcaaatcagttatggataatggtgttcgagatttatttttaaagatctccataagtggtaaaccatattatattctgcctgaaaatacttttcaacatggaaaatcatcaatcgacggaggcccctcttattccaaattttcctttttacaaaggcttgtactatactctgtttatataactgaaaacattatcagagacatcacacaaaactgctccaacatcgaatttttaggtctttattgctgccacggactggaatcatctcttgatatttccaatctaagtaaactcaagtgtttgaaagttttgggcaatcgtgaacacttgtcaagagttaacatcaatgcaccaaatcttaccaccttttgtttggagtattcttatgttcacagtaatcaccaacaacgacgttgttgtgagatgagtttgaattgccctaacctcaaatccttaaggttggcccaatgtggcattactgatcgcacacttcattcgaatctttctaggttgcctctcctagaatccctagatattaatgactgttacttgttgcatatgataaggatttcagcaccaaggctccaaaacttttgtcttagtggaagtggcaacattgagagtgttggagttaatgctcccttactcgcatcaattgaatacacatcttataatactaattataaagacccaattatattcttccccaacaatgaacaacatccgactgaagttgtttatgaaattgaccgacacaatgtgcttgaaacttcttggttccttcagctaagggaatctcttcaagttttctatactcacagtaaaacattccacgtatacttcgaagacagcaaggtatatatatatatata

SEQ ID NO: 4320 - DNA, 587 bp, Cannabis sativa
tgaggcacatcaataatgttgaacgccattaggaagcttaagaagacaacgtgacttctcttgtctgggcatcaaggatcgtcgaagcgacttctcaagcaagatggttatctcctttagcgctggtcgatgtcgtagttgacctggccacgaatcatgaatctctttggtgtccgacgacgtaaccattatcttttgaagcttcagtggaggttcgaccattggttcaacctctttcttccttagctctggtcggcaatgcatcccccatgagcttgatgatggtggtcgaccacgctgctcttccaccattgagcggtgtcgtgtctcacccatccaactaagaacctccaaccaacataaatcgagtaagacaaaaaaagttaccggtgttagtgtcctccagtggaacacatcgatcatcttttgtagctccggtgagctgcggtttgactttgatggcgtatctcaaagagccatcctatggttcttgactataagtgttctcaagatgcttctcaaatctaagacctcggatgcttcacccttatcagcttcgtctcgttgttcatcctcctcgatggtag

SEQ ID NO: 4321 - DNA, 622 bp, Cannabis sativa
ggactttccttagcaccaagtctctggtcttaaaggcatgcaggaggactcttgaattatagtatagtgctgcactttgttgatacaccactaatctcatttgggctacatcttttctttcctccatgagatccaagttttccgccattgtttttccattagcctcctcgttgaaattcttcagacaaaacgagttgagtttcatctcaataggaagtatggctttgcacctgtaaaccaaggagaaatgagttttgcctgtgggggggagaggggtgtgtaactatacgcccagagtacatttggtagttcatccacacatctgcctataagctttcccatctttgttttgaggttcttctagattattttgtttgccatctcaacttgcccattagcctgagggtgcactactgttgagaatcccctcttgatgcctcttttagagcaataagaactcagcaaatctccttcaaattgggtcccattgttagtgatgattctataaggtactccaaatctgcatatcaagaacttattgatgaaggataccacttgtgtagtagtgatgctaaccaacgcctcggcctctacccacttggtgtaatagtctattgccacc

SEQ ID NO: 4322 - DNA, 1503 bp, Cannabis sativa
gaaacgattgatgaagctctcaaacacccgagttggaacaatgcaatgaatacagaagtcattgccttaaagaagaacagaacatgggtgcttgttcccccatcagacaatcaaaacttggttggcaacaagtggatatttcgaatcaaactgagagcagatgggacagtggaaagacttaaagcgagactagtagccaaaggtttccaccaaagacctggaattgattatggtgaaaccttcagccctgtgatcaagccctcaacagtgagaatcattctcactattgctgtatctagaggatggggtataaggcagctggatataaataatgcctttctcaatggcattctggaagaagaagttttcatggcacaaccacaaggattcgaagaaaaagggaaggaaaactgggtgtgcaaattgaacaagtctctctatggcttgaagcaagctccaagagcttggttcgacaaacttaaaaacaccttaattggctggcaatttgaaaattccagggcagatacatccctgttcttctacaagtctgagaaaagtataatcctagttcttatttatgtcgatgacataatagtgactgggaatgatcacaacagagttgatgccttcatctctagacttaacaaactattttccttgaaggatttgggacagttacactttttcctgggaatcgaagtattccgagacaatactgggctgtatttgactcaaataaggtacattgaggatattttaaagaaagttaatttgagtaatctcaagccatgtccaacaccaatcacagctggtaaaccattgtccaaagatgaaggagaaccaatgcacaatccctcggcttacagaagtattattggctctcttcaatatctttgtcacacgagacccgatattgcatactcagtcaacaaactgagccagttcctgcagggtcctacaacaacacactggagtgctctgaagcgtgtgttaaggtatttgaaaggcaccagtaccctggggcttcatatcagttgctgcaacaggttgaatatcaccggtttttcagatgcagactgggcttgctgccctgatgacaggagatctgttgcagggtattgcgtgtacttgggagaaacattggtgtcatggtcctctaaaaaccaagcagtggtgtccaggtcaagtaccgagtccgaatacagagccctggcacatgtatcagctgaaatttcctggattgagacactgctaagggaactcaaatttcccttctgtcttccctctgtaacgtggtgtgacaacctcagtgccagtgctctggcttcaaatccagtattccatgctagaacgaagcatattgagatcgatgtgcactatgtgagagataaagttctacagaaacagttagaagttcggtacatcccatcacatgatcaaattgcagatttgttcaccaaaggcttatctaattcaaggttctcatttctagttgacaaactt

SEQ ID NO: 4323 - DNA, 1941 bp, Cannabis sativa
ctctctctctctctctcttcactaggtattgtctagggtggaagacagaatgttagaatatttgatctgtacttacagagaactcaagtgtatgtatttttctttgagcaataatgatataccaatttgttatatggtctctacatatgattgattttttccttctcatcatttaacagaatgattaatctagggctataatataccttggaagcaaaattaatattatttttatatatataatatatatggacgtatataatagattttagttatggtttttttgttatttatttatttttttaattgtaaatttcattcaactagatcaactcgacttcaacaatattagtaatatcaagaaagagattatactctaaaaaaatacgatcaacatataaacaagatgttttagccataaaatgatagcaacctgattagcagaccttttgacaaaatgtatagaaatatatccctgaaagaagataaaagttgtttacaatccaaaaatggttgacaaaactttcaaatttctaacaacttgtaccaataccagacaatcagatattcgataatactaacattcgaaaaatcgtgcttcaaccatgataacatttccttgagagctatgacttcagcaatcactggaagagcttgcccaatctgcagtccggtaatcctagccacgacccgacccttgtgatcccaaactatcccaccaaaaccatgccttcccctcgtcaaataacacagcatcaatattcacctttagttttttataacctagtttagaccacatctcagccccatctgatatcaaatatcaaacacgagaaacatacttctttcttgagcttttctccactgatcatgagtgatatgagttagattgacaacaaactccaacgacttttcctacccttccacaagagttgatttcgtgcgaaataaattacccaaactaacatcaccgcctaaacactttgttcctcacccagtcgtgagaacaaatgaagaaactagtccccaaacgaccctgcatcaattgaaatcatagccaaacctgctacccaccaacaattctgcacaaaatcacaggcaactaaacaatacaaaattaattcacatccatgacaaatcagacacaacaaaaagacatccacatgtttagtcttcaactgaactctcgtgggagacacccactaatcgccctcaatacaccattttttgcctttgagagaagctttaatttccaaaatttcttccaaaaccccacaacctccccgtccacactaccctcacggtttcttaataatttaaacgcactcttaactgtatgttcaccaaaagattcaaacccccaatacagtaatccttagtaacagaattagaaagggaaatatcaagaatactgactgctacttcctcatcaaacaaatctatcacaacatcaacatctcaagctttctcacccaccacaaaaatactacgaacctaattgtcattagtcaaactaggatctaaactatcttgactcgaaattgacccattcaaaagccacagggtatcaaataaaagaatctcctctccattaccaattcccttccgttcccccttatgaatcaaatcctttactacaataagacttctccaaatataacttggattattaccaagttctggcaaaagaacgttttcatttttaaagtaccgatctttgtacactctaaaaaccaacgaatcaagcttggtccagagcctcgaagcatctttacccaacatagtcaaatttaaatcatgaagagagcggaaccccactcccccaacctccttactacgtaccatcctctccttactcatctacaaaattccttgatgggaattcgtagataacttccactaaaaattagtcattaattgttccaaatcatgacacgttcc

SEQ ID NO: 4324 - DNA, 2113 bp, Cannabis sativa
caagagaattctgagatatttagttggtatttcaacactaggcctctattttacagctggttctgatcctaatcttcatggttactcagatgttgattaagcaggatgcagtgatgacaggaagttcacctctggctattgcatgttcttaggcagtaacctcattagctggtgtttcaaaaagtaaagtgtggttgctcgatccagcactgagtccaaatatcaagctcttgctttagctacatcataaatcatatggttggaatccattctccctgagttgtctattcctgtgtcaacagtcccagtgttatagtgtgacaacttaggagttggtactctagcttcaaatctagtttatcaggctcgaaccaagcatatagaaattgatgctcactttgttcgaaacagagtacttgataacaagctggatgttcaatacgtggattcctcataccagattacagacatcctcactaaacctcttcacattcctcaatttaactatttcaaaaacaagttaagactcaagacaaatgagtataacttgaggggagatgttagagatagtcaggactagttttcccgttggcttttattttctgttagttagttacaagtctgttacagtttccgttggtggttggtgtatattgttttatctaatgtaactaactattgatatacaaaagcctgaagcctaccattgcaaggtcgagcttcatttccattctcctttctttacattcttacaattagaatacgatgcatactggaaaacatacatatatatatataagaattaatgtgtaaattcaatggaaatgaataatttaattacataagtaataattaatcacacttattaaattatacattcagatcgaagaccttgagttggataaacattaattttcatcatcaaacttagtcaaatatgttggttgatcattgaaaattatttatattcgattcttgttgtattcacacaatatataaaaaaattccttatgatttgaccaaaagatacatacatattctacctagctttaaatgaccaatgtaaatggttgaataaagaaatggtataatatgataatttgaaacttgtgtttggacaatcacatgctacatacatttagttcctttcatgtgtatggaatttgtacaaaggaaaattctaggggaaaaaaaggtttgaggtgaatagtggtctacagaggtttagggcaccccatattaaaagcatgtgacattcctcatcatctcatcaaatgttaactactataccagttttgttttatttgatgtgtattgtgtatacatttttaattttcttttcttttttttttttttgagaaaattttaagtttctaatttttatggagatttcttctgtctaatatggtggaataataacataaaaaattaaaggaattttacttttatttggagcaagaggaaaaatggtagaaggataaatacatagtatgtatgaggatggatagagaatctagcatgagggtattttgggaagagaaattgagaggggcaaatggttgcgtggaggtggtcaggattctacttttggaatgcctacgctgctagctttttttttttttttttggttcatattaaaaacaacaacaaaagttttaaaaagaatgaataaataaataaaaagatataagaaagaacaaagaatgaaattttttgagggtttgcgggtttggtgggaatgcctttcttaatttgcttcccactctctacttagatctagagccataaaaaaaagaaaagaatagaaaaaggaaaaggaaaagcatttcagttatttatgtactactaggagatgcttttagatgcccttaagggccagtgagagattatatggttgaattgaatgaaactacttttaattgctaaactagaaatgaattagttttttttttaaaaaaaaaaatgagtgttcattgataaataaaattagacctcacgattattacaaaataattattgcaaaatagaaaaaattcctaagttaccaaattgtttgtgggtaaaggcctacttggccacattgtgggcggtaaaattacaagatttaggtata

SEQ ID NO: 4325 - DNA, 1413 bp, Cannabis sativa
aagaactaggtagaataattgattgatcctcatcatccagtttgacaccaatattgttaagatccaaaattattctattaaagtcatcaaaatattttctcagttctttagtgtcatctattctcaaagtatacaattttttcttgagatataatttgttagttaatgatttcttaaagtaaatcgatgttagcctcttccataggcttagagttgattccttgtatgaaactttcttgagaatctcatcaccaaggctcaacagtatggcagtgttaacttttgatttagtgtctttctttatctttttatctctcaattctttgacaagctcttcatcaatggttgctgcaattccttgatgaacatagagttttcattgattctccatagactaaagtcattagtcccggtaaacttatccacctcaaaatttgttgatgtcatctttgagtagagttctttaaaccttcaaacaattcttaaaatcttagagcaccttcaactaaactctgatattatttgttgtgatttctaatcacctaaattcaagaacaacacaacaagaactcgagacacaagatcaaagatgaatttaacttaaccaacaaagcacaacccaattaatacacaatatgaataaacaagaattgaattactagagacaccatacacaagggaagatgaaaacaaaatgattttattgatcattaagtaaattgagctttcgtacaactaaaaaacggaaagtaaagaaacaaaattagggagctatgacaattggttctcacattaggatttggtgatcaaacacacactaaaatcctttgacatccctccaaacactctccgtttgctcagtgggggtgaatgagaaatgaatcacccctttataatttatatacctattggtgatactgagatgccaaactcatagaaacaggtgagttggcagttggaccaactaacaaaaactgtcactttttatatatgtggtgactggttaactaaacataatattactactacactatatgtaaattaactaagtacattattgattacaatgttgattaactgttaagtctgatttgtttatcatgacaacaatacattgtagatacgacttttattagtatagataaatggtttgaaaatatgagtatgtaataacgtttcaaattctctttataaggcattcatctctctctatatacaaaggagagaaagaaaaaatttaatcaaatctatatttcttaagagataaaaataaaaaagaaaggattttatatttagctatcaattggaaaatacaactgaaaaagtaaaacaggcttcaagattgtaatataaatatctaggtcttattttgcaactaatcgatctatctttctctttgaatgtataaattag

SEQ ID NO: 4326 - DNA, 1251 bp, Cannabis sativa
aaaaaaaaaaaaaaaagaatgagcagcagcccacccaccaaagcttcaatcaaagaatccagttgatccacaagaaaactaaatcaatacttatcttaccagtatgggccttattagcaaaaataccaccgaccaacactttacaatttgaaaggagaaccgaactttgccagtcatgcaagaaacatagggaagctgcatgaagaagaacactggtctctccttgagagggagaggagatatcaaacctaacggtcaaagcttccaacacaactctgtcattgttcttcacaatgatagctcccatcccacagcccacgagcctctacaagcaaacatccagaaaaatacaaataatgtttgctgggaagaccggcaacacgacatcagcactatgatctataggagaacttctgatatcaagagtcacaatctaaaggatctggtttgcagagttttgaactaaagctttgataccgccactgttgggtaaatatcctcatgagtcatgataagctttattccttgccatccacagctcatagcacaaacaacctgcgaaaatactaaaatacaccttgagatctaaagggatgtcaagatgaatatcggggtttaagatccaatttaataaggcaaaagaattatcaaaaattaactcatcatatttcaatcccccactgactaaaaaaccaagctcctttagccgtaggacatttaaaaaagagatactagtcctcccaaacacgacaaattgagaaagtcattcttgccaaaaacctgttggagatgaatactaaaaggcagaatgtctctcacaagcttccacaagaaaaggtggagacgttcatggatcttaagcttccaaagatctttccatagagggtcaagataggcccaccgatgcttaatcaaaactctataagccagtttggtaaagaaataagttccttaggatgtgtaggtggcaacctcttcaaaaaaatagtcgattcagccaggctaggcacaaaccagtggcgaagcttatacgagtcccaatcaccatttgccttaaccagataatgggtaataaaagatggggagacctcaataataggattaaaggcagttcggtaattatcttgttaatttgttgttgatttttttttttattatttgtatgttattttttattattatttagatgttgttttcttattatttttatgtacttttttggttgttttcatgcagttttttttttttttt

SEQ ID NO: 4327 - DNA, 990 bp, Cannabis sativa
aagaattttaaaatattgatgagcttgaggtacgcaagcagagttttgtatcaggcagggaatcgggtggtgcagggaatgaaggaccagatctcaagatgtgattcaacggttaagatctctttgagagattcttcttcaaagcagagtagggtgttctctggaggagcagctgattccacttctgctttcaaggctgccaaaaacgacacacataattataagcaggcggaggagtctcttcggaccgtcatgtatttgagttgctggggtcctaattgaaagttttatacctaatcatgtttgtaaatacttggtgtacatatgtataaaccttaaccctcgatccttgatcgtctcaacatataaatattaatcaatatcttttcgctccttatatttttggtgactttttatgcatgtattgtaaaattctgattttcgattactctcagcaaaaacacacgtcatatgccaatgtatcatgtgtatgtactaatggtataatttgattttgttattatgctatgttaatagactagttattaattgaagcaaaattcttccttcaattttggcaaaatttccttaaacttcttcatagagaagattcaataaagtgtgactgtgatgtcacagatttgttaattattttttaatgagctttactacattgtttatctattattatttctcattttcagattttatataaattaacgctaatctaaaataggcggattggattaaagctattcatatctttctttctttatcttggtggataagaaatatatgtataaaactattaatgggtaatgatttaatatttaattgaattttcttttaaggaaaatcataaaataaattagattttaaggtcattacaaataataagggaattaccatatatactattttttttaattttttaatttttttttttcaaatttacggtttagaaacagttgtagcgctagttgcaatagg

SEQ ID NO: 4328 - DNA, 2510 bp, Cannabis sativa
ggactactgactgtcacacacttggtacattttagtgccagttacctcctgtgaccatacctcttgtattctttttttcatactcgggatgggacttccacatcctaaaatacttgataggcttcctcccactagaaattttaggatacagaattagcacctcaagagtgtgatcaaagagaccctcactaaggaaaacaacttttgcattagagaatttatcaatccgagattaattagccataatcctataaatttttgacaaatcctatctttcccatgctatttgttgctccatgtataaaagtttccactagccttgacatcttcaagatgacagtattctacacaatcaaggaaatctctattagcatggaatttaactttgtggccaattctctcttcttttgctaaaatatcattgaaattccctattattaaccaatcctctaaggatgctaattcttgtaagtcattccataattccttcatttcatctcaatcattgaaagcatagattaaagtaaccaaacttgtgaatgtcaaagggttccatgctataatgagtcttcctcctaagtgccatgctatatgagatgagaagaactgttctacaaatacattcaagtacaatgccccaagcttctgggccttgacccttgtctcaaagagaccaacaaaacccaacaccttgacatctaataaattgcttaattagaccctgtttttgttagtaattggctccttagacattccaacatgaaaatttatccaaaaacaagagagggatctcccccctctcttgtgttatccctttcagtcctggttgtccctagacttgtatttccattttcaacttgcacatctgattccacatttaaagcttggaatgagttctcagtatgtgtatcaactaatttttcaacctctttagtcttctttcttttagtcactatttgaaatctatcaacattcactttgttggattggactatactaactacgtatacctttcttttgtcctccttgataacccttttcaagctcttcttactcagttgtcaaatgtcccataccaaagcaatgagagtaggtaataggcttccattcatacttaactcctacttgagtattcattccatgcttatctttaaacttcaaagtatttagaaactcctggttcagaataacttcaattagtatttcagggaagttaagcctatcacgttctctcgtgacaaagtcgaccatgatagaggtcccaagttagcctataatcttgaatagtgatctttatccccgatacttcaggtccaaatcttcaacctgcacttgggacaattttaacatcttcctgatgtctcataatgaggattttggagacagaattggatatgattcagaacctcttctcccttgcgacactcttatagcagcttcatcatcatcaaaggtctgcaatgaattaatgtcaagcactacatccatgatatttttattcaattcattgattcaataccacctttttataaatattgatatttattgatattttaatttaattttttatattttatttaatacattataactaaaattaaggaatttattttattaaattttttaattgttggaataattatatattttttagtagacatagttaaatatataaacatgaatgtttaatttagttttatacttaattatgagaaaaaaaatttaaaaaattacttttaaatggatgtatttttatttgacaataatcatgattcttcttttttttttttcttacacaaattgttatttataaagagttttgtttatttgcaaaaaaaaaaaaaaaaagagaagtttttccttgttttgactaaaaaacaagatttttttttttttgggaaccctctactcctgttcattctttatctctccatttcctttctttccccctcccgccaaaagaagaccctcttcttttatactacctcctttatttatctcattcttttacctttaagtgtcaacttacaagattttactttgacatatgtctattactttctataaggtgtctttacatattttgacaagtgtcctttattttatgttaggtgtccgtattgtgtatctctcctatccataatgtgtaactttcttaattaggatatttaagtcattagttttgtatatgttctctatcttgaatgtaagtgatcatctattttggatatgtttatgtcatcctgtccggagtatgtcatcccatgtaaggtatgtcacctcgtctgtcgactgatcgagatatgcctgtcaattgaggtacgcccgccgagataggccgggcgaccgagatacgcccgtcgactgagacacccgtcgaccgagacaggttttctgatctagatacgcccaccgaccgagataggcccatcgaatgagatacaccggtcgactgagataggcctgctgaccgagatacgctcgctgaccgagatacgccggccgaccga
